United States Patent Application Publication US 2024/0398993 A1 - sequence listing, part 5

SEQ ID NO: 13189 - protein, 2671 aa, Homo sapiens
MAADTQVSETLKRFAGKVTTASVKERREILSELGKCVAGKDLPEGAVKGLCKLFCLTLHRYRDAASRRALQAAIQQLAEAQPEATAKNLLHSLQSSGIGSKAGVPSKSSGSAALLALTWTCLLVRIVFPSRAKRQGDIWNKLVEVQCLLLLEVLGGSHKHAVDGAVKKLTKLWKENPGLVEQYLSAILSLEPNQNYAGMLGLLVQFCTSHKEMDVVSQHKSALLDFYMKNILMSKVKPPKYLLDSCAPLLRYLSHSEFKDLILPTIQKSLLRSPENVIETISSLLASVTLDLSQYAMDIVKGLAGHLKSNSPRLMDEAVLALRNLARQCSDSSAMESLTKHLFAILGGSEGKLTVVAQKMSVLSGIGSVSHHVVSGPSSQVLNGIVAELFIPFLQQEVHEGTLVHAVSVLALWCNRFTMEVPKKLTEWFKKAFSLKTSTSAVRHAYLQCMLASYRGDTLLQALDLLPLLIQTVEKAASQSTQVPTITEGVAAALLLLKLSVADSQAEAKLSSFWQLIVDEKKQVFTSEKFLVMASEDALCTVLHLTERLFLDHPHRLTGNKVQQYHRALVAVLLSRTWHVRRQAQQTVRKLLSSLGGFKLAHGLLEELKTVLSSHKVLPLEALVTDAGEVTEAGKAYVPPRVLQEALCVISGVPGLKGDVTDTEQLAQEMLIISHHPSLVAVQSGLWPALLARMKIDPEAFITRHLDQIIPRMTTQSPLNQSSMNAMGSLSVLSPDRVLPQLISTITASVQNPALRLVTREEFAIMQTPAGELYDKSIIQSAQQDSIKKANMKRENKAYSFKEQIIELELKEEIKKKKGIKEEVQLTSKQKEMLQAQLDREAQVRRRLQELDGELEAALGLLDIILAKNPSGLTQYIPVLVDSFLPLLKSPLAAPRIKNPFLSLAACVMPSRLKALGTLVSHVTLRLLKPECVLDKSWCQEELSVAVKRAVMLLHTHTITSRVGKGEPGAAPLSAPAFSLVFPFLKMVLTEMPHHSEEEEEWMAQILQILTVQAQLRASPNTPPGRVDENGPELLPRVAMLRLLTWVIGTGSPRLQVLASDTLTTLCASSSGDDGCAFAEQEEVDVLLCALQSPCASVRETVLRGLMELHMVLPAPDTDEKNGLNLLRRLWVVKFDKEEEIRKLAERLWSMMGLDLQPDLCSLLIDDVIYHEAAVRQAGAEALSQAVARYQRQAAEVMGRLMEIYQEKLYRPPPVLDALGRVISESPPDQWEARCGLALALNKLSQYLDSSQVKPLFQFFVPDALNDRHPDVRKCMLDAALATLNTHGKENVNSLLPVFEEFLKNAPNDASYDAVRQSVVVLMGSLAKHLDKSDPKVKPIVAKLIAALSTPSQQVQESVASCLPPLVPAIKEDAGGMIQRLMQQLLESDKYAERKGAAYGLAGLVKGLGILSLKQQEMMAALTDAIQDKKNFRRREGALFAFEMLCTMLGKLFEPYVVHVLPHLLLCFGDGNQYVREAADDCAKAVMSNLSAHGVKLVLPSLLAALEEESWRTKAGSVELLGAMAYCAPKQLSSCLPNIVPKLTEVLTDSHVKVQKAGQQALRQIGSVIRNPEILAIAPVLLDALTDPSRKTQKCLQTLLDTKFVHFIDAPSLALIMPIVQRAFQDRSTDTRKMAAQIIGNMYSLTDQKDLAPYLPSVTPGLKASLLDPVPEVRTVSAKALGAMVKGMGESCFEDLLPWLMETLTYEQSSVDRSGAAQGLAEVMAGLGVEKLEKLMPEIVATASKVDIAPHVRDGYIMMFNYLPITFGDKFTPYVGPIIPCILKALADENEFVRDTALRAGQRVISMYAETAIALLLPQLEQGLFDDLWRIRFSSVQLLGDLLFHISGVTGKMTTETASEDDNFGTAQSNKAIITALGVERRNRVLAGLYMGRSDTQLVVRQASLHVWKIVVSNTPRTLREILPTLFGLLLGFLASTCADKRTIAARTLGDLVRKLGEKILPEIIPILEEGLRSQKSDERQGVCIGLSEIMKSTSRDAVLYFSESLVPTARKALCDPLEEVREAAAKTFEQLHSTIGHQALEDILPFLLKQLDDEEVSEFALDGLKQVMAIKSRVVLPYLVPKLTTPPVNTRVLAFLSSVAGDALTRHLGVILPAVMLALKEKLGTPDEQLEMANCQAVILSVEDDTGHRIIIEYLLEATRSPEVGMRQAAAIILNIYCSRSKADYTSHLRSLVSGLIRLFNDSSPVVLEESWDALNAITKKLDAGNQLALIEELHKEIRLIGNESKGEHVPGFCLPKKGVTSILPVLREGVLTGSPEQKEEAAKALGLVIRLTSADALRPSVVSITGPLIRILGDRFSWNVKAALLETLSLLLAKVGIALKPFLPQLQTTFTKALQDSNRGVRLKAADALGKLISIHIKVDPLFTELLNGIRAMEDPGVRDTMLQALRFVIQGAGAKVDAVIRKNIVSLLLSMLGHDEDNTRISSAGCLGELCAFLTEEELSAVLQQCLLADVSGIDWMVRHGRSLALSVAVNVAPGRLCAGRYSSDVQEMILSSATADRIPIAVSGVRGMGFLMRHHIETGGGQLPAKLSSLFVKCLQNPSSDIRLVAEKMIWWANKDPLPPLDPQAIKPILKALLDNTKDKNTVVRAYSDQAIVNLLKMRQGEEVFQSLSKILDVASLEVLNEVNRRSLKKLASQADSTEQVDDTILT

SEQ ID NO: 13190 - protein, 248 aa, Homo sapiens
MADFDTYDDRAYSSFGGGRGSRGSAGGHGSRSQKELPTEPPYTAYVGNLPFNTVQGDIDAIFKDLSIRSVRLVRDKDTDKFKGFCYVEFDEVDSLKEALTYDGALLGDRSLRVDIAEGRKQDKGGFGFRKGGPDDRGMGSSRESRGGWDSRDDFNSGFRDDFLGGRGGSRPGDRRTGPPMGSRFRDGPPLRGSNMDFREPTEEERAQRPRLQLKPRTVATPLNQVANPNSAIFGGARPREEVVQKEQE

SEQ ID NO: 13191 - protein, 228 aa, Homo sapiens
MADFDTYDDRAYSSFGGGRGSRGSAGGHGSRSQKELPTEPPYTAYVGNLPFNTVQGDIDAIFKDLSIRSVRLVRDKDTDKFKGFCYVEFDEVDSLKEALTYDGALLGDRSLRVDIAEGRKQDKGGFGFRKGGPDDRGFRDDFLGGRGGSRPGDRRTGPPMGSRFRDGPPLRGSNMDFREPTEEERAQRPRLQLKPRTVATPLNQVANPNSAIFGGARPREEVVQKEQE

SEQ ID NO: 13192 - protein, 223 aa, Homo sapiens
MEVQKEAQRIMTLSVWKMYHSRMQRGGLRLHRSLQLSLVMRSARELYLSAKVEALEPEVSLPAALPSDPRLHPPREAESTAETATPDGEHPFPEPMDTQEAPTAEETSACCAPRPAKVSRKRRSSSLSDGGDAGLVPSKKARLEEKEEEEGASSEVADRLQPPPAQAEGAFPNLARVLQRRFSGLLNCSPAAPPTAPPACEAKPACRPADSMLNVLVRAVVAF

SEQ ID NO: 13193 - protein, 1250 aa, Homo sapiens
MARGDAGRGRGLLALTFCLLAARGELLLPQETTVELSCGVGPLQVILGPEQAAVLNCSLGAAAAGPPTRVTWSKDGDTLLEHDHLHLLPNGSLWLSQPLAPNGSDESVPEAVGVIEGNYSCLAHGPLGVLASQTAVVKLATLADFSLHPESQTVEENGTARFECHIEGLPAPIITWEKDQVTLPEEPRLIVLPNGVLQILDVQESDAGPYRCVATNSARQHFSQEALLSVAHRGSLASTRGQDVVIVAAPENTTVVSGQSVVMECVASADPTPFVSWVRQDGKPISTDVIVLGRTNLLIANAQPWHSGVYVCRANKPRTRDFATAAAELRVLAAPAITQAPEALSRTRASTARFVCRASGEPRPALRWLHNGAPLRPNGRVKVQGGGGSLVITQIGLQDAGYYQCVAENSAGMACAAASLAVVVREGLPSAPTRVTATPLSSSAVLVAWERPEMHSEQIIGFSLHYQKARGMDNVEYQFAVNNDTTELQVRDLEPNTDYEFYVVAYSQLGASRTSTPALVHTLDDVPSAAPQLSLSSPNPSDIRVAWLPLPPSLSNGQVVKYKIEYGLGKEDQIFSTEVRGNETQLMLNSLQPNKVYRVRISAGTAAGFGAPSQWMHHRTPSMHNQSHVPFAPAELKVQAKMESLVVSWQPPPHPTQISGYKLYWREVGAEEEANGDRLPGGRGDQAWDVGPVRLKKKVKQYELTQLVPGRLYEVKLVAFNKHEDGYAAVWKGKTEKAPAPDMPIQRGPPLPPAHVHAESNSSTSIWLRWKKPDFTTVKIVNYTVRFSPWGLRNASLVTYYTSSGEDILIGGLKPFTKYEFAVQSHGVDMDGPFGSVVERSTLPDRPSTPPSDLRLSPLTPSTVRLHWCPPTEPNGEIVEYLILYSSNHTQPEHQWTLLTTQGNIFSAEVHGLESDTRYFFKMGARTEVGPGPFSRLQDVITLQEKLSDSLDMHSVTGIIVGVCLGLLCLLACMCAGLRRSPHRESLPGLSSTATPGNPALYSRARLGPPSPPAAHELESLVHPHPQDWSPPPSDVEDRAEVHSLMGGGVSEGRSHSKRKISWAQPSGLSWAGSWAGCELPQAGPRPALTRALLPPAGTGQTLLLQALVYDAIKGNGRKKSPPACRNQVEAEVIVHSDFSASNGNPDLHLQDLEPEDPLPPEAPDLISGVGDPGQGAAWLDRELGGCELAAPGPDRLTCLPEAASASCSYPDLQPGEVLEETPGDSCQLKSPCPLGASPGLPRSPVSSSA

SEQ ID NO: 13194 - protein, 980 aa, Homo sapiens
MGRRKGRSALSRSSLERVNQGEVKVIGRGAREGGGGQAWGTGGGGRDLSCGIPRSASPLAPLAAPAITQAPEALSRTRASTARFVCRASGEPRPALRWLHNGAPLRPNGRVKVQGGGGSLVITQIGLQDAGYYQCVAENSAGMACAAASLAVVVREGLPSAPTRVTATPLSSSAVLVAWERPEMHSEQIIGFSLHYQKARGMDNVEYQFAVNNDTTELQVRDLEPNTDYEFYVVAYSQLGASRTSTPALVHTLDDVPSAAPQLSLSSPNPSDIRVAWLPLPPSLSNGQVVKYKIEYGLGKEDQIFSTEVRGNETQLMLNSLQPNKVYRVRISAGTAAGFGAPSQWMHHRTPSMHNQSHVPFAPAELKVQAKMESLVVSWQPPPHPTQISGYKLYWREVGAEEEANGDRLPGGRGDQAWDVGPVRLKKKVKQYELTQLVPGRLYEVKLVAFNKHEDGYAAVWKGKTEKAPAPDMPIQRGPPLPPAHVHAESNSSTSIWLRWKKPDFTTVKIVNYTVRFSPWGLRNASLVTYYTSSGEDILIGGLKPFTKYEFAVQSHGVDMDGPFGSVVERSTLPDRPSTPPSDLRLSPLTPSTVRLHWCPPTEPNGEIVEYLILYSSNHTQPEHQWTLLTTQGNIFSAEVHGLESDTRYFFKMGARTEVGPGPFSRLQDVITLQEKLSDSLDMHSVTGIIVGVCLGLLCLLACMCAGLRRSPHRESLPGLSSTATPGNPALYSRARLGPPSPPAAHELESLVHPHPQDWSPPPSDVEDRAEVHSLMGGGVSEGRSHSKRKISWAQPSGLSWAGSWAGCELPQAGPRPALTRALLPPAGTGQTLLLQALVYDAIKGNGRKKSPPACRNQVEAEVIVHSDFSASNGNPDLHLQDLEPEDPLPPEAPDLISGVGDPGQGAAWLDRELGGCELAAPGPDRLTCLPEAASASCSYPDLQPGEVLEETPGDSCQLKSPCPLGASPGLPRSPVSSSA

SEQ ID NO: 13195 - protein, 1367 aa, Homo sapiens
MKSGSGGGSPTSLWGLLFLSAALSLWPTSGEICGPGIDIRNDYQQLKRLENCTVIEGYLHILLISKAEDYRSYRFPKLTVITEYLLLFRVAGLESLGDLFPNLTVIRGWKLFYNYALVIFEMTNLKDIGLYNLRNITRGAIRIEKNADLCYLSTVDWSLILDAVSNNYIVGNKPPKECGDLCPGTMEEKPMCEKTTINNEYNYRCWTTNRCQKMCPSTCGKRACTENNECCHPECLGSCSAPDNDTACVACRHYYYAGVCVPACPPNTYRFEGWRCVDRDFCANILSAESSDSEGFVIHDGECMQECPSGFIRNGSQSMYCIPCEGPCPKVCEEEKKTKTIDSVTSAQMLQGCTIFKGNLLINIRRGNNIASELENFMGLIEVVTGYVKIRHSHALVSLSFLKNLRLILGEEQLEGNYSFYVLDNQNLQQLWDWDHRNLTIKAGKMYFAFNPKLCVSEIYRMEEVTGTKGRQSKGDINTRNNGERASCESDVLHFTSTTTSKNRIIITWHRYRPPDYRDLISFTVYYKEAPFKNVTEYDGQDACGSNSWNMVDVDLPPNKDVEPGILLHGLKPWTQYAVYVKAVTLTMVENDHIRGAKSEILYIRTNASVPSIPLDVLSASNSSSQLIVKWNPPSLPNGNLSYYIVRWQRQPQDGYLYRHNYCSKDKIPIRKYADGTIDIEEVTENPKTEVCGGEKGPCCACPKTEAEKQAEKEEAEYRKVFENFLHNSIFVPRPERKRRDVMQVANTTMSSRSRNTTAADTYNITDPEELETEYPFFESRVDNKERTVISNLRPFTLYRIDIHSCNHEAEKLGCSASNFVFARTMPAEGADDIPGPVTWEPRPENSIFLKWPEPENPNGLILMYEIKYGSQVEDQRECVSRQEYRKYGGAKLNRLNPGNYTARIQATSLSGNGSWTDPVFFYVQAKTGYENFIHLIIALPVAVLLIVGGLVIMLYVFHRKRNNSRLGNGVLYASVNPEYFSAADVYVPDEWEVAREKITMSRELGQGSFGMVYEGVAKGVVKDEPETRVAIKTVNEAASMRERIEFLNEASVMKEFNCHHVVRLLGVVSQGQPTLVIMELMTRGDLKSYLRSLRPEMENNPVLAPPSLSKMIQMAGEIADGMAYLNANKFVHRDLAARNCMVAEDFTVKIGDFGMTRDIYETDYYRKGGKGLLPVRWMSPESLKDGVFTTYSDVWSFGVVLWEIATLAEQPYQGLSNEQVLRFVMEGGLLDKPDNCPDMLFELMRMCWQYNPKMRPSFLEIISSIKEEMEPGFREVSFYYSEENKLPEPEELDLEPENMESVPLDPSASSSSLPLPDRHSGHKAENGPGPGVLVLRASFDERQPYAHMNGGRKNERALPLPQSSTC

SEQ ID NO: 13196 - protein, 119 aa, Homo sapiens
MDTLCSTLLLLTIPSWVLSQITLKESGPTLVKPTQTLTLTCTFSGFSLSTSGVGVGWIRQPPGKALEWLALIYWDDDKRYSPSLKSRLTITKDTSKNQVVLTMTNMDPVDTATYYCAHR

SEQ ID NO: 13197 - protein, 119 aa, Homo sapiens
MDTLCYTLLLLTTPSWVLSQVTLKESGPVLVKPTETLTLTCTVSGFSLSNARMGVSWIRQPPGKALEWLAHIFSNDEKSYSTSLKSRLTISKDTSKSQVVLTMTNMDPVDTATYYCARI

SEQ ID NO: 13198 - protein, 260 aa, Homo sapiens
MSLQKTPPTRVFVELVPWADRSRENNLASGRETLPGLRHPLSSTQAQTATREVQVSGTSEVSAGPDRAQVVVRVSSTKEAAAEAKKSVCRRLDYITQSLQQQGVQAENITVTKDFRRVENAYHMEAEVCITFTEFGKMQNICNFLVEKLDSSVVISPPQFYHTPGSVENLRRQACLVAVENAWRKAQEVCNLVGQTLGKPLLIKEEETKEWEGQIDDHQSSRLSSSLTVQQKIKSATIHAASKVFITFEVKGKEKRKKHL

SEQ ID NO: 13199 - protein, 1241 aa, Homo sapiens
MRAVLTWRDKAEHCINDIAFKPDGTQLILAAGSRLLVYDTSDGTLLQPLKGHKDTVYCVAYAKDGKRFASGSADKSVIIWTSKLEGILKYTHNDAIQCVSYNPITHQLASCSSSDFGLWSPEQKSVSKHKSSSKIICCSWTNDGQYLALGMFNGIISIRNKNGEEKVKIERPGGSLSPIWSICWNPSSRWESFWMNRENEDAEDVIVNRYIQEIPSTLKSAVYSSQGSEAEEEEPEEEDDSPRDDNLEERNDILAVADWGQKVSFYQLSGKQIGKDRALNFDPCCISYFTKGEYILLGGSDKQVSLFTKDGVRLGTVGEQNSWVWTCQAKPDSNYVVVGCQDGTISFYQLIFSTVHGLYKDRYAYRDSMTDVIVQHLITEQKVRIKCKELVKKIAIYRNRLAIQLPEKILIYELYSEDLSDMHYRVKEKIIKKFECNLLVVCANHIILCQEKRLQCLSFSGVKEREWQMESLIRYIKVIGGPPGREGLLVGLKNGQILKIFVDNLFAIVLLKQATAVRCLDMSASRKKLAVVDENDTCLVYDIDTKELLFQEPNANSVAWNTQCEDMLCFSGGGYLNIKASTFPVHRQKLQGFVVGYNGSKIFCLHVFSISAVEVPQSAPMYQYLDRKLFKEAYQIACLGVTDTDWRELAMEALEGLDFETAKKAFIRVQDLRYLELISSIEERKKRGETNNDLFLADVFSYQGKFHEAAKLYKRSGHENLALEMYTDLCMFEYAKDFLGSGDPKETKMLITKQADWARNIKEPKAAVEMYISAGEHVKAIEICGDHGWVDMLIDIARKLDKAEREPLLLCATYLKKLDSPGYAAETYLKMGDLKSLVQLHVETQRWDEAFALGEKHPEFKDDIYMPYAQWLAENDRFEEAQKAFHKAGRQREAVQVLEQLTNNAVAESRFNDAAYYYWMLSMQCLDIAQDPAQKDTMLGKFYHFQRLAELYHGYHAIHRHTEDPFSVHRPETLFNISRFLLHSLPKDTPSGISKVKILFTLAKQSKALGAYRLARHAYDKLRGLYIPARFQKSIELGTLTIRAKPFHDSEELVPLCYRCSTNNPLLNNLGNVCINCRQPFIFSASSYDVLHLVEFYLEEGITDEEAISLIDLEVLRPKRDDRQLEIANNSSQILRLVETKDSIGDEDPFTAKLSFEQGGSEFVPVVVSRLVLRSMSRRDVLIKRWPPPLRWQYFRSLLPDASITMCPSCFQMFHSEDYELLVLQHGCCPYCRRCKDDPGP

SEQ ID NO: 13200 - protein, 1182 aa, Homo sapiens
MRAVLTWRDKAEHCINDIAFKPDGTQLILAAGSRLLVYDTSDGTLLQPLKGHKDTVYCVAYAKDGKRFASGSADKSVIIWTSKLEGILKYTHNDAIQCVSYNPITHQLASCSSSDFGLWSPEQKSVSKHKSSSKIICCSWTNDGQYLALGMFNGIISIRNKNGEEKVKIERPGGSLSPIWSICWNPSREERNDILAVADWGQKVSFYQLSGKQIGKDRALNFDPCCISYFTKGEYILLGGSDKQVSLFTKDGVRLGTVGEQNSWVWTCQAKPDSNYVVVGCQDGTISFYQLIFSTVHGLYKDRYAYRDSMTDVIVQHLITEQKVRIKCKELVKKIAIYRNRLAIQLPEKILIYELYSEDLSDMHYRVKEKIIKKFECNLLVVCANHIILCQEKRLQCLSFSGVKEREWQMESLIRYIKVIGGPPGREGLLVGLKNGQILKIFVDNLFAIVLLKQATAVRCLDMSASRKKLAVVDENDTCLVYDIDTKELLFQEPNANSVAWNTQCEDMLCFSGGGYLNIKASTFPVHRQKLQGFVVGYNGSKIFCLHVFSISAVEVPQSAPMYQYLDRKLFKEAYQIACLGVTDTDWRELAMEALEGLDFETAKKAFIRVQDLRYLELISSIEERKKRGETNNDLFLADVFSYQGKFHEAAKLYKRSGHENLALEMYTDLCMFEYAKDFLGSGDPKETKMLITKQADWARNIKEPKAAVEMYISAGEHVKAIEICGDHGWVDMLIDIARKLDKAEREPLLLCATYLKKLDSPGYAAETYLKMGDLKSLVQLHVETQRWDEAFALGEKHPEFKDDIYMPYAQWLAENDRFEEAQKAFHKAGRQREAVQVLEQLTNNAVAESRFNDAAYYYWMLSMQCLDIAQDPAQKDTMLGKFYHFQRLAELYHGYHAIHRHTEDPFSVHRPETLFNISRFLLHSLPKDTPSGISKVKILFTLAKQSKALGAYRLARHAYDKLRGLYIPARFQKSIELGTLTIRAKPFHDSEELVPLCYRCSTNNPLLNNLGNVCINCRQPFIFSASSYDVLHLVEFYLEEGITDEEAISLIDLEVLRPKRDDRQLEIANNSSQILRLVETKDSIGDEDPFTAKLSFEQGGSEFVPVVVSRLVLRSMSRRDVLIKRWPPPLRWQYFRSLLPDASITMCPSCFQMFHSEDYELLVLQHGCCPYCRRCKDDPGP

SEQ ID NO: 13201 - protein, 1131 aa, Homo sapiens
MRAVLTWRDKAEHCINDIAFKPDGTQLILAAGSRLLVYDTSDGTLLQPLKGHKDTVYCVAYAKDGLWSPEQKSVSKHKSSSKIICCSWTNDGQYLALGMFNGIISIRNKNGEEKVKIERPGGSLSPIWSICWNPSREERNDILAVADWGQKVSFYQLSGKQIGKDRALNFDPCCISYFTKGEYILLGGSDKQVSLFTKDGVRLGTVGEQNSWVWTCQAKPDSNYVVVGCQDGTISFYQLIFSTVHGLYKDRYAYRDSMTDVIVQHLITEQKVRIKCKELVKKIAIYRNRLAIQLPEKILIYELYSEDLSDMHYRVKEKIIKKFECNLLVVCANHIILCQEKRLQCLSFSGVKEREWQMESLIRYIKVIGGPPGREGLLVGLKNGQILKIFVDNLFAIVLLKQATAVRCLDMSASRKKLAVVDENDTCLVYDIDTKELLFQEPNANSVAWNTQCEDMLCFSGGGYLNIKASTFPVHRQKLQGFVVGYNGSKIFCLHVFSISAVEVPQSAPMYQYLDRKLFKEAYQIACLGVTDTDWRELAMEALEGLDFETAKKAFIRVQDLRYLELISSIEERKKRGETNNDLFLADVFSYQGKFHEAAKLYKRSGHENLALEMYTDLCMFEYAKDFLGSGDPKETKMLITKQADWARNIKEPKAAVEMYISAGEHVKAIEICGDHGWVDMLIDIARKLDKAEREPLLLCATYLKKLDSPGYAAETYLKMGDLKSLVQLHVETQRWDEAFALGEKHPEFKDDIYMPYAQWLAENDRFEEAQKAFHKAGRQREAVQVLEQLTNNAVAESRFNDAAYYYWMLSMQCLDIAQADPAQKDTMLGKFYHFQRLAELYHGYHAIHRHTEDPFSVHRPETLFNISRFLLHSLPKDTPSGISKVKILFTLAKQSKALGAYRLARHAYDKLRGLYIPARFQKSIELGTLTIRAKPFHDSEELVPLCYRCSTNNPLLNNLGNVCINCRQPFIFSASSYDVLHLVEFYLEEGITDEEAISLIDLEVLRPKRDDRQLEIANNSSQILRLVETKDSIGDEDPFTAKLSFEQGGSEFVPVVVSRLVLRSMSRRDVLIKRWPPPLRWQYFRSLLPDASITMCPSCFQMFHSEDYELLVLQHGCCPYCRRCKDDPGP

SEQ ID NO: 13202 - protein, 1292 aa, Homo sapiens
MRAVLTWRDKAEHCINDIAFKPDGTQLILAAGSRLLVYDTSDGTLLQPLKGHKDTVYCVAYAKDGKRFASGSADKSVIIWTSKLEGILKYTSWSVMSSLHLHLPFLGLHKTVRVTATDKAPKGQGGRIDCLRPSVQNQPGQKHNDAIQCVSYNPITHQLASCSSSDFGLWSPEQKSVSKHKSSSKIICCSWTNDGQYLALGMFNGIISIRNKNGEEKVKIERPGGSLSPIWSICWNPSSRWESFWMNRENEDAEDVIVNRYIQEIPSTLKSAVYSSQGSEAEEEEPEEEDDSPRDDNLEERNDILAVADWGQKVSFYQLSGKQIGKDRALNFDPCCISYFTKGEYILLGGSDKQVSLFTKDGVRLGTVGEQNSWVWTCQAKPDSNYVVVGCQDGTISFYQLIFSTVHGLYKDRYAYRDSMTDVIVQHLITEQKVRIKCKELVKKIAIYRNRLAIQLPEKILIYELYSEDLSDMHYRVKEKIIKKFECNLLVVCANHIILCQEKRLQCLSFSGVKEREWQMESLIRYIKVIGGPPGREGLLVGLKNGQILKIFVDNLFAIVLLKQATAVRCLDMSASRKKLAVVDENDTCLVYDIDTKELLFQEPNANSVAWNTQCEDMLCFSGGGYLNIKASTFPVHRQKLQGFVVGYNGSKIFCLHVFSISAVEVPQSAPMYQYLDRKLFKEAYQIACLGVTDTDWRELAMEALEGLDFETAKKAFIRVQDLRYLELISSIEERKKRGETNNDLFLADVFSYQGKFHEAAKLYKRSGHENLALEMYTDLCMFEYAKDFLGSGDPKETKMLITKQADWARNIKEPKAAVEMYISAGEHVKAIEICGDHGWVDMLIDIARKLDKAEREPLLLCATYLKKLDSPGYAAETYLKMGDLKSLVQLHVETQRWDEAFALGEKHPEFKDDIYMPYAQWLAENDRFEEAQKAFHKAGRQREAVQVLEQLTNNAVAESRFNDAAYYYWMLSMQCLDIAQDPAQKDTMLGKFYHFQRLAELYHGYHAIHRHTEDPFSVHRPETLFNISRFLLHSLPKDTPSGISKVKILFTLAKQSKALGAYRLARHAYDKLRGLYIPARFQKSIELGTLTIRAKPFHDSEELVPLCYRCSTNNPLLNNLGNVCINCRQPFIFSASSYDVLHLVEFYLEEGITDEEAISLIDLEVLRPKRDDRQLEIANNSSQILRLVETKDSIGDEDPFTAKLSFEQGGSEFVPVVVSRLVLRSMSRRDVLIKRWPPPLRWQYFRSLLPDASITMCPSCFQMFHSEDYELLVLQHGCCPYCRRCKDDPGP

SEQ ID NO: 13203 - protein, 1234 aa, Homo sapiens
MRAVLTWRDKAEHCINDIAFKPDGTQLILAAGSRLLVYDTSDGTLLQPLKGHKDTVYCVAYAKDGKRFASGSADKSVIIWTSKLEGILKYTSWSVMSSLHLHLPFLGLHKTVRVTATDKAPKGQGGRIDCLRPSVQNQPGQKHNDAIQCVSYNPITHQLASCSSSDFGLWSPEQKSVSKHKSSSKIICCSWTNDGQYLALGMFNGIISIRNKNGEEKVKIERPGGSLSPIWSICWNPSREERNDILAVADWGQKVSFYQLSGKQIGKDRALNFDPCCISYFTKGEYILLGGSDKQVSLFTKDGVRLGTVGEQNSWVWTCQAKPDSNYVVVGCQDGTISFYQLIFSTVHGLYKDRYAYRDSMTDVIVQHLITEQKVRIKCKELVKKIAIYRNRLAIQLPEKILIYELYSEDLSDMHYRVKEKIIKKFECNLLVVCANHIILCQEKRLQCLSFSGVKEREWQMESLIRYIKVIGGPPGREGLLVGLKNGQILKIFVDNLFAIVLLKQATAVRCLDMSASRKKLAVVDENDTCLVYDIDTKELLFQEPNANSVAWNTQCEDMLCFSGGGYLNIKASTFPVHRQKLQGFVVGYNGSKIFCLHVFSISAVEVPQSAPMYQYLDRKLFKEAYQIACLGVTDTDWRELAMEALEGLDFETAKKAFIRVQDLRYLELISSIEERKKRGETNNDLFLADVFSYQGKFHEAAKLYKRSGHENLALEMYTDLCMFEYAKDFLGSGDPKETKMLITKQADWARNIKEPKAAVEMYISAGEHVKAIEICGDHGWVDMLIDIARKLDKAEREPLLLCATYLKKLDSPGYAAETYLKMGDLKSLVQLHVETQRWDEAFALGEKHPEFKDDIYMPYAQWLAENDRFEEAQKAFHKAGRQREAVQVLEQLTNNAVAESRFNDAAYYYWMLSMQCLDIAQADPAQKDTMLGKFYHFQRLAELYHGYHAIHRHTEDPFSVHRPETLFNISRFLLHSLPKDTPSGISKVKILFTLAKQSKALGAYRLARHAYDKLRGLYIPARFQKSIELGTLTIRAKPFHDSEELVPLCYRCSTNNPLLNNLGNVCINCRQPFIFSASSYDVLHLVEFYLEEGITDEEAISLIDLEVLRPKRDDRQLEIANNSSQILRLVETKDSIGDEDPFTAKLSFEQGGSEFVPVVVSRLVLRSMSRRDVLIKRWPPPLRWQYFRSLLPDASITMCPSCFQMFHSEDYELLVLQHGCCPYCRRCKDDPGP

SEQ ID NO: 13204 - protein, 1032 aa, Homo sapiens
MFNGIISIRNKNGEEKVKIERPGGSLSPIWSICWNPSREERNDILAVADWGQKVSFYQLSGKQIGKDRALNFDPCCISYFTKGEYILLGGSDKQVSLFTKDGVRLGTVGEQNSWVWTCQAKPDSNYVVVGCQDGTISFYQLIFSTVHGLYKDRYAYRDSMTDVIVQHLITEQKVRIKCKELVKKIAIYRNRLAIQLPEKILIYELYSEDLSDMHYRVKEKIIKKFECNLLVVCANHIILCQEKRLQCLSFSGVKEREWQMESLIRYIKVIGGPPGREGLLVGLKNGQILKIFVDNLFAIVLLKQATAVRCLDMSASRKKLAVVDENDTCLVYDIDTKELLFQEPNANSVAWNTQCEDMLCFSGGGYLNIKASTFPVHRQKLQGFVVGYNGSKIFCLHVFSISAVEVPQSAPMYQYLDRKLFKEAYQIACLGVTDTDWRELAMEALEGLDFETAKKAFIRVQDLRYLELISSIEERKKRGETNNDLFLADVFSYQGKFHEAAKLYKRSGHENLALEMYTDLCMFEYAKDFLGSGDPKETKMLITKQADWARNIKEPKAAVEMYISAGEHVKAIEICGDHGWVDMLIDIARKLDKAEREPLLLCATYLKKLDSPGYAAETYLKMGDLKSLVQLHVETQRWDEAFALGEKHPEFKDDIYMPYAQWLAENDRFEEAQKAFHKAGRQREAVQVLEQLTNNAVAESRFNDAAYYYWMLSMQCLDIAQDPAQKDTMLGKFYHFQRLAELYHGYHAIHRHTEDPFSVHRPETLFNISRFLLHSLPKDTPSGISKVKILFTLAKQSKALGAYRLARHAYDKLRGLYIPARFQKSIELGTLTIRAKPFHDSEELVPLCYRCSTNNPLLNNLGNVCINCRQPFIFSASSYDVLHLVEFYLEEGITDEEAISLIDLEVLRPKRDDRQLEIANNSSQILRLVETKDSIGDEDPFTAKLSFEQGGSEFVPVVVSRLVLRSMSRRDVLIKRWPPPLRWQYFRSLLPDASITMCPSCFQMFHSEDYELLVLQHGCCPYCRRCKDDPGP

SEQ ID NO: 13205 - protein, 1091 aa, Homo sapiens
MFNGIISIRNKNGEEKVKIERPGGSLSPIWSICWNPSSRWESFWMNRENEDAEDVIVNRYIQEIPSTLKSAVYSSQGSEAEEEEPEEEDDSPRDDNLEERNDILAVADWGQKVSFYQLSGKQIGKDRALNFDPCCISYFTKGEYILLGGSDKQVSLFTKDGVRLGTVGEQNSWVWTCQAKPDSNYVVVGCQDGTISFYQLIFSTVHGLYKDRYAYRDSMTDVIVQHLITEQKVRIKCKELVKKIAIYRNRLAIQLPEKILIYELYSEDLSDMHYRVKEKIIKKFECNLLVVCANHIILCQEKRLQCLSFSGVKEREWQMESLIRYIKVIGGPPGREGLLVGLKNGQILKIFVDNLFAIVLLKQATAVRCLDMSASRKKLAVVDENDTCLVYDIDTKELLFQEPNANSVAWNTQCEDMLCFSGGGYLNIKASTFPVHRQKLQGFVVGYNGSKIFCLHVFSISAVEVPQSAPMYQYLDRKLFKEAYQIACLGVTDTDWRELAMEALEGLDFETAKKAFIRVQDLRYLELISSIEERKKRGETNNDLFLADVFSYQGKFHEAAKLYKRSGHENLALEMYTDLCMFEYAKDFLGSGDPKETKMLITKQADWARNIKEPKAAVEMYISAGEHVKAIEICGDHGWVDMLIDIARKLDKAEREPLLLCATYLKKLDSPGYAAETYLKMGDLKSLVQLHVETQRWDEAFALGEKHPEFKDDIYMPYAQWLAENDRFEEAQKAFHKAGRQREAVQVLEQLTNNAVAESRFNDAAYYYWMLSMQCLDIAQDPAQKDTMLGKFYHFQRLAELYHGYHAIHRHTEDPFSVHRPETLFNISRFLLHSLPKDTPSGISKVKILFTLAKQSKALGAYRLARHAYDKLRGLYIPARFQKSIELGTLTIRAKPFHDSEELVPLCYRCSTNNPLLNNLGNVCINCRQPFIFSASSYDVLHLVEFYLEEGITDEEAISLIDLEVLRPKRDDRQLEIANNSSQILRLVETKDSIGDEDPFTAKLSFEQGGSEFVPVVVSRLVLRSMSRRDVLIKRWPPPLRWQYFRSLLPDASITMCPSCFQMFHSEDYELLVLQHGCCPYCRRCKDDPGP

SEQ ID NO: 13206 - protein, 1118 aa, Homo sapiens
MRAVLTWRDKAEHCINDIAFKPDGTQLILAAGSRLLVYDTSDGTLLQPLKGHKDTVYCVAYAKDVLCIEGLWSPEQKSVSKHKSSSKIICCSWTNDGQYLALGMFNGIISIRNKNGEEKVKIERPGGSLSPIWSICWNPSREERNDILAVADWGQKVSFYQLSGKQIGKDRALNFDPCCISYFTKGEYILLGGSDKQVSLFTKDGVRLGTVGEQNSWVWTCQAKPDSNYVVVGCQDGTISFYQLIFSTVHGLYKDRYAYRDSMTDVIVQHLITEQKVRIKCKELVKKIAIYRNRLAIQLPEKILIYELYSEDLSDMHYRVKEKIIKKFECNLLVVCANHIILCQEKRLQCLSFSGVKEREWQMESLIRYIKVIGGPPGREGLLVGLKNGQILKIFVDNLFAIVLLKQATAVRCLDMSASRKKLAVVDENDTCLVYDIDTKELLFQEPNANSVAWNTQCEDMLCFSGGGYLNIKASTFPVHRQKLQGFVVGYNGSKIFCLHVFSISAVEVPQSAPMYQYLDRKLFKEAYQIACLGVTDTDWRELAMEALEGLDFETAKKERKKRGETNNDLFLADVFSYQGKFHEAAKLYKRSGHENLALEMYTDLCMFEYAKDFLGSGDPKETKMLITKQADWARNIKEPKAAVEMYISAGEHVKAIEICGDHGWVDMLIDIARKLDKAEREPLLLCATYLKKLDSPGYAAETYLKMGDLKSLVQLHVETQRWDEAFALGEKHPEFKDDIYMPYAQWLAENDRFEEAQKAFHKAGRQREAVQVLEQLTNNAVAESRFNDAAYYYWMLSMQCLDIAQADPAQKDTMLGKFYHFQRLAELYHGYHAIHRHTEDPFSVHRPETLFNISRFLLHSLPKDTPSGISKVKILFTLAKQSKALGAYRLARHAYDKLRGLYIPARFQKSIELGTLTIRAKPFHDSEELVPLCYRCSTNNPLLNNLGNVCINCRQPFIFSASSYDVLHLVEFYLEEGITDEEAISLIDLEVLRPKRDDRQLEIANNSSQILRLVETKDSIGDEDPFTAKLSFEQGGSEFVPVVVSRLVLRSMSRRDVLIKRWPPPLRWQYFRSLLPDASITMCPSCFQMFHSEDYELLVLQHGCCPYCRRCKDDPGP

SEQ ID NO: 13207 - protein, 1082 aa, Homo sapiens
MRAVLTWRDKAEHCINDIAFKPDGTQLILAAGSRLLVYDTSDGTLLQPLKGHKDTVYCVAYAKDGLWSPEQKSVSKHKSSSKIICCREERNDILAVADWGQKVSFYQLSGKQIGKDRALNFDPCCISYFTKGEYILLGGSDKQVSLFTKDGVRLGTVGEQNSWVWTCQAKPDSNYVVVGCQDGTISFYQLIFSTVHGLYKDRYAYRDSMTDVIVQHLITEQKVRIKCKELVKKIAIYRNRLAIQLPEKILIYELYSEDLSDMHYRVKEKIIKKFECNLLVVCANHIILCQEKRLQCLSFSGVKEREWQMESLIRYIKVIGGPPGREGLLVGLKNGQILKIFVDNLFAIVLLKQATAVRCLDMSASRKKLAVVDENDTCLVYDIDTKELLFQEPNANSVAWNTQCEDMLCFSGGGYLNIKASTFPVHRQKLQGFVVGYNGSKIFCLHVFSISAVEVPQSAPMYQYLDRKLFKEAYQIACLGVTDTDWRELAMEALEGLDFETAKKAFIRVQDLRYLELISSIEERKKRGETNNDLFLADVFSYQGKFHEAAKLYKRSGHENLALEMYTDLCMFEYAKDFLGSGDPKETKMLITKQADWARNIKEPKAAVEMYISAGEHVKAIEICGDHGWVDMLIDIARKLDKAEREPLLLCATYLKKLDSPGYAAETYLKMGDLKSLVQLHVETQRWDEAFALGEKHPEFKDDIYMPYAQWLAENDRFEEAQKAFHKAGRQREAVQVLEQLTNNAVAESRFNDAAYYYWMLSMQCLDIAQADPAQKDTMLGKFYHFQRLAELYHGYHAIHRHTEDPFSVHRPETLFNISRFLLHSLPKDTPSGISKVKILFTLAKQSKALGAYRLARHAYDKLRGLYIPARFQKSIELGTLTIRAKPFHDSEELVPLCYRCSTNNPLLNNLGNVCINCRQPFIFSASSYDVLHLVEFYLEEGITDEEAISLIDLEVLRPKRDDRQLEIANNSSQILRLVETKDSIGDEDPFTAKLSFEQGGSEFVPVVVSRLVLRSMSRRDVLIKRWPPPLRWQYFRSLLPDASITMCPSCFQMFHSEDYELLVLQHGCCPYCRRCKDDPGP

SEQ ID NO: 13208 - protein, 993 aa, Homo sapiens
MRAVLTWRDKAEHCINDIAFKPDGTQLILAAGSRLLVYDTSDGTLLQPLKGHKDTVYCVAYAKDGKRFASGSADKSVIIWTSKLEGILKYTHNDAIQCVSYNPITHQLASCSSSDFGLWSPEQKSVSKHKSSSKIICCSWTNDGQYLALGMFNGIISIRNKNGEEKVKIERPGGSLSPIWSICWNPSREERNDILAVADWGQKVSFYQLSGKQIGKDRALNFDPCCISYFTKGEYILLGGSDKQVSLFTKDGVRLGTVGEQNSWVWTCQAKPDSNYVVVGCQDGTISFYQLIFSTVHGLYKDRYAYRDSMTDVIVQHLITEQKVRIKCKELVKKIAIYRNRLAIQLPEKILIYELYSEDLSDMHYRVKEKIIKKFECNLLVVCANHIILCQEKRLQCLSFSGVKEREWQMESLIRYIKVIGGPPGREGLLVGLKNGQILKIFVDNLFAIVLLKQATAVRCLDMSASRKKLAVVDENDTCLVYDIDTKELLFQEPNANSVAWNTQCEDMLCFSGGGYLNIKASTFPVHRQKLQGFVVGYNGSKIFCLHVFSISAVEVPQSAPMYQYLDRKLFKEAYQIACLGVTDTDWRELAMEALEGLDFETAKKAFIRVQDLRYLELISSIEERKKRGETNNDLFLADVFSYQGKFHEAAKLYKRSGHENLALEMYTDLCMFEYAKDFLGSGDPKETKMLITKQADWARNIKEPKAAVEMYISAGEHVKAIEICGDHGWVDMLIDIARKLDKAEREPLLLCATYLKKLDSPGYAAETYLKMGDLKSLVQLHVETQRWDEAFALGEKHPEFKDDIYMPYAQWLAENDRFEEAQKAFHKAGRQREAVQVLEQLTNNAVAESRFNDAAYYYWMLSMQCLDIAQDPAQKDTMLGKFYHFQRLAELYHGYHAIHRHTEDPFSVHRPETLFNISRFLLHSLPKDTPSGISKVKILFTLAKQSKALGAYRLARHAYDKLRGLYIPARFQKSIELGTLTIRAKPFHDSEE

SEQ ID NO: 13209 - protein, 119 aa, Homo sapiens
MDILCSTLLLLTVPSWVLSQVTLRESGPALVKPTQTLTLTCTFSGFSLSTSGMCVSWIRQPPGKALEWLALIDWDDDKYYSTSLKTRLTISKDTSKNQVVLTMTNMDPVDTATYYCARI

SEQ ID NO: 13210 - protein, 117 aa, Homo sapiens
MELGLSWVFLVAILEGVQCEVQLVESGGGLVQPGGSLRLSCAASGFTFSSYWMSWVRQAPGKGLEWVANIKQDGSEKYYVDSVKGRFTISRDNAKNSLYLQMNSLRAEDTAVYYCAR

SEQ ID NO: 13211 - protein, 118 aa, Homo sapiens
MELGLSWIFLLAILKGVQCEVQLVESGGGLVQPGRSLRLSCAASGFTFDDYAMHWVRQAPGKGLEWVSGISWNSGSIGYADSVKGRFTISRDNAKNSLYLQMNSLRAEDTALYYCAKD

SEQ ID NO: 13212 - protein, 718 aa, Homo sapiens
MIVDKLLDDSRGGEGLRDAAGGCGLMTSPLNLSYFYGASPPAAAPGACDASCSVLGPSAPGSPGSDSSDFSSASSVSSCGAVESRSRGGARAERQPVEPHMGVGRQQRGPFQGVRVKNSVKELLLHIRSHKQKASGQAVDDFKTQGVNIEQFRELKNTVSYSGKRKGPDSLSDGPACKRPALLHSQFLTPPQTPTPGESMEDVHLNEPKQESSADLLQNIINIKNECSPVSLNTVQVSWLNPVVVPQSSPAEQCQDFHGGQVFSPPQKCQPFQVRGSQQMIDQASLYQYSPQNQHVEQQPHYTHKPTLEYSPFPIPPQSPAYEPNLFDGPESQFCPNQSLVSLLGDQRESENIANPMQTSSSVQQQNDAHLHSFSMMPSSACEAMVGHEMASDSSNTSLPFSNMGNPMNTTQLGKSLFQWQVEQEESKLANISQDQFLSKDADGDTFLHIAVAQGRRALSYVLARKMNALHMLDIKEHNGQSAFQVAVAANQHLIVQDLVNIGAQVNTTDCWGRTPLHVCAEKGHSQVLQAIQKGAVGSNQFVDLEATNYDGLTPLHCAVIAHNAVVHELQRNQQPHSPEVQELLLKNKSLVDTIKCLIQMGAAVEAKDRKSGRTALHLAAEEANLELIRLFLELPSCLSFVNAKAYNGNTALHVAASLQYRLTQLDAVRLLMRKGADPSTRNLENEQPVHLVPDGPVGEQIRRILKGKSIQQRAPPY

SEQ ID NO: 13213 - protein, 618 aa, Homo sapiens
MGVGRQQRGPFQGVRVKNSVKELLLHIRSHKQKASGQAVDDFKTQGVNIEQFRELKNTVSYSGKRKGPDSLSDGPACKRPALLHSQFLTPPQTPTPGESMEDVHLNEPKQESSADLLQNIINIKNECSPVSLNTVQVSWLNPVVVPQSSPAEQCQDFHGGQVFSPPQKCQPFQVRGSQQMIDQASLYQYSPQNQHVEQQPHYTHKPTLEYSPFPIPPQSPAYEPNLFDGPESQFCPNQSLVSLLGDQRESENIANPMQTSSSVQQQNDAHLHSFSMMPSSACEAMVGHEMASDSSNTSLPFSNMGNPMNTTQLGKSLFQWQVEQEESKLANISQDQFLSKDADGDTFLHIAVAQGRRALSYVLARKMNALHMLDIKEHNGQSAFQVAVAANQHLIVQDLVNIGAQVNTTDCWGRTPLHVCAEKGHSQVLQAIQKGAVGSNQFVDLEATNYDGLTPLHCAVIAHNAVVHELQRNQQPHSPEVQELLLKNKSLVDTIKCLIQMGAAVEAKDRKSGRTALHLAAEEANLELIRLFLELPSCLSFVNAKAYNGNTALHVAASLQYRLTQLDAVRLLMRKGADPSTRNLENEQPVHLVPDGPVGEQIRRILKGKSIQQRAPPY

SEQ ID NO: 13214 - protein, 596 aa, Homo sapiens
MIVDKLLDDSRGGEGLRDAAGGCGLMTSPLNLSYFYGASPPAAAPGACDASCSVLGPSAPGSPGSDSSDFSSASSVSSCGAVESRSRGGARAERQPVEPHMGVGRQQRGPFQGVRVKNSVKELLLHIRSHKQKASGQAVDDFKTQGVNIEQFRELKNTVSYSGKRKGPDSLSDGPACKRPALLHSQFLTPPQTPTPGESMEDVHLNEPKQESSADLLQNIINIKNECSPVSLNTVQTSSSVQQQNDAHLHSFSMMPSSACEAMVGHEMASDSSNTSLPFSNMGNPMNTTQLGKSLFQWQVEQEESKLANISQDQFLSKDADGDTFLHIAVAQGRRALSYVLARKMNALHMLDIKEHNGQSAFQVAVAANQHLIVQDLVNIGAQVNTTDCWGRTPLHVCAEKGHSQVLQAIQKGAVGSNQFVDLEATNYDGLTPLHCAVIAHNAVVHELQRNQQPHSPEVQELLLKNKSLVDTIKCLIQMGAAVEAKDRKSGRTALHLAAEEANLELIRLFLELPSCLSFVNAKAYNGNTALHVAASLQYRLTQLDAVRLLMRKGADPSTRNLENEQPVHLVPDGPVGEQIRRILKGKSIQQRAPPY

SEQ ID NO: 13215 - protein, 117 aa, Homo sapiens
MEFGLSWVFLVAIIKGVQCQVQLVESGGGLVKPGGSLRLSCAASGFTFSDYYMSWIRQAPGKGLEWVSYISSSSSYTNYADSVKGRFTISRDNAKNSLYLQMNSLRAEDTAVYYCAR

SEQ ID NO: 13216 - protein, 116 aa, Homo sapiens
MELGLSWVFLVAILEGVQCEVQLVESGGGLVQPGGSLRLSCAASGFTFSSYDMHWVRQATGKGLEWVSAIGTAGDPYYPGSVKGRFTISRENAKNSLYLQMNSLRAGDTAVYYCAR

SEQ ID NO: 13217 - protein, 119 aa, Homo sapiens
MEFGLSWIFLAAILKGVQCEVQLVESGGGLVKPGGSLRLSCAASGFTFSNAWMSWVRQAPGKGLEWVGRIKSKTDGGTTDYAAPVKGRFTISRDDSKNTLYLQMNSLKTEDTAVYYCTT

SEQ ID NO: 13218 - protein, 117 aa, Homo sapiens
MEFGLSWVFLAGILKGVQCEVQLVESGGGLVQPGGSLRLSCAASGFTFSNSDMNWARKAPGKGLEWVSGVSWNGSRTHYVDSVKRRFIISRDNSRNSLYLQKNRRRAEDMAVYYCVR

SEQ ID NO: 13219 - protein, 350 aa, Homo sapiens
MSEVKSRKKSGPKGAPAAEPGKRSEGGKTPVARSSGGGGWADPRTCLSLLSLGTCLGLAWFVFQQSEKFAKVENQYQLLKLETNEFQQLQSKISLISEKWQKSEAIMEQLKSFQIIAHLKRLQEEINEVKTWSNRITEKQDILNNSLTTLSQDITKVDQSTTSMAKDVGLKITSVKTDIRRISGLVTDVISLTDSVQELENKIEKVEKNTVKNIGDLLSSSIDRTATLRKTASENSQRINSVKKTLTELKSDFDKHTDRFLSLEGDRAKVLKTVTFANDLKPKVYNLKKDFSRLEPLVNDLTLRIGRLVTDLLQREKEIAFLSEKISNLTIVQAEIKDIKDEIAHISDMN

SEQ ID NO: 13220 - protein, 244 aa, Homo sapiens
MEQLKSFQIIAHLKRLQEEINEVKTWSNRITEKQDILNNSLTTLSQDITKVDQSTTSMAKDVGLKITSVKTDIRRISGLVTDVISLTDSVQELENKIEKVEKNTVKNIGDLLSSSIDRTATLRKTASENSQRINSVKKTLTELKSDFDKHTDRFLSLEGDRAKVLKTVTFANDLKPKVYNLKKDFSRLEPLVNDLTLRIGRLVTDLLQREKEIAFLSEKISNLTIVQAEIKDIKDEIAHISDMN

SEQ ID NO: 13221 - protein, 70 aa, Homo sapiens
MSEVKSRKKSGPKGAPAAEPGKRSEGGKTPVARSSGGGGWADPRTCLSLLSLGTCLGLACGRNLKLSWNN

SEQ ID NO: 13222 - protein, 377 aa, Homo sapiens
MSEVKSRKKSGPKGAPAAEPGKRSEGGKTPVARSSGGGGWADPRTCLSLLSLGTCLGLAWFVFQQSEKFAKVENQYQLLKLETNEFQQLQSKISLISEKLESTESILQEATSSMSLMTQFEQEVSNLQDIMHDIQNNEEVLTQRMQSLNEKFQNITDFWKRSLEEMNINTDIFKSEAKHIHSQVTVQINSAEQEIKLLTERLKDLEDSTLRNIRTVKRQEEEDLLRVEEQLGSDTKAIEKLEEEQHALFARDEDLTNKLSDYEPKVEECKTHLPTIESAIHSVLRVSQDLIETEKKMEDLTMQMFNMEDDMLKAVSEIMEMQKTLEGIQYDNSILKMQNELDILKEKVHDFIAYSSTGEKGTLKEYNIENKGIGGDF

SEQ ID NO: 13223 - protein, 117 aa, Homo sapiens
MEFGLSWVFLVAILKGVQCEVQLVESGGGVVRPGGSLRLSCAASGFTFDDYGMSWVRQAPGKGLEWVSGINWNGGSTGYADSVKGRFTISRDNAKNSLYLQMNSLRAEDTALYHCAR

SEQ ID NO: 13224 - protein, 117 aa, Homo sapiens
MELGLRWVFLVAILEGVQCEVQLVESGGGLVKPGGSLRLSCAASGFTFSSYSMNWVRQAPGKGLEWVSSISSSSSYIYYADSVKGRFTISRDNAKNSLYLQMNSLRAEDTAVYYCAR

SEQ ID NO: 13225 - protein, 117 aa, Homo sapiens
MEFGLSWLFLVAILKGVQCEVQLVESGGGLVQPGGSLRLSCAASGFTFSSYAMSWVRQAPGKGLEWVSAISGSGGSTYYADSVKGRFTISRDNSKNTLYLQMNSLRAEDTAVYYCAK

SEQ ID NO: 13226 - protein, 117 aa, Homo sapiens
MEFGLSWVFLVALLRGVQCQVQLVESGGGVVQPGRSLRLSCAASGFTFSSYGMHWVRQAPGKGLEWVAVISYDGSNKYYADSVKGRFTISRDNSKNTLYLQMNSLRAEDTAVYYCAK

SEQ ID NO: 13227 - protein, 117 aa, Homo sapiens
MEFGLSWVFLVALLRGVQCQVQLVESGGGVVQPGRSLRLSCAASGFTFSSYGMHWVRQAPGKGLEWVAVIWYDGSNKYYADSVKGRFTISRDNSKNTLYLQMNSLRAEDTAVYYCAR

SEQ ID NO: 13228 - protein, 117 aa, Homo sapiens
MEFGLSWVFLAAILKGVQCEVQLVESGGGLVQPGGSLRLSCAASGFTFSNSDMNWVHQAPGKGLEWVSGVSWNGSRTHYADSVKGRFIISRDNSRNTLYLQTNSLRAEDTAVYYCVR

SEQ ID NO: 13229 - protein, 116 aa, Homo sapiens
MQFVLSWVFLVGILKGVQCEVQLVESGGGLVQPRGSLRLSCAASGFTVSSNEMSWIRQAPGKGLEWVSSISGGSTYYADSRKGRFTISRDNSKNTLYLQMNNLRAEGTAVYYCARY

SEQ ID NO: 13230 - protein, 118 aa, Homo sapiens
MEFGLSWVFLVAILKGVQCEVQLVESGGVVVQPGGSLRLSCAASGFTFDDYTMHWVRQAPGKGLEWVSLISWDGGSTYYADSVKGRFTISRDNSKNSLYLQMNSLRTEDTALYYCAKD

SEQ ID NO: 13231 - protein, 745 aa, Homo sapiens
MERPPGLRPGAGGPWEMRERLGTGGFGNVCLYQHRELDLKIAIKSCRLELSTKNRERWCHEIQIMKKLNHANVVKACDVPEELNILIHDVPLLAMEYCSGGDLRKLLNKPENCCGLKESQILSLLSDIGSGIRYLHENKIIHRDLKPENIVLQDVGGKIIHKIIDLGYAKDVDQGSLCTSFVGTLQYLAPELFENKPYTATVDYWSFGTMVFECIAGYRPFLHHLQPFTWHEKIKKKDPKCIFACEEMSGEVRFSSHLPQPNSLCSLVVEPMENWLQLMLNWDPQQRGGPVDLTLKQPRCFVLMDHILNLKIVHILNMTSAKIISFLLPPDESLHSLQSRIERETGINTGSQELLSETGISLDPRKPASQCVLDGVRGCDSYMVYLFDKSKTVYEGPFASRSLSDCVNYIVQDSKIQLPIIQLRKVWAEAVHYVSGLKEDYSRLFQGQRAAMLSLLRYNANLTKMKNTLISASQQLKAKLEFFHKSIQLDLERYSEQMTYGISSEKMLKAWKEMEEKAIHYAEVGVIGYLEDQIMSLHAEIMELQKSPYGRRQGDLMESLEQRAIDLYKQLKHRPSDHSYSDSTEMVKIIVHTVQSQDRVLKELFGHLSKLLGCKQKIIDLLPKVEVALSNIKEADNTVMFMQGKRQKEIWHLLKIACTQSSARSLVGSSLEGAVTPQTSAWLPPTSAEHDHSLSCVVTPQDGETSAQMIEENLNCLGHLSTIIHEANEEQGNSMMNLDWSWLTE

SEQ ID NO: 13232 - protein, 117 aa, Homo sapiens
MELGLCWVFLVAILEGVQCEVQLVESGGGLVQPGGSLRLSCAASGFTFSSYEMNWVRQAPGKGLEWVSYISSSGSTIYYADSVKGRFTISRDNAKNSLYLQMNSLRAEDTAVYYCAR

SEQ ID NO: 13233 - protein, 89 aa, Homo sapiens
MGILKLQVFLIVLSVALNHLKATPIESHQVEKRKCNTATCATQRLANFLVHSSNNFGAILSSTNVGSNTYGKRNAVEVLKREPLNYLPL

SEQ ID NO: 13234 - protein, 119 aa, Homo sapiens
MEFGLSWVFLVAILKGVQCEVQLVESGGGLVQPGRSLRLSCTASGFTFGDYAMSWVRQAPGKGLEWVGFIRSKAYGGTTEYAASVKGRFTISRDDSKSIAYLQMNSLKTEDTAVYYCTR

SEQ ID NO: 13235 - protein, 116 aa, Homo sapiens
MEFWLSWVFLVAISKGVQCEVQLVETGGGLIQPGGSLRLSCAASGFTVSSNYMSWVRQAPGKGLEWVSVIYSGGSTYYADSVKGRFTISRDNSKNTLYLQMNSLRAEDTAVYYCAR

SEQ ID NO: 13236 - protein, 1462 aa, Homo sapiens
MALYYDHQIEAPDAAGSPSFISWHPVHPFLAVAYISTTSTGSVDIYLEQGECVPDTHVERPFRVASLCWHPTRLVLAVGWETGEVTVFNKQDKEQHTMPLTHTADITVLRWSPSGNCLLSGDRLGVLLLWRLDQRGRVQGTPLLKHEYGKHLTHCIFRLPPPGEDLVQLAKAAVSGDEKALDMFNWKKSSSGSLLKMGSHEGLLFFVSLMDGTVHYVDEKGKTTQVVSADSTIQMLFYMEKREALVVVTENLRLSLYTVPPEGKAEEVMKVKLSGKTGRRADIALIEGSLLVMAVGEAALRFWDIERGENYILSPDEKFGFEKGENMNCVCYCKVKGLLAAGTDRGRVAMWRKVPDFLGSPGAEGKDRWALQTPTELQGNITQIQWGSRKNLLAVNSVISVAILSERAMSSHFHQQVAAMQVSPSLLNVCFLSTGVAHSLRTDMHISGVFATKDAVAVWNGRQVAIFELSGAAIRSAGTFLCETPVLAMHEENVYTVESNRVQVRTWQGTVKQLLLFSETEGNPCFLDICGNFLVVGTDLAHFKSFDLSRREAKAHCSCRSLAELVPGVGGIASLRCSSSGSTISILPSKADNSPDSKICFYDVEMDTVTVFDFKTGQIDRRETLSFNEQETNKSHLFVDEGLKNYVPVNHFWDQSEPRLFVCEAVQETPRSQPQSANGQPQDGRAGPAADVLILSFFISEEHGFLLHESFPRPATSHSLLGMEVPYYYFTRKPEEADREDEVEPGCHHIPQMVSRRPLRDFVGLEDCDKATRDAMLHFSFFVTIGDMDEAFKSIKLIKSEAVWENMARMCVKTQRLDVAKVCLGNMGHARGARALREAEQEPELEARVAVLATQLGMLEDAEQLYRKCKRHDLLNKFYQAAGRWQEALQVAEHHDRVHLRSTYHRYAGHLEASADCSRALSYYEKSDTHRFEVPRMLSEDLPSLELYVNKMKDKTLWRWWAQYLESQGEMDAALHYYELARDHFSLVRIHCFQGNVQKAAQIANETGNLAASYHLARQYESQEEVGQAVHFYTRAQAFKNAIRLCKENGLDDQLMNLALLSSPEDMIEAARYYEEKGVQMDRAVMLYHKAGHFSKALELAFATQQFVALQLIAEDLDETSDPALLARCSDFFIEHSQYERAVELLLAARKYQEALQLCLGQNMSITEEMAEKMTVAKDSSDLPEESRRELLEQIADCCMRQGSYHLATKKYTQAGNKLKAMRALLKSGDTEKITFFASVSRQKEIYIMAANYLQSLDWRKEPEIMKNIIGFYTKGRALDLLAGFYDACAQVEIDEYQNYDKAHGALTEAYKCLAKAKAKSPLDQETRLAQLQSRMALVKRFIQARRTYTEDPKESIKQCELLLEEPDLDSTIRIGDVYGFLVEHYVRKEEYQTAYRFLEEMRRRLPLANMSYYVSPQAVDAVHRGLGLPLPRTVPEQVRHNSMEDARELDEEVVEEADDDP

SEQ ID NO: 13237 - protein, 656 aa, Homo sapiens
MARMCVKTQRLDVAKVCLGNMGHARGARALREAEQEPELEARVAVLATQLGMLEDAEQLYRKCKRHDLLNKFYQAAGRWQEALQVAEHHDRVHLRSTYHRYAGHLEASADCSRALSYYEKSDTHRFEVPRMLSEDLPSLELYVNKMKDKTLWRWWAQYLESQGEMDAALHYYELARDHFSLVRIHCFQGNVQKAAQIANETGNLAASYHLARQYESQEEVGQAVHFYTRAQAFKNAIRLCKENGLDDQLMNLALLSSPEDMIEAARYYEEKGVQMDRAVMLYHKAGHFSKALELAFATQQFVALQLIAEDLDETSDPALLARCSDFFIEHSQYERAVELLLAARKYQEALQLCLGQNMSITEEMAEKMTVAKDSSDLPEESRRELLEQIADCCMRQGSYHLATKKYTQAGNKLKAMRALLKSGDTEKITFFASVSRQKEIYIMAANYLQSLDWRKEPEIMKNIIGFYTKGRALDLLAGFYDACAQVEIDEYQNYDKAHGALTEAYKCLAKAKAKSPLDQETRLAQLQSRMALVKRFIQARRTYTEDPKESIKQCELLLEEPDLDSTIRIGDVYGFLVEHYVRKEEYQTAYRFLEEMRRRLPLANMSYYVSPQAVDAVHRGLGLPLPRTVPEQVRHNSMEDARELDEEVVEEADDDP

SEQ ID NO: 13238 - protein, 118 aa, Homo sapiens
MMEFGLSWVFLVAIFKGVQCEVQLVESGEGLVQPGGSLRLSCAASGFTFSSYAMHWVRQAPGKGLEYVSAISSNGGSTYYADSVKGRFTISRDNSKNTLYLQMGSLRAEDMAVYYCAR

SEQ ID NO: 13239 - protein, 116 aa, Homo sapiens
MEFGLSWVFLVAILKGVQCEVQLVESGGGLIQPGGSLRLSCAASGFTVSSNYMSWVRQAPGKGLEWVSVIYSCGSTYYADSVKGRFTISRDNSKNTLYLQMNSLRAEDTAVYYCAR

SEQ ID NO: 13240 - protein, 119 aa, Homo sapiens
MEFGLSWVFLVVILQGVQCEVQLVESGGGLVQPGGSLRLSCAASGFTFSDHYMDWVRQAPGKGLEWVGRTRNKANSYTTEYAASVKGRFTISRDDSKNSLYLQMNSLKTEDTAVYYCAR

SEQ ID NO: 13241 - protein, 119 aa, Homo sapiens
MEFGLSWVFLVAILKGVQCEVQLVESGGGLVQPGGSLKLSCAASGFTFSGSAMHWVRQASGKGLEWVGRIRSKANSYATAYAASVKGRFTISRDDSKNTAYLQMNSLKTEDTAVYYCTR

SEQ ID NO: 13242 - protein, 117 aa, Homo sapiens
MEFGLSWVFLVAILKGVQCEVQLVESGGGLVQPGGSLRLSCAASGFTFSSYWMHWVRQAPGKGLVWVSRINSDGSSTSYADSVKGRFTISRDNAKNTLYLQMNSLRAEDTAVYYCAR

SEQ ID NO: 13243 - protein, 115 aa, Homo sapiens
MQFVLSWVFLVAILKGVQCEVQLVESRGVLVQPGGSLRLSCAASGFTVSSNEMSWVRQAPGKGLEWVSSISGGSTYYADSRKGRFTISRDNSKNTLHLQMNSLRAEDTAVYYCKK

SEQ ID NO: 13244 - protein, 117 aa, Homo sapiens
MDWNWRILFLVVATTGAHSQVQLVQSWAEVRKSGASVKVSCSFSGFTITSYGIHWVQQSPGQGLEWMGWINPGNGSPSYAKKFQGRFTMTRDMSTTTAYTDLSSLTSEDMAVYYYAR

SEQ ID NO: 13245 - protein, 117 aa, Homo sapiens
MKHLWFFLLLVAAPRWVLSQVQLQESGPGLVKPSGTLSLTCAVSGGSISSSNWWSWVRQPPGKGLEWIGEIYHSGSTNYNPSLKSRVTISVDKSKNQFSLKLSSVTAADTAVYYCAR

SEQ ID NO: 13246 - protein, 785 aa, Homo sapiens
MGKKYKNIVLLKGLEVINDYHFRMVKSLLSNDLKLNLKMREEYDKIQIADLMEEKFRGDAGLGKLIKIFEDIPTLEDLAETLKKEKLKVKGPALSRKRKKEVDATSPAPSTSSTVKTEGAEATPGAQKRKKSTKEKAGPKGSKVSEEQTQPPSPAGAGMSTAMGRSPSPKTSLSAPPNSSSTENPKTVAKCQVTPRRNVLQKRPVIVKVLSTTKPFEYETPEMEKKIMFHATVATQTQFFHVKVLNTSLKEKFNGKKIIIISDYLEYDSLLEVNEESTVSEAGPNQTFEVPNKIINRAKETLKIDILHKQASGNIVYGVFMLHKKTVNQKTTIYEIQDDRGKMDVVGTGQCHNIPCEEGDKLQLFCFRLRKKNQMSKLISEMHSFIQIKKKTNPRNNDPKSMKLPQEQRQLPYPSEASTTFPESHLRTPQMPPTTPSSSFFTKKSEDTISKMNDFMRMQILKEGSHFPGPFMTSIGPAESHPHTPQMPPSTPSSSFLTTKSEDTISKMNDFMRMQILKEGSHFPGPFMTSIGPAESHPHTPQMPPSTPSSSFLTTLKPRLKTEPEEVSIEDSAQSDLKEVMVLNATESFVYEPKEQKKMFHATVATENEVFRVKVFNIDLKEKFTPKKIIAIANYVCRNGFLEVYPFTLVADVNADRNMEIPKGLIRSASVTPKINQLCSQTKGSFVNGVFEVHKKNVRGEFTYYEIQDNTGKMEVVVHGRLTTINCEEGDKLKLTCFELAPKSGNTGELRSVIHSHIKVIKTRKNKKDILNPDSSMETSPDFFF

SEQ ID NO: 13247 - protein, 729 aa, Homo sapiens
MGKKYKNIVLLKGLEVINDYHFRMVKSLLSNDLKLNLKMREEYDKIQIADLMEEKFRGDAGLGKLIKIFEDIPTLEDLAETLKKEKLKVKGPALSRKRKKEVDATSPAPSTSSTVKTEGAEATPGAQKRKKSTKEKAGPKGSKVSEEQTQPPSPAGAGMSTAMGRSPSPKTSLSAPPNSSSTENPKTVAKCQVTPRRNVLQKRPVIVKVLSTTKPFEYETPEMEKKIMFHATVATQTQFFHVKVLNTSLKEKFNGKKIIIISDYLEYDSLLEVNEESTVSEAGPNQTFEVPNKIINRAKETLKIDILHKQASGNIVYGVFMLHKKTVNQKTTIYEIQDDRGKMDVVGTGQCHNIPCEEGDKLQLFCFRLRKKNQMSKLISEMHSFIQIKKKTNPRNNDPKSMKLPQEQRQLPYPSEASTTFPESHLRTPQMPPTTPSSSFFTKKSEDTISKMNDFMRMQILKEGSHFPGPFMTSIGPAESHPHTPQMPPSTPSSSFLTTLKPRLKTEPEEVSIEDSAQSDLKEVMVLNATESFVYEPKEQKKMFHATVATENEVFRVKVFNIDLKEKFTPKKIIAIANYVCRNGFLEVYPFTLVADVNADRNMEIPKGLIRSASVTPKINQLCSQTKGSFVNGVFEVHKKNVRGEFTYYEIQDNTGKMEVVVHGRLTTINCEEGDKLKLTCFELAPKSGNTGELRSVIHSHIKVIKTRKNKKDILNPDSSMETSPDFFF

SEQ ID NO: 13248 - protein, 673 aa, Homo sapiens
MGKKYKNIVLLKGLEVINDYHFRMVKSLLSNDLKLNLKMREEYDKIQIADLMEEKFRGDAGLGKLIKIFEDIPTLEDLAETLKKEKLKVKGPALSRKRKKEVDATSPAPSTSSTVKTEGAEATPGAQKRKKSTKEKAGPKGSKVSEEQTQPPSPAGAGMSTAMGRSPSPKTSLSAPPNSSSTENPKTVAKCQVTPRRNVLQKRPVIVKVLSTTKPFEYETPEMEKKIMFHATVATQTQFFHVKVLNTSLKEKFNGKKIIIISDYLEYDSLLEVNEESTVSEAGPNQTFEVPNKIINRAKETLKIDILHKQASGNIVYGVFMLHKKTVNQKTTIYEIQDDRGKMDVVGTGQCHNIPCEEGDKLQLFCFRLRKKNQMSKLISEMHSFIQIKKKTNPRNNDPKSMKLPQEQRQLPYPSEASTTFPESHLRTPQMPPTTPSSSFFTKLKPRLKTEPEEVSIEDSAQSDLKEVMVLNATESFVYEPKEQKKMFHATVATENEVFRVKVFNIDLKEKFTPKKIIAIANYVCRNGFLEVYPFTLVADVNADRNMEIPKGLIRSASVTPKINQLCSQTKGSFVNGVFEVHKKNVRGEFTYYEIQDNTGKMEVVVHGRLTTINCEEGDKLKLTCFELAPKSGNTGELRSVIHSHIKVIKTRKNKKDILNPDSSMETSPDFFF

SEQ ID NO: 13249 - protein, 729 aa, Homo sapiens
MGKKYKNIVLLKGLEVINDYHFRMVKSLLSNDLKLNLKMREEYDKIQIADLMEEKFRGDAGLGKLIKIFEDIPTLEDLAETLKKEKLKVKGPALSRKRKKEVDATSPAPSTSSTVKTEGAEATPGAQNPKTVAKCQVTPRRNVLQKRPVIVKVLSTTKPFEYETPEMEKKIMFHATVATQTQFFHVKVLNTSLKEKFNGKKIIIISDYLEYDSLLEVNEESTVSEAGPNQTFEVPNKIINRAKETLKIDILHKQASGNIVYGVFMLHKKTVNQKTTIYEIQDDRGKMDVVGTGQCHNIPCEEGDKLQLFCFRLRKKNQMSKLISEMHSFIQIKKKTNPRNNDPKSMKLPQEQRQLPYPSEASTTFPESHLRTPQMPPTTPSSSFFTKKSEDTISKMNDFMRMQILKEGSHFPGPFMTSIGPAESHPHTPQMPPSTPSSSFLTTKSEDTISKMNDFMRMQILKEGSHFPGPFMTSIGPAESHPHTPQMPPSTPSSSFLTTLKPRLKTEPEEVSIEDSAQSDLKEVMVLNATESFVYEPKEQKKMFHATVATENEVFRVKVFNIDLKEKFTPKKIIAIANYVCRNGFLEVYPFTLVADVNADRNMEIPKGLIRSASVTPKINQLCSQTKGSFVNGVFEVHKKNVRGEFTYYEIQDNTGKMEVVVHGRLTTINCEEGDKLKLTCFELAPKSGNTGELRSVIHSHIKVIKTRKNKKDILNPDSSMETSPDFFF

SEQ ID NO: 13250 - protein, 117 aa, Homo sapiens
MKHLWFFLLLVAAPRWVLSQVQLQESGPGLVKPSDTLSLTCAVSGYSISSSNWWGWIRQPPGKGLEWIGYIYYSGSTYYNPSLKSRVTMSVDTSKNQFSLKLSSVTAVDTAVYYCAR

SEQ ID NO: 13251 - protein, 118 aa, Homo sapiens
MKHLWFFLLLVAAPRWVLSQVQLQESGPGLVKPSQTLSLTCTVSGGSISSGGYYWSWIRQHPGKGLEWIGYIYYSGSTYYNPSLKSLVTISVDTSKNQFSLKLSSVTAADTAVYYCAR

SEQ ID NO: 13252 - protein, 118 aa, Homo sapiens
MKHLWFFLLLVAAPRWVLSQLQLQESGSGLVKPSQTLSLTCAVSGGSISSGGYSWSWIRQPPGKGLEWIGYIYHSGSTYYNPSLKSRVTISVDRSKNQFSLKLSSVTAADTAVYYCAR

SEQ ID NO: 13253 - protein, 756 aa, Homo sapiens
MSWSPSLTTQTCGAWEMKERLGTGGFGNVIRWHNQETGEQIAIKQCRQELSPRNRERWCLEIQIMRRLTHPNVVAARDVPEGMQNLAPNDLPLLAMEYCQGGDLRKYLNQFENCCGLREGAILTLLSDIASALRYLHENRIIHRDLKPENIVLQQGEQRLIHKIIDLGYAKELDQGSLCTSFVGTLQYLAPELLEQQKYTVTVDYWSFGTLAFECITGFRPFLPNWQPVQWHSKVRQKSEVDIVVSEDLNGTVKFSSSLPYPNNLNSVLAERLEKWLQLMLMWHPRQRGTDPTYGPNGCFKALDDILNLKLVHILNMVTGTIHTYPVTEDESLQSLKARIQQDTGIPEEDQELLQEAGLALIPDKPATQCISDGKLNEGHTLDMDLVFLFDNSKITYETQISPRPQPESVSCILQEPKRNLAFFQLRKVWGQVWHSIQTLKEDCNRLQQGQRAAMMNLLRNNSCLSKMKNSMASMSQQLKAKLDFFKTSIQIDLEKYSEQTEFGITSDKLLLAWREMEQAVELCGRENEVKLLVERMMALQTDIVDLQRSPMGRKQGGTLDDLEEQARELYRRLREKPRDQRTEGDSQEMVRLLLQAIQSFEKKVRVIYTQLSKTVVCKQKALELLPKVEEVVSLMNEDEKTVVRLQEKRQKELWNLLKIACSKVRGPVSGSPDSMNASRLSQPGQLMSQPSTASNSLPEPAKKSEELVAEAHNLCTLLENAIQDTVREQDQSFTALDWSWLQTEEEEHSCLEQAS

SEQ ID NO: 13254 - protein, 754 aa, Homo sapiens
MFSGGCHSPGFGRPSPAFPAPGSPPPAPRPCRQETGEQIAIKQCRQELSPRNRERWCLEIQIMRRLTHPNVVAARDVPEGMQNLAPNDLPLLAMEYCQGGDLRKYLNQFENCCGLREGAILTLLSDIASALRYLHENRIIHRDLKPENIVLQQGEQRLIHKIIDLGYAKELDQGSLCTSFVGTLQYLAPELLEQQKYTVTVDYWSFGTLAFECITGFRPFLPNWQPVQWHSKVRQKSEVDIVVSEDLNGTVKFSSSLPYPNNLNSVLAERLEKWLQLMLMWHPRQRGTDPTYGPNGCFKALDDILNLKLVHILNMVTGTIHTYPVTEDESLQSLKARIQQDTGIPEEDQELLQEAGLALIPDKPATQCISDGKLNEGHTLDMDLVFLFDNSKITYETQISPRPQPESVSCILQEPKRNLAFFQLRKVWGQVWHSIQTLKEDCNRLQQGQRAAMMNLLRNNSCLSKMKNSMASMSQQLKAKLDFFKTSIQIDLEKYSEQTEFGITSDKLLLAWREMEQAVELCGRENEVKLLVERMMALQTDIVDLQRSPMGRKQGGTLDDLEEQARELYRRLREKPRDQRTEGDSQEMVRLLLQAIQSFEKKVRVIYTQLSKTVVCKQKALELLPKVEEVVSLMNEDEKTVVRLQEKRQKELWNLLKIACSKVRGPVSGSPDSMNASRLSQPGQLMSQPSTASNSLPEPAKKSEELVAEAHNLCTLLENAIQDTVREQDQSFTALDWSWLQTEEEEHSCLEQAS

SEQ ID NO: 13255 - protein, 256 aa, Homo sapiens
MSWSPSLTTQTCGAWEMKERLGTGGFGNVIRWHNQETGEQIAIKQCRQELSPRNRERWCLEIQIMRRLTHPNVVAARDVPEGMQNLAPNDLPLLAMEYCQGGDLRKYLNQFENCCGLREGAILTLLSDIASALRYLHENRIIHRDLKPENIVLQQGEQRLIHKIIDLGYAKELDQGSLCTSFVGTLQYLAPELLEQQKYTVTVDYWSFGTLAFECITGFRPFLPNWQPVQCVRMWPGTVAHSCNPSTLGGRGRWIS

SEQ ID NO: 13256 - protein, 697 aa, Homo sapiens
MSSDGTIRLTHPNVVAARDVPEGMQNLAPNDLPLLAMEYCQGGDLRKYLNQFENCCGLREGAILTLLSDIASALRYLHENRIIHRDLKPENIVLQQGEQRLIHKIIDLGYAKELDQGSLCTSFVGTLQYLAPELLEQQKYTVTVDYWSFGTLAFECITGFRPFLPNWQPVQWHSKVRQKSEVDIVVSEDLNGTVKFSSSLPYPNNLNSVLAERLEKWLQLMLMWHPRQRGTDPTYGPNGCFKALDDILNLKLVHILNMVTGTIHTYPVTEDESLQSLKARIQQDTGIPEEDQELLQEAGLALIPDKPATQCISDGKLNEGHTLDMDLVFLFDNSKITYETQISPRPQPESVSCILQEPKRNLAFFQLRKVWGQVWHSIQTLKEDCNRLQQGQRAAMMNLLRNNSCLSKMKNSMASMSQQLKAKLDFFKTSIQIDLEKYSEQTEFGITSDKLLLAWREMEQAVELCGRENEVKLLVERMMALQTDIVDLQRSPMGRKQGGTLDDLEEQARELYRRLREKPRDQRTEGDSQEMVRLLLQAIQSFEKKVRVIYTQLSKTVVCKQKALELLPKVEEVVSLMNEDEKTVVRLQEKRQKELWNLLKIACSKVRGPVSGSPDSMNASRLSQPGQLMSQPSTASNSLPEPAKKSEELVAEAHNLCTLLENAIQDTVREQDQSFTALDWSWLQTEEEEHSCLEQAS

SEQ ID NO: 13257 - protein, 828 aa, Homo sapiens
MDSEAFQSARDFLDMNFQSLAMKHMDLKQMELDTAAAKVDELTKQLESLWSDSPAPPGPQAGPPSRPPRYSSSSIPEPFGSRGSPRKAATDGADTPFGRSESAPTLHPYSPLSPKGRPSSPRTPLYLQPDAYGSLDRATSPRPRAFDGAGSSLGRAPSPRPGPGPLRQQGPPTPFDFLGRAGSPRGSPLAEGPQAFFPERGPSPRPPATAYDAPASAFGSSLLGSGGSAFAPPLRAQDDLTLRRRPPKAWNESDLDVAYEKKPSQTASYERLDVFARPASPSLQLLPWRESSLDGLGGTGKDNLTSATLPRNYKVSPLASDRRSDAGSYRRSLGSAGPSGTLPRSWQPVSRIPMPPSSPQPRGAPRQRPIPLSMIFKLQNAFWEHGASRAMLPGSPLFTRAPPPKLQPQPQPQPQPQSQPQPQLPPQPQTQPQTPTPAPQHPQQTWPPVNEGPPKPPTELEPEPEIEGLLTPVLEAGDVDEGPVARPLSPTRLQPALPPEAQSVPELEEVARVLAEIPRPLKRRGSMEQAPAVALPPTHKKQYQQIISRLFHRHGGPGPGGPEPELSPITEGSEARAGPPAPAPPAPIPPPAPSQSSPPEQPQSMEMRSVLRKAGSPRKARRARLNPLVLLLDAALTGELEVVQQAVKEMNDPSQPNEEGITALHNAICGANYSIVDFLITAGANVNSPDSHGWTPLHCAASCNDTVICMALVQHGAAIFATTLSDGATAFEKCDPYREGYADCATYLADVEQSMGLMNSGAVYALWDYSAEFGDELSFREGESVTVLRRDGPEETDWWWAALHGQEGYVPRNYFGLFPRVKPQRSKV

SEQ ID NO: 13258 - protein, 123 aa, Homo sapiens
MDLLHKNMKHLWFFLLLVAAPRWVLSQVQLQQWGAGLLKPSETLSLTCAVYGGSFSGYYWSWIRQPPGKGLEWIGEINHSGSTNYNPSLKSRVTISVDTSKNQFSLKLSSVTAADTAVYYCAR

SEQ ID NO: 13259 - protein, 125 aa, Homo sapiens
MDLMCKKMKHLWFFLLLVAAPRWVLSQLQLQESGPGLVKPSETLSLTCTVSGGSISSSSYYWGWIRQPPGKGLEWIGSIYYSGSTYYNPSLKSRVTISVDTSKNQFSLKLSSVTAADTAVYYCAR

SEQ ID NO: 13260 - protein, 1749 aa, Homo sapiens
MHLKHLRTLLSPQDGAAKVTCMAWSQNNAKFAVCTVDRVVLLYDEHGERRDKFSTKPADMKYGRKSYMVKGMAFSPDSTKIAIGQTDNIIYVYKIGEDWGDKKVICNKFIQTSAVTCLQWPAEYIIVFGLAEGKVRLANTKTNKSSTIYGTESYVVSLTTNCSGKGILSGHADGTIVRYFFDDEGSGESQGKLVNHPCPPYALAWATNSIVAAGCDRKIVAYGKEGHMLQTFDYSRDPQEREFTTAVSSPGGQSVVLGSYDRLRVFNWIPRRSIWEEAKPKEITNLYTITALAWKRDGSRLCVGTLCGGVEQFDCCLRRSIYKNKFELTYVGPSQVIVKNLSSGTRVVLKSHYGYEVEEVKILGKERYLVAHTSETLLLGDLNTNRLSEIAWQGSGGNEKYFFENENVCMIFNAGELTLVEYGNNDTLGSVRTEFMNPHLISVRINERCQRGTEDNKKLAYLIDIKTIAIVDLIGGYNIGTVSHESRVDWLELNETGHKLLFRDRKLRLHLYDIESCSKTMILNFCSYMQWVPGSDVLVAQNRNSLCVWYNIEAPERVTMFTIRGDVIGLERGGGKTEVMVMEGVTTVAYTLDEGLIEFGTAIDDGNYIRATAFLETLEMTPETEAMWKTLSKLALEARQLHIAERCFSALGQVAKARFLHETNEIADQVSREYGGEGTDFYQVRARLAMLEKNYKLAEMIFLEQNAVEEAMGMYQELHRWDECIAVAEAKGHPALEKLRRSYYQWLMDTQQEERAGELQESQGDGLAAISLYLKAGLPAKAARLVLTREELLANTELVEHITAALIKGELYERAGDLFEKIHNPQKALECYRKGNAFMKAVELARLAFPVEVVKLEEAWGDHLVQQKQLDAAINHYIEARCSIKAIEAALGARQWKKAIYILDLQDRNTASKYYPLVAQHYASLQEYEIAEELYTKGDRTKDAIDMYTQAGRWEQAHKLAMKCMRPEDVSVLYITQAQEMEKQGKYREAERLYVTVQEPDLAITMYKKHKLYDDMIRLVGKHHPDLLSDTHLHLGKELEAEGRLQEAEYHYLEAQEWKATVNMYRASGLWEEAYRVARTQGGANAHKHVAYLWAKSLGGEAAVRLLNKLGLLEAAVDHAADNCSFEFAFELSRLALKHKTPEVHLKYAMFLEDEGKFEEAEAEFIRAGKPKEAVLMFVHNQDWEAAQRVAEAHDPDSVAEVLVGQARGALEEKDFQKAEGLLLRAQRPGLALNYYKEAGLWSDALRICKDYVPSQLEALQEEYEREATKKGARGVEGFVEQARHWEQAGEYSRAVDCYLKVRDSGNSGLAEKCWMKAAELSIKFLPPQRNMEVVLAVGPQLIGIGKHSAAAELYLNLDLVKEAIDAFIEGEEWNKAKRVAKELDPRYEDYVDQHYKEFLKNQGKVDSLVGVDVIAALDLYVEQGQWDKCIETATKQNYKILHKYVALYATHLIREGSSAQALALYVQHGAPANPQNFNIYKRIFTDMVSSPGTNCAEAYHSWADLRDVLFNLCENLVKSSEANSPAHEEFKTMLLIAHYYATRSAAQSVKQLETVAARLSVSLLRHTQLLPVDKAFYEAGIAAKAVGWDNMAFIFLNRFLDLTDAIEEGTLDGLDHSDFQDTDIPFEVPLPAKQHVPEAEREEVRDWVLTVSMDQRLEQVLPRDERGAYEASLVAASTGVRALPCLITGYPILRNKIEFKRPGKAANKDNWNKFLMAIKTSHSPVCQDVLKFISQWCGGLPSTSFSFQ

SEQ ID NO: 13261 - protein, 1525 aa, Homo sapiens
MHLKHLRTLLSPQDGAAKVTCMAWSQNNAKFAVCTVDRVVLLYDEHGERRDKFSTKPADMKYGRKSYMVKGMAFSPDSTKIAIGQTDNIIYVYKIGEDWGDKKVICNKFIQTSAVTCLQWPAEYIIVFGLAEGKVRLANTKTNKSSTIYGTESYVVSLTTNCSGKGILSGHADGTIVRYFFDDEGSGESQGKLVNHPCPPYALAWATNSIVAAGCDRKIVAYGKEGHMLQTFDYSRDPQEREFTTAVSSPGGQSVVLGSYDRLRVFNWIPRRSIWEEAKPKEITNLYTITALAWKRDGSRLCVGTLCGGVEQFDCCLRRSIYKNKFELTYVGPSQVIVKNLSSGTRVVLKSHYGYEVEEVKILGKERYLVAHTSETLLLGDLNTNRLSEIAWQGSGGNEKYFFENENVCMIFNAGELTLVEYGNNDTLGSVRTEFMNPHLISVRINERCQRGTEDNKKLAYLIDIKTIAIVDLIGGYNIGTVSHESRVDWLELNETGHKLLFRDRKLRLHLYDIESCSKTMILNFCSYMQWVPGSDVLVAQNRNSLCVWYNIEAPERVTMFTIRGDVIGLERGGGKTEVMVMEGVTTVAYTLDEGLIEFGTAIDDGNYIRATAFLETLEMTPETEAMWKTLSKLALEARQLHIAERCFSALGQVAKARFLHETNEIADQVSREYGGEGTDFYQVRARLAMLEKNYKLAEMIFLEQNAVEEAMGMYQELHRWDECIAVAEAKGHPALEKLRRSYYQWLMDTQQEERAGELQESQGDGLAAISLYLKAGLPAKAARLVLTREELLANTELVEHITAALIKGELYERAGDLFEKIHNPQKALECYRKGNAFMKAVELARLAFPVEVVKLEEAWGDHLVQQKQLDAAINHYIEARCSIKAIEAALGARQWKKAIYILDLQDRNTASKYYPLVAQHYASLQEYEIAEELYTKGDRTKDAIDMYTQAGRWEQAHKLAMKCMRPEDVSVLYITQAQEMEKQGKYREAERLYVTVQEPDLAITMYKKHKLYDDMIRLVGKHHPDLLSDTHLHLGKELEAEGRLQEAEYHYLEAQEWKATVNMYRASGLWEEAYRVARTQGGANAHKHVAYLWAKSLGGEAAVRLLNKLGLLEAAVDHAADNCSFEFAFELSRLALKHKTPEVHLKYAMFLEDEGKFEEAEAEFIRAGKPKEAVLMFVHNQDWEAAQRVAEAHDPDSVAEVLVGQARGALEEKDFQKAEGLLLRAQRPGLALNYYKEAGLWSDALRICKDYVPSQLEALQEEYEREATKKGARGVEGFVEQARHWEQAGEYSRAVDCYLKVRDSGNSGLAEKCWMKAAELSIKFLPPQRNMEVVLAVGPQLIGIGKHSAAAELYLNLDLVKEAIDAFIEGEEWNKAKRVAKELDPRYEDYVDQHYKEFLKNQGKVDSLVGVDVIAALDLYVEQGQWDKCIETATKQNYKILHKYVALYATHLIREGSSAQALALYVQHGAPANPQNFNIYKRIFTDMVSSPGTNCAEAYHSWADLRDVLFNLAVLSPSSSVKTW

SEQ ID NO: 13262 - protein, 532 aa, Homo sapiens
MHLKHLRTLLSPQDGAAKVTCMAWSQNNAKFAVCTVDRVVLLYDEHGERRDKFSTKPADMKYGRKSYMVKGMAFSPDSTKIAIGQTDNIIYVYKIGEDWGDKKVICNKFIQTSAVTCLQWPAEYIIVFGLAEGKVRLANTKTNKSSTIYGTESYVVSLTTNCSGKGILSGHADGTIVRYFFDDEGSGESQGKLVNHPCPPYALAWATNSIVAAGCDRKIVAYGKEGHMLQTFDYSRDPQEREFTTAVSSPGGQSVVLGSYDRLRVFNWIPRRSIWEEAKPKEITNLYTITALAWKRDGSRLCVGTLCGGVEQFDCCLRRSIYKNKFELTYVGPSQVIVKNLSSGTRVVLKSHYGYEVEEVKILGKERYLVAHTSETLLLGDLNTNRLSEIAWQGSGGNEKYFFENENVCMIFNAGELTLVEYGNNDTLGSVRTEFMNPHLISVRINERCQRGTEDNKKLAYLIDIKTIAIVDLIGGYNIGTVSHESRVDWLELNETGHKLLFRDRKLRVRRATKALGIGWPTEGVRQAATRD

SEQ ID NO: 13263 - protein, 118 aa, Homo sapiens
MEFGLSWVFLVAILKGVQCEVQLVESGGVVVQPGGSLRLSCAASGFTFDDYAMHWVRQAPGKGLEWVSLISWDGGSTYYADSVKGRFTISRDNSKNSLYLQMNSLRAEDTALYYCAKD

SEQ ID NO: 13264 - protein, 110 aa, Homo sapiens
MTYPPHRAFSRSDVPYPLLSSPVQWPLSLVVGDTSTRWPQQPSALESDCPGPSHPCLAGLLGPMHPVDIPLSTALHSKHQRRLTQCVLMVQSPSKQRSLYLLNKKIPHDA

SEQ ID NO: 13265 - protein, 116 aa, Homo sapiens
MKHLWFFLLLVAAPRWVLSQVQLQESGPGLVKPSETLSLTCTVSGGSISSYYWSWIRQPPGKGLEWIGYIYYSGSTNYNPSLKSRVTISVDTSKNQFSLKLSSVTAADTAVYYCAR

SEQ ID NO: 13266 - protein, 118 aa, Homo sapiens
MKHLWFFLLLVAAPRWVLSQVQLQESGPGLVKPSETLSLTCTVSGGSVSSGSYYWSWIRQPPGKGLEWIGYIYYSGSTNYNPSLKSRVTISVDTSKNQFSLKLSSVTAADTAVYYCAR

SEQ ID NO: 13267 - protein, 452 aa, Homo sapiens [sequence omitted]

SEQ ID NO: 13268 - protein, 676 aa, Homo sapiens
MSSLQALCSGLPLRPLPENRGRQAGVPHAPVRTPSLSPVEKQLALRNALRYFPPDVQELLAPEFAQELQLYGHIYMYRFCPDIEMRAYPIEQYPCQTKVAAAIMHMIMNNLDPAVAQFPQELVTYGGNGQVFSNWAQFWLTMFYLSKMTEEQTLVMYSGHPLGLFPSSRSAPRLVITNGMVIPNYSSRTEYEKLFALGVTMYGQMTAGSYCYIGPQGIVHGTVLTVLNAARRYLGIEDLAGKVFVTSGLGGMSGAQAKAAVIVGCIGVIAEVDKAALEKRHRQGWLMEVTDSLDRCIQRLREARKKKEVLSLGYHGNVVALWERLVHELDTTGECLVDLGSDQTSCHNPFNGGYYPVQLSFTEAQSLMASNPAVFKDLVQESLRRQVSAINRLAEEKFFFWDYGNAFLLEAQRAGADVEKKGAGRTEFRYPSYVQHIMGDIFSQGFGPFRWVCTSGDPQDLAVTDELATSVLEEAIADGVKVSVKLQYMDNIRWIREAARHRLVVGSQARILYSDQKGRVAIAVAINQAIACRRIKAPVVLSRDHHDVSGTDSPFRETSNIYDGSAFCADMAVQNFVGDACRGATWVALHNGGGVGWGEVINGGFGLVLDGTPEAEGRARLMLSWDVSNGVARRCWSGNQKAYEIICQTMQENSTLVVTLPHKVEDERVLQQALQL

SEQ ID NO: 13269 - protein, 736 aa, Homo sapiens
MSSLQALCSGLPLRPLPENRGRQAGVPHAPVRTPSLSPVEKQLALRNALRYFPPDVQELLAPEFAQELQLYGHIYMYRFCPDIEMRAYPIEQYPCQTKVAAAIMHMIMNNLDPAVAQFPQELVTYGGNGQVFSNWAQFWLTMFYLSKMTEEQTLVMYSGHPLGLFPSSRSAPRLVITNGMVIPNYSSRTEYEKLFALGVTMYGQMTAGSYCYIGPQGIVHGTVLTVLNAARRYLGIEDLAGKVFVTSGLGGMSGAQAKAAVIVGCIGVIAEVDKAALEKRHRQGWLMEVTDSLDRCIQRLRVLQLGLQQALGWAGLPAALGLCVLSCFVNLAPLGEGRCLAPSGFSRPLLGAPVLLLCPSREARKKKEVLSLGYHGNVVALWERLVHELDTTGECLVDLGSDQTSCHNPFNGGYYPVQLSFTEAQSLMASNPAVFKDLVQESLRRQVSAINRLAEEKFFFWDYGNAFLLEAQRAGADVEKKGAGRTEFRYPSYVQHIMGDIFSQGFGPFRWVCTSGDPQDLAVTDELATSVLEEAIADGVKVSVKLQYMDNIRWIREAARHRLVVGSQARILYSDQKGRVAIAVAINQAIACRRIKAPVVLSRDHHDVSGTDSPFRETSNIYDGSAFCADMAVQNFVGDACRGATWVALHNGGGVGWGEVINGGFGLVLDGTPEAEGRARLMLSWDVSNGVARRCWSGNQKAYEIICQTMQENSTLVVTLPHKVEDERVLQQALQL

SEQ ID NO: 13270 - protein, 117 aa, Homo sapiens
MKWMFKEDHSLEHRCVESAKIRAKYPDRVPVIVEKVSGSQIVDIDKRKYLVPSDITVAQFMWIIRKRIQLPSEKAIFLFVDKTVPQSSLTMGQLYEKEKDEDGFLYVAYSGENTFGF

SEQ ID NO: 13271 - protein, 117 aa, Homo sapiens
MKFQYKEDHPFEYRKKEGEKIRKKYPDRVPVIVEKAPKARVPDLDKRKYLVPSDLTVGQFYFLIRKRIHLRPEDALFFFVNNTIPPTSATMGQLYEDNHEEDYFLYVAYSDESVYGK

SEQ ID NO: 13272 - protein, 146 aa, Homo sapiens
MKFQYKEDHPFEYRKKEGEKIRKKYPDRVPVIVEKAPKARVPDLDKRKYLVPSDLTVGQFYFLIRKRIHLRPEDALFFFVNNTIPPTSATMGQLYEVMVLVAQYWMPSSAVWHPLALVLDALITHLRSGAEGVIYPDPLTYGSVRL

SEQ ID NO: 13273 - protein, 117 aa, Homo sapiens
MKFQYKEVHPFEYRKKEGEKIRKKYPDRVPLIVEKAPKARVPDLDRRKYLVPSDLTDGQFYLLIRKRIHLRPEDALFFFVNNTIPPTSATMGQLYEDSHEEDDFLYVAYSNESVYGK

SEQ ID NO: 13274 - protein, 180 aa, Homo sapiens
MKSIYFVAGLFVMLVQGSWQRSLQDTEEKSRSFSASQADPLSDPDQMNEDKRHSQGTFTSDYSKYLDSRRAQDFVQWLMNTKRNRNNIAKRHDEFERHAEGTFTSDVSSYLEGQAAKEFIAWLVKGRGRRDFPEEVAIVEELGRRHADGSFSDEMNTILDNLAARDFINWLIQTKITDRK

SEQ ID NO: 13275 - protein, 509 aa, Homo sapiens
MPSGFQQIGSEDGEPPQQRVTGTLVLAVFSAVLGSLQFGYNIGVINAPQKVIEQSYNETWLGRQGPEGPSSIPPGTLTTLWALSVAIFSVGGMISSFLIGIISQWLGRKRAMLVNNVLAVLGGSLMGLANAAASYEMLILGRFLIGAYSGLTSGLVPMYVGEIAPTHLRGALGTLNQLAIVIGILIAQVLGLESLLGTASLWPLLLGLTVLPALLQLVLLPFCPESPRYLYIIQNLEGPARKSLKRLTGWADVSGVLAELKDEKRKLERERPLSLLQLLGSRTHRQPLIIAVVLQLSQQLSGINAVFYYSTSIFETAGVGQPAYATIGAGVVNTVFTLVSVLLVERAGRRTLHLLGLAGMCGCAILMTVALLLLERVPAMSYVSIVAIFGFVAFFEIGPGPIPWFIVAELFSQGPRPAAMAVAGFSNWTSNFIIGMGFQYVAEAMGPYVFLLFAVLLLGFFIFTFLRVPETRGRTFDQISAAFHRTPSLLEQEVKPSTELEYLGPDEND

SEQ ID NO: 13276 - protein, 415 aa, Homo sapiens
MPSGFQQIGSEDGEPPQQRVTGTLVLAVFSAVLGSLQFGYNIGVINAPQKVIEQSYNETWLGRQGPEGPSSIPPGTLTTLWALSVAIFSVGGMISSFLIGIISQWLGRKRAMLVNNVLAVLGGSLMGLANAAASYEMLILGRFLIGAYSGLTSGLVPMYVGEIAPTHLRGALGTLNQLAIVIGILIAQVLGLESLLGTASLWPLLLGLTVLPALLQLVLLPFCPESPRYLYIIQNLEGPARKSLKRLTGWADVSGVLAELKDEKRKLERERPLSLLQLLGSRTHRQPLIIAVVLQLSQQLSGINAVFYYSTSIFETAGVGQPAYATIGAGVVNTVFTLVSVTAHLWNGPSHWLHLPGCPGGVVGGAGGAPDAPSPGPGGHVWLCHPDDCGSAPAGASSSHELRLHCGHLWLRGIF

SEQ ID NO: 13277 - protein, 781 aa, Homo sapiens
MAHRPKRTFRQRAADSSDSDGAEESPAEPGAPRELPVPGSAEEEPPSGGGRAQVAGLPHRVRGPRGRGRVWASSRRATKAAPRADEGSESRTLDVSTDEEDKIHHSSESKDDQGLSSDSSSSLGEKELSSTVKIPDAAFIQAARRKRELARAQDDYISLDVQHTSSISGMKRESEDDPESEPDDHEKRIPFTLRPQTLRQRMAEESISRNEETSEESQEDEKQDTWEQQQMRKAVKIIEERDIDLSCGNGSSKVKKFDTSISFPPVNLEIIKKQLNTRLTLLQETHRSHLREYEKYVQDVKSSKSTIQNLESSSNQALNCKFYKSMKIYVENLIDCLNEKIINIQEIESSMHALLLKQAMTFMKRRQDELKHESTYLQQLSRKDETSTSGNFSVDEKTQWILEEIESRRTKRRQARVLSGNCNHQEGTSSDDELPSAEMIDFQKSQGDILQKQKKVFEEVQDDFCNIQNILLKFQQWREKFPDSYYEAFISLCIPKLLNPLIRVQLIDWNPLKLESTGLKEMPWFKSVEEFMDSSVEDSKKESSSDKKVLSAIINKTIIPRLTDFVEFLWDPLSTSQTTSLITHCRVILEEHSTCENEVSKSRQDLLKSIVSRMKKAVEDDVFIPLYPKSAVENKTSPHSKFQERQFWSGLKLFRNILLWNGLLTDDTLQELGLGKLLNRYLIIALLNATPGPDVVKKCNQVAACLPEKWFENSAMRTSIPQLENFIQFLLQSAHKLSRSEFRDEVEEIILILVKIKALNQAESFIGEHHLDHLKSLIKED

SEQ ID NO: 13278 - protein, 743 aa, Homo sapiens
MAHRPKRTFRQRAADSSDSDGAEESPAEPGAPRELPVPGSAEEEPPSGGGRAQVAGLPHRVRGPRGRGRVWASSRRATKAAPRADEGSESRTLDVSTDEEDKIHHSSESKDDQGLSSDSSSSLGEKELSSTVKIPDAAFIQAARRKRELARAQDDYISLDVQHTSSISVSRNEETSEESQEDEKQDTWEQQQMRKAVKIIEERDIDLSCGNGSSKVKKFDTSISFPPVNLEIIKKQLNTRLTLLQETHRSHLREYEKYVQDVKSSKSTIQNLESSSNQALNCKFYKSMKIYVENLIDCLNEKIINIQEIESSMHALLLKQAMTFMKRRQDELKHESTYLQQLSRKDETSTSGNFSVDEKTQWILEEIESRRTKRRQARVLSGNCNHQEGTSSDDELPSAEMIDFQKSQGDILQKQKKVFEEVQDDFCNIQNILLKFQQWREKFPDSYYEAFISLCIPKLLNPLIRVQLIDWNPLKLESTGLKEMPWFKSVEEFMDSSVEDSKKESSSDKKVLSAIINKTIIPRLTDFVEFLWDPLSTSQTTSLITHCRVILEEHSTCENEVSKSRQDLLKSIVSRMKKAVEDDVFIPLYPKSAVENKTSPHSKFQERQFWSGLKLFRNILLWNGLLTDDTLQELGLGKLLNRYLIIALLNATPGPDVVKKCNQVAACLPEKWFENSAMRTSIPQLENFIQFLLQSAHKLSRSEFRDEVEEIILILVKIKALNQAESFIGEHHLDHLKSLIKED

SEQ ID NO: 13279 - protein, 215 aa, Homo sapiens
MAHRPKRTFRQRAADSSDSDGAEESPAEPGAPRELPVPGSAEEEPPSGGGRAQVAGLPHRVRGPRGRGRVWASSRRATKAAPRADEGSESRTLDVSTDEEDKIHHSSESKDDQGLSSDSSSSLGEKELSSTVKIPDAAFIQAARRKRELARAQDDYISLDVQHTSSISGMKRESEDDPESEPDDHEKRIPFTLRPQTLRQRMAEESSMDLPIYED

SEQ ID NO: 13280 - protein, 254 aa, Homo sapiens
MAHRPKRTFRQRAADSSDSDGAEESPAEPGAPRELPVPGSAEEEPPSGGGRAQVAGLPHRVRGPRGRGRVWASSRRATKAAPRADEGSESRTLDVSTDEEDKIHHSSESKDDQGLSSDSSSSLGEKELSSTVKIPDAAFIQAARRKRELARAQDDYISLDVQHTSSISGMKRESEDDPESEPDDHEKRIPFTLRPQTLRQRMAEESISRNEETSEESQEDEKQDTWEQQQMRKAVKIIEINITTGNSPLTPEGV

SEQ ID NO: 13281 - protein, 100 aa, Homo sapiens
MELLGEYVGQEGKPQKLRVSCEAPGDGDPFQGLLSGVAQMKDMVTELFDPLVQGEVQHRVAAAPDEDLDGDDEDDAEDENNIDNRTNFDGPSAKRPKTPS

SEQ ID NO: 13282 - protein, 82 aa, Homo sapiens
MAFTLYSLLQAALLCVNAIAVLHEERFLKNIGWGTDQGIGGFGEEPGIKSQLMNLIRSVRTVMRVPLIIVNSIAIVLLLLFG

SEQ ID NO: 13283 - protein, 366 aa, Homo sapiens
MVLHLLLFLLLTPQGGHSCQGLELARELVLAKVRALFLDALGPPAVTREGGDPGVRRLPRRHALGGFTHRGSEPEEEEDVSQAILFPATDASCEDKSAARGLAQEAEEGLFRYMFRPSQHTRSRQVTSAQLWFHTGLDRQGTAASNSSEPLLGLLALSPGGPVAVPMSLGHAPPHWAVLHLATSALSLLTHPVLVLLLRCPLCTCSARPEATPFLVAHTRTRPPSGGERARRSTPLMSWPWSPSALRLLQRPPEEPAAHANCHRVALNISFQELGWERWIVYPPSFIFHYCHGGCGLHIPPNLSLPVPGAPPTPAQPYSLLPGAQPCCAALPGTMRPLHVRTTSDGGYSFKYETVPNLLTQHCACI

SEQ ID NO: 13284 - protein, 154 aa, Homo sapiens
MTTTTTFKGVDPNSRNSSRVLRPPGGGSNFSLGFDEPTEQPVRKNKMASNIFGTPEENQASWAKSAGAKSSGGREDLESSGLQRRNSSEASSGDFLDLKGEGDIHENVDTDLPGSLGQSEEKPVPAAPVPSPVAPAPVPSRRNPPGGKSSLVLG

SEQ ID NO: 13285 - protein, 181 aa, Homo sapiens
MTTTTTFKGVDPNSRNSSRVLRPPGGGSNFSLGFDEPTEQPVRKNKMASNIFGTPEENQASWAKSAGAKSSGGREDLESSGLQRRNSSEASSGDFLDLKKMWTQTCQAAWGRVKRSPCLLRLCPARWPRPQCHPEEIPLAASPASSWVSSDCPERCRSVCFLHACELHNLSLTVHLLDLFH

SEQ ID NO: 13286 - protein, 108 aa, Homo sapiens
MASNIFGTPEENQASWAKSAGAKSSGGREDLESSGLQRRNSSEASSGDFLDLKGEGDIHENVDTDLPGSLGQSEEKPVPAAPVPSPVAPAPVPSRRNPPGGKSSLVLG

SEQ ID NO: 13287 - protein, 190 aa, Homo sapiens
MFQVPDSEGGRAGSRAMKPPGGESSNLFGSPEEATPSSRPNRMASNIFGPTEEPQNIPKRTNPPGGKGSGIFDESTPVQTRQHLNPPGGKTSDIFGSPVTATSRLAHPNKPKDHVFLCEGEEPKSDLKAARSIPAGAEPGEKGSARKAGPAKEQEPMPTVDSHEPRLGPRPRSHNKVLNPPGGKSSISFY

SEQ ID NO: 13288 - protein, 174 aa, Homo sapiens
MKPPGGESSNLFGSPEEATPSSRPNRMASNIFGPTEEPQNIPKRTNPPGGKGSGIFDESTPVQTRQHLNPPGGKTSDIFGSPVTATSRLAHPNKPKDHVFLCEGEEPKSDLKAARSIPAGAEPGEKGSARKAGPAKEQEPMPTVDSHEPRLGPRPRSHNKVLNPPGGKSSISFY

SEQ ID NO: 13289 - protein, 218 aa, Homo sapiens
MFQVPDSEGGRAGSRKWQLLTGSLASTSPSLLSGQGPWAPLQRAMKPPGGESSNLFGSPEEATPSSRPNRMASNIFGPTEEPQNIPKRTNPPGGKGSGIFDESTPVQTRQHLNPPGGKTSDIFGSPVTATSRLAHPNKPKDHVFLCEGEEPKSDLKAARSIPAGAEPGEKGSARKAGPAKEQEPMPTVDSHEPRLGPRPRSHNKVLNPPGGKSSISFY

SEQ ID NO: 13290 - protein, 165 aa, Homo sapiens
MGWDLTVKMLAGNEFQVSLSSSMSVSELKAQITQKIGVHAFQQRLAVHPSGVALQDRVPLASQGLGPGSTVLLVVDKCDEPLSILVRNNKGRSSTYEVRLTQTVAHLKQQVSGLEGVQDDLFWLTFEGKPLEDQLPLGEYGLKPLSTVFMNLRLRGGGTEPGGRS

SEQ ID NO: 13291 - protein, 181 aa, Homo sapiens
MAGSREVVAMDCEMVGLGPHRESGLARCSLVNVHGAVLYDKFIRPEGEITDYRTRVSGVTPQHMVGATPFAVARLEILQLLKGKLVVGHDLKHDFQALKEDMSGYTIYDTSTDRLLWREAKLDHCRRVSLRVLSERLLHKSIQNSLLGHSSVEDARATMELYQISQRIRARRGLPRLAVSD

SEQ ID NO: 13292 - protein, 86 aa, Homo sapiens
MAGSREVVAMDCEMVGLGPHRESGLARCSLVNVHGAVLYDKFIRPEGEITDYRTRVSGVTPQHMVGATPFAVARLEVPFPSSPTAA

SEQ ID NO: 13293 - protein, 795 aa, Homo sapiens
MATMLEGRCQTQPRSSPSGREASLWSSGFGMKLEAVTPFLGKYRPFVGRCCQTCTPKSWESLFHRSITDLGFCNVILVKEENTRFRGWLVRRLCYFLWSLEQHIPPCQDVPQKIMESTGVQNLLSGRVPGGTGEGQVPDLVKKEVQRILGHIQAPPRPFLVRLFSWALLRFLNCLFLNVQLHKGQMKMVQKAAQAGLPLVLLSTHKTLLDGILLPFMLLSQGLGVLRVAWDSRACSPALRALLRKLGGLFLPPEASLSLDSSEGLLARAVVQAVIEQLLVSGQPLLIFLEEPPGALGPRLSALGQAWVGFVVQAVQVGIVPDALLVPVAVTYDLVPDAPCDIDHASAPLGLWTGALAVLRSLWSRWGCSHRICSRVHLAQPFSLQEYIVSARSCWGGRQTLEQLLQPIVLGQCTAVPDTEKEQEWTPITGPLLALKEEDQLLVRRLSCHVLSASVGSSAVMSTAIMATLLLFKHQKLLGEFSWLTEEILLRGFDVGFSGQLRSLLQHSLSLLRAHVALLRIRQGDLLVVPQPGPGLTHLAQLSAELLPVFLSEAVGACAVRGLLAGRVPPQGPWELQGILLLSQNELYRQILLLMHLLPQDLLLLKPCQSSYCYCQEVLDRLIQCGLLVAEETPGSRPACDTGRQRLSRKLLWKPSGDFTDSDSDDFGEADGRYFRLSQQSHCPDFFLFLCRLLSPLLKAFAQAAAFLRQGQLPDTELGYTEQLFQFLQATAQEEGIFECADPKLAISAVWTFRDLGVLQQTPSPAGPRLHLSPTFASLDNQEKLEQFIRQFICS

SEQ ID NO: 13294 - protein, 671 aa, Homo sapiens
MATMLEGRCQTQPRSSPSGREASLWSSGFGMKLEAVTPFLGKYRPFVGRCCQTCTPKSWESLFHRSITDLGFCNVILVKEENTRFRGWLVRRLCYFLWSLEQHIPPCQDVPQKIMESTGVQNLLSGRVPGGTGEGQVPDLVKKEVQRILGHIQAPPRPFLVRLFSWALLRFLNCLFLNVQLHKGQMKMVQKAAQAGLPLVLLSTHKTLLDGILLPFMLLSQGLGVLRVAWDSRACSPALRALLRKLGGLFLPPEASLSLDSSEGLLARAVVQAVIEQLLVSGQPLLIFLEEPPGALGPRLSALGQAWVGFVVQAVQVGIVPDALLVPVAVTYDLVPDAPCDIDHASAPLGLWTGALAVLRSLWSRWGCSHRICSRVHLAQPFSLQEYIVSARSCWGGRQTLEQLLQPIVLGQCTAVPDTEKEQEWTPITGPLLALKEEDQLLVRRLSCHVLSASVGSSAVMSTAIMATLLLFKHQKLLGEFSWLTEEILLRGFDVGFSGQLRSLLQHSLSLLRAHVALLRIRQGDLLVVPQPGPGLTHLAQLSAELLPVFLSEAVGACAVRGLLAGRVPPQGPWELQGILLLSQNELYRQILLLMHLLPQDLLLLKPCQSSYCYCQEVLDRLIQCGLLVAEESWATQSSCSSSCRPPPRKKGSSSVRTQSSPSVLSGPSET

SEQ ID NO: 13295 - protein, 801 aa, Homo sapiens
MATMLEGRCQTQPRSSPSGREASLWSSGFGMKLEAVTPFLGKYRPFVGRCCQTCTPKSWESLFHRSITDLGFCNVILVKEENTRFRGWLVRRLCYFLWSLEQHIPPCQDVPQKIMESTGVQNLLSGRVPGGTGEGQVPDLVKKEVQRILGHIQAPPRPFLVRLFSWALLRFLNCLFLNVQLHKGQMKMVQKAAQAGLPLVLLSTHKTLLDGILLPFMLLSQGLGVLRVAWDSRACSPALRALLRKLGGLFLPPEASLSLDSSEGLLARAVVQAVIEQLLVSGQPLLIFLEEPPGALGPRLSALGQAWVGFVVQAVQVGIVPDALLVPVAVTYDLVPDAPCDIDHASAPLGLWTGALAVLRSLWSRWGCSHRICSRVHLAQPFSLQEYIVSARSCWGGRQTLEQLLQPIVLGQCTAVPDTEKEQEWTPITGPLLALKEEDQLLVRRLSCHVLSASVGSSAVMSTAIMATLLLFKHQKGVFLSQLLGEFSWLTEEILLRGFDVGFSGQLRSLLQHSLSLLRAHVALLRIRQGDLLVVPQPGPGLTHLAQLSAELLPVFLSEAVGACAVRGLLAGRVPPQGPWELQGILLLSQNELYRQILLLMHLLPQDLLLLKPCQSSYCYCQEVLDRLIQCGLLVAEETPGSRPACDTGRQRLSRKLLWKPSGDFTDSDSDDFGEADGRYFRLSQQSHCPDFFLFLCRLLSPLLKAFAQAAAFLRQGQLPDTELGYTEQLFQFLQATAQEEGIFECADPKLAISAVWTFRDLGVLQQTPSPAGPRLHLSPTFASLDNQEKLEQFIRQFICS

SEQ ID NO: 13296 - protein, 508 aa, Homo sapiens
MLLSQGLGVLRVAWDSRACSPALRALLRKLGGLFLPPEASLSLDSSEGLLARAVVQAASAPLGLWTGALAVLRSLWSRWGCSHRICSRVHLAQPFSLQEYIVSARSCWGGRQTLEQLLQPIVLGQCTAVPDTEKEQEWTPITGPLLALKEEDQLLVRRLSCHVLSASVGSSAVMSTAIMATLLLFKHQKLLGEFSWLTEEILLRGFDVGFSGQLRSLLQHSLSLLRAHVALLRIRQGDLLVVPQPGPGLTHLAQLSAELLPVFLSEAVGACAVRGLLAGRVPPQGPWELQGILLLSQNELYRQILLLMHLLPQDLLLLKPCQSSYCYCQEVLDRLIQCGLLVAEETPGSRPACDTGRQRLSRKLLWKPSGDFTDSDSDDFGEADGRYFRLSQQSHCPDFFLFLCRLLSPLLKAFAQAAAFLRQGQLPDTELGYTEQLFQFLQATAQEEGIFECADPKLAISAVWTFRDLGVLQQTPSPAGPRLHLSPTFASLDNQEKLEQFIRQFICS

SEQ ID NO: 13297 - protein, 588 aa, Homo sapiens
MARGGAGAEEASLRSNALSWLACGLLALLANAWIILSISAKQQKHKPLELLLCFLAGTHILMAAVPLTTFAVVQLRRQASSDYDWNESICKVFVSTYYTLALATCFTVASLSYHRMWMVRWPVNYRLSNAKKQALHAVMGIWMVSFILSTLPSIGWHNNGERYYARGCQFIVSKIGLGFGVCFSLLLLGGIVMGLVCVAITFYQTLWARPRRARQARRVGGGGGTKAGGPGALGTRPAFEVPAIVVEDARGKRRSSLDGSESAKTSLQVTNLVSAIVFLYDSLTGVPILVVSFFSLKSDSAPPWMVLAVLWCSMAQTLLLPSFIWSCERYRADVRTVWEQCVAIMSEEDGDDDGGCDDYAEGRVCKVRFDANGATGPGSRDPAQVKLLPGRHMLFPPLERVHYLQVPLSRRLSHDETNIFSTPREPGSFLHKWSSSDDIRVLPAQSRALGGPPEYLGQRHRLEDEEDEEEAEGGGLASLRQFLESGVLGSGGGPPRGPGFFREEITTFIDETPLPSPTASPGHSPRRPRPLGLSPRRLSLGSPESRAVGLPLGLSAGRRCSLTGGEESARAWGGSWGPGNPIFPQLTL

SEQ ID NO: 13298 - protein, 304 aa, Homo sapiens
MLSTGVVSFFSLKSDSAPPWMVLAVLWCSMAQTLLLPSFIWSCERYRADVRTVWEQCVAIMSEEDGDDDGGCDDYAEGRVCKVRFDANGATGPGSRDPAQVKLLPGRHMLFPPLERVHYLQVPLSRRLSHDETNIFSTPREPGSFLHKWSSSDDIRVLPAQSRALGGPPEYLGQRHRLEDEEDEEEAEGGGLASLRQFLESGVLGSGGGPPRGPGFFREEITTFIDETPLPSPTASPGHSPRRPRPLGLSPRRLSLGSPESRAVGLPLGLSAGRRCSLTGGEESARAWGGSWGPGNPIFPQLTL

SEQ ID NO: 13299 - protein, 456 aa, Homo sapiens
MFLLLPFDSLIVNLLGISLTVLFTLLLVFIIVPAIFGVSFGIRKLYMKSLLKIFAWATLRMERGAKEKNHQLYKPYTNGIIAKDPTSLEEEIKEIRRSGSSKALDNTPEFELSDIFYFCRKGMETIMDDEVTKRFSAEELESWNLLSRTNYNFQYISLRLTVLWGLGVLIRYCFLLPLRIALAFTGISLLVVGTTVVGYLPNGRFKEFMSKHVHLMCYRICVRALTAIITYHDRENRPRNGGICVANHTSPIDVIILASDGYYAMVGQVHGGLMGVIQRAMVKACPHVWFERSEVKDRHLVAKRLTEHVQDKSKLPILIFPEGTCINNTSVMMFKKGSFEIGATVYPVAIKYDPQFGDAFWNSSKYGMVTYLLRMMTSWAIVCSVWYLPPMTREADEDAVQFANRVKSAIARQGGLVDLLWDGGLKREKVKDTFKEEQQKLYSKMIVGNHKDRSRS

SEQ ID NO: 13300 - protein, 205 aa, Homo sapiens
MAAARPSLGRVLPGSSVLFLCDMQEKFRHNIAYFPQIVSVAARMLKVARLLEVPVMLTEQYPQGLGPTVPELGTEGLRPLAKTCFSMVPALQQELDSRPQLRSVLLCGIEAQACILNTTLDLLDRGLQVHVVVDACSSRSQVDRLVALARMRQSGAFLSTSEGLILQLVGDAVHPQFKEIQKLIKEPAPDSGLLGLFQGQNSLLH

SEQ ID NO: 13301 - protein, 221 aa, Homo sapiens
MAAARPSLGRVLPGSSVLFLCDMQEKFRHNIAYFPQIVSVAARMLKVARLLEVPVMLTEQYPQGLGPTVPELGTEGLRPLAKTCFSMVPALQQELDSRPQLRSVLLCGIEAQACILDPRSYPGLALTSLYPQNTTLDLLDRGLQVHVVVDACSSRSQVDRLVALARMRQSGAFLSTSEGLILQLVGDAVHPQFKEIQKLIKEPAPDSGLLGLFQGQNSLLH

SEQ ID NO: 13302 - protein, 135 aa, Homo sapiens
MAAARPSLGRVLPGSSVLFLCDMQEKFRHNIAYFPQIVSVAARMLKNTTLDLLDRGLQVHVVVDACSSRSQVDRLVALARMRQSGAFLSTSEGLILQLVGDAVHPQFKEIQKLIKEPAPDSGLLGLFQGQNSLLH

SEQ ID NO: 13303 - protein, 404 aa, Homo sapiens
MSVKPSWGPGPSEGVTAVPTSDLGEIHNWTELLDLFNHTLSECHVELSQSTKRVVLFALYLAMFVVGLVENLLVICVNWRGSGRAGLMNLYILNMAIADLGIVLSLPVWMLEVTLDYTWLWGSFSCRFTHYFYFVNMYSSIFFLVCLSVDRYVTLTSASPSWQRYQHRVRRAMCAGIWVLSAIIPLPEVVHIQLVEGPEPMCLFMAPFETYSTWALAVALSTTILGFLLPFPLITVFNVLTACRLRQPGQPKSRRHCLLLCAYVAVFVMCWLPYHVTLLLLTLHGTHISLHCHLVHLLYFFYDVIDCFSMLHCVINPILYNFLSPHFRGRLLNAVVHYLPKDQTKAGTCASSSSCSTQHSIIITKGDSQPAAAAPHPEPSLSFQAHHLLPNTSPISPTQPLTPS

SEQ ID NO: 13304 - protein, 97 aa, Homo sapiens
MAKSFPVFSLLSFILIHLVLSSVSGPRHWWPPRGIIKVKCPYEKVNLSWYNGTVNPCPGLYQPICGTNFITYDNPCILCVESLKSHGRIRFYHDGKC

SEQ ID NO: 13305 - protein, 946 aa, Homo sapiens
MAVYCYALNSLVIMNSANEMKSGGGPGPSGSETPPPPRRAVLSPGSVFSPGRGASFLFPPAESLSPEEPRSPGGWRSGRRRLNSSSGSGSGSSGSSVSSPSWAGRLRGDRQQVVAAGTLSPPGPEEAKRKLRILQRELQNVQVNQKVGMFEAHIQAQSSAIQAPRSPRLGRARSPSPCPFRSSSQPPGRVLVQGARSEERRTKSWGEQCPETSGTDSGRKGGPSLCSSQVKKGMPPLPGRAAPTGSEAQGPSAFVRMEKGIPASPRCGSPTAMEIDKRGSPTPGTRSCLAPSLGLFGASLTMATEVAARVTSTGPHRPQDLALTEPSGRARELEDLQPPEALVERQGQFLGSETSPAPERGGPRDGEPPGKMGKGYLPCGMPGSGEPEVGKRPEETTVSVQSAESSDSLSWSRLPRALASVGPEEARSGAPVGGGRWQLSDRVEGGSPTLGLLGGSPSAQPGTGNVEAGIPSGRMLEPLPCWDAAKDLKEPQCPPGDRVGVQPGNSRVWQGTMEKAGLAWTRGTGVQSEGTWESQRQDSDALPSPELLPQDPDKPFLRKACSPSNIPAVIITDMGTQEDGALEETQGSPRGNLPLRKLSSSSASSTGFSSSYEDSEEDISSDPERTLDPNSAFLHTLDQQKPRVSKSWRKIKNMVHWSPFVMSFKKKYPWIQLAGHAGSFKAAANGRILKKHCESEQRCLDRLMVDVLRPFVPAYHGDVVKDGERYNQMDDLLADFDSPCVMDCKMGIRTYLEEELTKARKKPSLRKDMYQKMIEVDPEAPTEEEKAQRAVTKPRYMQWRETISSTATLGFRIEGIKKEDGTVNRDFKKTKTREQVTEAFREFTKGNHNILIAYRDRLKAIRTTLEVSPFFKCHEVIGSSLLFIHDKKEQAKVWMIDFGKTTPLPEGQTLQHDVPWQEGNREDGYLSGLNNLVDILTEMSQDAPLA

SEQ ID NO: 13306 - protein, 644 aa, Homo sapiens
MAVYCYALNSLVIMNSANEMKSGGGPGPSGSETPPPPRRAVLSPGSVFSPGRGASFLFPPAESLSPEEPRSPGGWRSGRRRLNSSSGSGSGSSGSSVSSPSWAGRLRGDRQQVVAAGTLSPPGPEEAKRKLRILQRELQNVQVNQKVGMFEAHIQAQSSAIQAPRSPRLGRARSPSPCPFRSSSQPPGRVLVQGARSEERRTKSWGEQCPETSGTDSGRKGGPSLCSSQVKKGMPPLPGRAAPTGSEAQGPSAFVRMEKGIPASPRCGSPTAMEIDKRGSPTPGTRSCLAPSLGLFGASLTMATEVAARVTSTGPHRPQDLALTEPSGRARELEDLQPPEALVERQGQFLGSETSPAPERGGPRDGEPPGKMGKGYLPCGMPGSGEPEVGKRPEETTVSVQSAESSDSLSWSRLPRALASVGPEEARSGAPVGGGRWQLSDRVEGGSPTLGLLGGSPSAQPGTGNVEAGIPSGRMLEPLPCWDAAKDLKEPQCPPGDRVGVQPGNSRVWQGTMEKAGLAWTRGTGVQSEGTWESQRQDSDALPSPELLPQDPDKPFLRKACSPSNIPAVIITDMGTQEDGALEETQGSPRGNLPLRKLSSSSASSTGFSSSYEDSEEDISSDPERTLDPNSAFLHTLDQQKPRV

SEQ ID NO: 13307 - protein, 652 aa, Homo sapiens
MPLLLLLLLLPSPLHPHPICEVSKVASHLEVNCDKRNLTALPPDLPKDTTILHLSENLLYTFSLATLMPYTRLTQLNLDRCELTKLQVDGTLPVLGTLDLSHNQLQSLPLLGQTLPALTVLDVSFNRLTSLPLGALRGLGELQELYLKGNELKTLPPGLLTPTPKLEKLSLANNNLTELPAGLLNGLENLDTLLLQENSLYTIPKGFFGSHLLPFAFLHGNPWLCNCEILYFRRWLQDNAENVYVWKQGVDVKAMTSNVASVQCDNSDKFPVYKYPGKGCPTLGDEGDTDLYDYYPEEDTEGDKVRATRTVVKFPTKAHTTPWGLFYSWSTASLDSQMPSSLHPTQESTKEQTTFPPRWTPNFTLHMESITFSKTPKSTTEPTPSPTTSEPVPEPAPNMTTLEPTPSPTTPEPTSEPAPSPTTPEPTSEPAPSPTTPEPTSEPAPSPTTPEPTPIPTIATSPTILVSATSLITPKSTFLTTTKPVSLLESTKKTIPELDQPPKLRGVLQGHLESSRNDPFLHPDFCCLLPLGFYVLGLFWLLFASVVLILLLSWVGHVKPQALDSGQGAALTTATQTTHLELQRGRQVTVPRAWLLFLRGSLPTFRSSLFLWVRPNGRVGPLVAGRRPSALSQGRGQDLLSTVSIRYSGHSL

SEQ ID NO: 13308 - protein, 400 aa, Homo sapiens
MTTKNLETKVTVTSSPIRGAGDGMETEEPPKSVEVTSGVQSRKHHSLQSPWKKAVPSESPGVLQLGKMLTEKAMEVKAVRILVPKAAITHDIPNKNTKVKSLGHHKGEFLGQSEGVIEPNKELSEVKNVLEKLKNSERRLLQDKEGLSNQLRVQTEVNRELKKLLVASVGDDLQYHFERLAREKNQLILENEALGRNTAQLSEQLERMSIQCDVWRSKFLASRVMADELTNSRAALQRQNRDAHGAIQDLLSEREQFRQEMIATQKLLEELLVSLQWGREQTYSPSVQPHSTAELALTNHKLAKAVNSHLLGNVGINNQKKIPSTVEFCSTPAEKMAETVLRILDPVTCKESSPDNPFFESSPTTLLATKKNIGRFHPYTRYENITFNCCNHCRGELIAL

SEQ ID NO: 13309 - protein, 174 aa, Homo sapiens
MTTKNLETKVTVTSSPIRGAGDGMETEEPPKSVEVTSGVQSRKHHSLQSPWKKAVPSESPGVLQLGKMLTEKAMEVKAVRILVPKAAITHDIPNKNTKVKSLGHHKGEFLGQSEGVIEPNKELSEVKNVLEKLKNSERRLLQDKEGLSNQLRVQTEVRRALIDKMSTTLYVWTF

SEQ ID NO: 13310 - protein, 528 aa, Homo sapiens
MFGAAGRQPIGAPAAGNSWHFSRTMEELVHDLVSALEESSEQARGGFAETGDHSRSISCPLKRQARKRRGRKRRSYNVHHPWETGHCLSEGSDSSLEEPSKDYRENHNNNKKDHSDSDDQMLVAKRRPSSNLNNNVRGKRPLWHESDFAVDNVGNRTLRRRRKVKRMAVDLPQDISNKRTMTQPPEGCRDQDMDSDRAYQYQEFTKNKVKKRKLKIIRQGPKIQDEGVVLESEETNQTNKDKMECEEQKVSDELMSESDSSSLSSTDAGLFTNDEGRQGDDEQSDWFYEKESGGACGITGVVPWWEKEDPTELDKNVPDPVFESILTGSFPLMSHPSRRGFQARLSRLHGMSSKNIKKSGGTPTSMVPIPGPVGNKRMVHFSPDSHHHDHWFSPGARTEHDQHQLLRDNRAERGHKKNCSVRTASRQTSMHLGSLCTGDIKRRRKAAPLPGPTTAGFVGENAQPILENNIGNRMLQNMGWTPGSGLGRDGKGISEPIQAMQRPKGLGLGFPLPKSTSATTTPNAGKSA

SEQ ID NO: 13311 - protein, 376 aa, Homo sapiens
MFGAAGRQPIGAPAAGNSWHFSRTMEELVHDLVSALEESSEQARGGFAETGDHSRSISCPLKRQARKRRGRKRRSYNVHHPWETGHCLSEGSDSSLEEPSKDYRENHNNNKKDHSDSDDQMLVAKRRPSSNLNNNVRGKRPLWHESDFAVDNVGNRTLRRRRKVKRMAVDLPQDISNKRTMTQPPEGCRDQDMDSDRAYQYQEFTKNKVKKRKLKIIRQGPKIQDEGVVLESEETNQTNKDKMECEEQKVSDELMSESDSSSLSSTDAGLFTNDEGRQGDDEQSDWFYEKESGGACGITGVVPWWEKEDPTELDKNVPDPVFESILTGSFPLMSHPSRRGFQARLSRLHGMSSKNIKKSGGTPTSMATNWTSEIPL

SEQ ID NO: 13312 - protein, 625 aa, Homo sapiens
MACYIYQLPSWVLDDLCRNMDALSEWDWMEFASYVITDLTQLRKIKSMERVQGVSITRELLWWWGMRQATVQQLVDLLCRLELYRAAQIILNWKPAPEIRCPIPAFPDSVKPEKPLAASVRKAEDEQEEGQPVRMATFPGPGSSPARAHQPAFLQPPEEDAPHSLRSDLPTSSDSKDFSTSIPKQEKLLSLAGDSLFWSEADVVQATDDFNQNRKISQGTFADVYRGHRHGKPFVFKKLRETACSSPGSIERFFQAELQICLRCCHPNVLPVLGFCAARQFHSFIYPYMANGSLQDRLQGQGGSDPLPWPQRVSICSGLLCAVEYLHGLEIIHSNVKSSNVLLDQNLTPKLAHPMAHLCPVNKRSKYTMMKTHLLRTSAAYLPEDFIRVGQLTKRVDIFSCGIVLAEVLTGIPAMDNNRSPVYLKDLLLSDIPSSTASLCSRKTGVENVMAKEICQKYLEKGAGRLPEDCAEALATAACLCLRRRNTSLQEVCGSVAAVEERLRGRETLLPWSGLSEGTGSSSNTPEETDDVDNSSLDASSSMSVAPWAGAATPLLPTENGEGRLRVIVGREADSSSEACVGLEPPQDVTETSWQIEINEAKRKLMENILLYKEEKVDSIELFGP

SEQ ID NO: 13313 - protein, 482 aa, Homo sapiens
MDELVHDLASALEQTSEQNKLGELWEEMALSPRQQRRQLRKRRGRKRRSDFTHLAEHTCCYSEASESSLDEATKDCREVAPVTNFSDSDDTMVAKRHPALNAIVKSKQHSWHESDSFTENAPCRPLRRRRKVKRVTSEVAASLQQKLKVSDWSYERGCRFKSAKKQRLSRWKENTPWTSSGHGLCESAENRTFLSKTGRKERMECETDEQKQGSDENMSECETSSVCSSSDTGLFTNDEGRQGDDEQSDWFYEGECVPGFTVPNLLPKWAPDHCSEVERMDSGLDKFSDSTFLLPSRPAQRGYHTRLNRLPGAAARCLRKGRRRLVGKETSINTLGTERISHIISDPRQKEKNKALASDFPHISACAHEFNPLSPLYSLDVLADASHRRCSPAHCSARQANVHWGPPCSRDIKRKRKPVATASLSSPSAVHMDAVEPTTPASQAPKSPSSEWLVRTSAAEKATDATTATFFKMPQEKSPGYS

SEQ ID NO: 13314 - protein, 351 aa, Homo sapiens
MDELVHDLASALEQTSEQNKLGELWEEMALSPRQQRRQLRKRRGRKRRSDFTHLAEHTCCYSEASESSLDEATKDCREVAPVTNFSDSDDTMVAKRHPALNAIVKSKQHSWHESDSFTENAPCRPLRRRRKVKRVTSEVAASLQQKLKVSDWSYERGCRFKSAKKQRLSRWKENTPWTSSGHGLCESAENRTFLSKTGRKERMECETDEQKQGSDENMSECETSSVCSSSDTGLFTNDEGRQGDDEQSDWFYEGECVPGFTVPNLLPKWAPDHCSEVERMDSGLDKFSDSTFLLPSRPAQRGYHTRLNRLPGAAARCLRKGRRRLVGKVIPLTVSLAQWGDNIPYGSCVSY

SEQ ID NO: 13315 - protein, 477 aa, Homo sapiens
MDELVHDLASALEQTSEQNKLGELWEEMALSPRQQRRQLRKRRGRKRRSDFTHLAEHTCCYSEASESSLDEATKDCREVAPVTNFSDSDDTMVAKRHPALNAIVKSKQHSWHESDSFTENAPCRPLRRRRKVKRVTSEVAASLQQKLKVSDWSYERGCRFKSAKKQRLSRWKENTPWTSSGHGLCESAENRTFLSKTGRKERMECETDEQKQGSDENMSECETSSVCSSSDTGLFTNDEGRQGDDEQSDWFYEGECVPGFTVPNLLPKWAPDHCSEVERMDSGLDKFSDSTFLLPSRPAQRGYHTRLNRLPGAAARCLRKGRRRLVGKETSINTLGTERISHIISDPRQKDFWLPSAGKRERNQFNPLSPLYSLDVLADASHRRCSPAHCSARQANVHWGPPCSRDIKRKRKPVATASLSSPSAVHMDAVEPTTPASQAPKSPSSEWLVRTSAAEKATDATTATFFKMPQEKSPGYS

SEQ ID NO: 13316 - protein, 537 aa, Homo sapiens
MPHLMERMVGSGLLWLALVSCILTQASAVQRGYGNPIEASSYGLDLDCGAPGTPEAHVCFDPCQNYTLLDEPFRSTENSAGSQGCDKNMSGWYRFVGEGGVRMSETCVQVHRCQTDAPMWLNGTHPALGDGITNHTACAHWSGNCCFWKTEVLVKACPGGYHVYRLEGTPWCNLRYCTVPRDPSTVEDKCEKACRPEEECLALNSTWGCFCRQDLNSSDVHSLQPQLDCGPREIKVKVDKCLLGGLGLGEEVIAYLRDPNCSSILQTEERNWVSVTSPVQASACRNILERNQTHAIYKNTLSLVNDFIIRDTILNINFQCAYPLDMKVSLQAALQPIVSSLNVSVDGNGEFIVRMALFQDQNYTNPYEGDAVELSVESVLYVGAILEQGDTSRFNLVLRNCYATPTEDKADLVKYFIIRNSCSNQRDSTIHVEENGQSSESRFSVQMFMFAGHYDLVFLHCEIHLCDSLNEQCQPSCSRSQVRSEVPAIDLARVLDLGPITRRGAQSPGVMNGTPSTAGFLVAWPMVLLTVLLAWLF

SEQ ID NO: 13317 - protein, 390 aa, Homo sapiens
MPHLMERMVGSGLLWLALVSCILTQASAVQRVPRDPSTVEDKCEKACRPEEECLALNSTWGCFCRQDLNSSDVHSLQPQLDCGPREIKVKVDKCLLGGLGLGEEVIAYLRDPNCSSILQTEERNWVSVTSPVQASACRNILERNQTHAIYKNTLSLVNDFIIRDTILNINFQCAYPLDMKVSLQAALQPIVSSLNVSVDGNGEFIVRMALFQDQNYTNPYEGDAVELSVESVLYVGAILEQGDTSRFNLVLRNCYATPTEDKADLVKYFIIRNSCSNQRDSTIHVEENGQSSESRFSVQMFMFAGHYDLVFLHCEIHLCDSLNEQCQPSCSRSQVRSEVPAIDLARVLDLGPITRRGAQSPGVMNGTPSTAGFLVAWPMVLLTVLLAWLF

SEQ ID NO: 13318 - protein, 534 aa, Homo sapiens
MPHLMERMVGSGLLWLALVSCILTQASAVQRGYGNPIEASSYGLDLDCGAPGTPEAHVCFDPCQNYTLLDEPFRSTENSAGSQGCDKNMSGWYRFVGEGGVRMSETCVQVHRCQTDAPMWLNGTHPALGDGITNHTACAHWSGNCCFWKTEVLVKACPGGYHVYRLEGTPWCNLRYCTDPSTVEDKCEKACRPEEECLALNSTWGCFCRQDLNSSDVHSLQPQLDCGPREIKVKVDKCLLGGLGLGEEVIAYLRDPNCSSILQTEERNWVSVTSPVQASACRNILERNQTHAIYKNTLSLVNDFIIRDTILNINFQCAYPLDMKVSLQAALQPIVSSLNVSVDGNGEFIVRMALFQDQNYTNPYEGDAVELSVESVLYVGAILEQGDTSRFNLVLRNCYATPTEDKADLVKYFIIRNSCSNQRDSTIHVEENGQSSESRFSVQMFMFAGHYDLVFLHCEIHLCDSLNEQCQPSCSRSQVRSEVPAIDLARVLDLGPITRRGAQSPGVMNGTPSTAGFLVAWPMVLLTVLLAWLF

SEQ ID NO: 13319 - protein, 387 aa, Homo sapiens
MPHLMERMVGSGLLWLALVSCILTQASAVQRDPSTVEDKCEKACRPEEECLALNSTWGCFCRQDLNSSDVHSLQPQLDCGPREIKVKVDKCLLGGLGLGEEVIAYLRDPNCSSILQTEERNWVSVTSPVQASACRNILERNQTHAIYKNTLSLVNDFIIRDTILNINFQCAYPLDMKVSLQAALQPIVSSLNVSVDGNGEFIVRMALFQDQNYTNPYEGDAVELSVESVLYVGAILEQGDTSRFNLVLRNCYATPTEDKADLVKYFIIRNSCSNQRDSTIHVEENGQSSESRFSVQMFMFAGHYDLVFLHCEIHLCDSLNEQCQPSCSRSQVRSEVPAIDLARVLDLGPITRRGAQSPGVMNGTPSTAGFLVAWPMVLLTVLLAWLF

SEQ ID NO: 13320 - protein, 345 aa, Homo sapiens
MYKDCIESTGDYFLLCDAEGPWGIILESLAILGIVVTILLLLAFLFLMRKIQDCSQWNVLPTQLLFLLSVLGLFGLAFAFIIELNQQTAPVRYFLFGVLFALCFSCLLAHASNLVKLVRGCVSFSWTTILCIAIGCSLLQIIIATEYVTLIMTRGMMFVNMTPCQLNVDFVVLLVYVLFLMALTFFVSKATFCGPCENWKQHGRLIFITVLFSIIIWVVWISMLLRGNPQFQRQPQWDDPVVCIALVTNAWVFLLLYIVPELCILYRSCRQECPLQGNACPVTAYQHSFQVENQELSRARDSDGAEEDVALTSYGTPIQPQTVDPTQECFIPQAKLSPQQDAGGV

SEQ ID NO: 13321 - protein, 300 aa, Homo sapiens
MYKDCIESTGDYFLLCDAEGPWGIILESLAILGIVVTILLLLAFLFLMRKIQDCSQWNVLPTQLLFLLSVLGLFGLAFAFIIELNQQTAPVRYFLFGVLFALCFSCLLAHASNLVKLVRGCVSFSWTTILCIAIGCSLLQIIIATEYVTLIMTRGMMFVNMTPCQLNVDFVVLLVYVLFLMALTFFVSKATFCGPCENWKQHGRLIFITVLFSIIIWVVWISMLLRGNPQFQRQPQWDDPVVCIALVTNAWVFLLLYIVPELCILYRSCRQECPLQGNACPVTAYQHSFQVENQELSRDC

SEQ ID NO: 13322 - protein, 323 aa, Homo sapiens
MYKDCIESTGDYFLLCDAEGPWGIILESLAILGIVVTILLLLAFLFLMRKIQDCSQWNVLPTQLLFLLSVLGLFGLAFAFIIELNQQTAPVRYFLFGVLFALCFSCLLAHASNLVKLVRGCVSFSWTTILCIAIGCSLLQIIIATEYVTLIMTRGMMFVNMTPCQLNVDFVVLLVYVLFLMALTFFVSKATFCGPCENWKQHGRLIFITVLFSIIIWVVWISMLLRGNPQFQRQPQWDDPVVCIALVTNAWVFLLLYIVPELCILYRSCRQECPLQGNACPVTAYQHSFQVENQELSRGTFLGDSGSREVLLQEKQEKNHAVG

SEQ ID NO: 13323 - protein, 525 aa, Homo sapiens
MAVPGEAEEEATVYLVVSGIPSVLRSAHLRSYFSQFREERGGGFLCFHYRHRPERAPPQAAPNSALIPTDPAAEGQLLSQTSATDVRPLSTRDSTPIQTRTCCCVISVRGLAQAQRLIRMYSGRRWLDSHGTWLPGRCLIRRLRLPTEASGLGSFPFKTRKELQSWKAENEAFTLADLKQLPELNPPVLMPRGNVGTPLRVFLELIRACRLPPRIITQLQLQFPKTGSSRRYGNVPFEYEDSETVEQEELVYTAEGEEIPQGTYLADIPASPCGEPEEEVGKEEEEESHSDEDDDRGEEWERHEALHEDVTGQERTTEQLFEEEIELKWEKGGSGLVFYTDAQFWQEEEGDFDEQTADDWDVDMSVYYDRDGGDKDARDSVQMRLEQRLRDGQEDGSVIERQVGTFERHTKGIGRKVMERQGWAEGQGLGCRCSGVPEALDSDGQHPRCKRGLGYHGEKLQPFGQLKRPRRNGLGLISTIYDEPLPQDQTESLLRRQPPTSMKFRTDMAFVRGSSCASDSPSLPD

SEQ ID NO: 13324 - protein, 463 aa, Homo sapiens
MAGAPGPLRLALLLLGMVGRAGPRPQGATVSLWETVQKWREYRRQCQRSLTEDPPPATDLFCNRTFDEYACWPDGEPGSFVNVSCPWYLPWASSVPQGHVYRFCTAEGLWLQKDNSSLPWRDLSECEESKRGERSSPEEQLLFLYIIYTVGYALSFSALVIASAILLGFRHLHCTRNYIHLNLFASFILRALSVFIKDAALKWMYSTAAQQHQWDGLLSYQDSLSCRLVFLLMQYCVAANYYWLLVEGVYLYTLLAFSVLSEQWIFRLYVSIGWGVPLLFVVPWGIVKYLYEDEGCWTRNSNMNYWLIIRLPILFAIGVNFLIFVRVICIVVSKLKANLMCKTDIKCRLAKSTLTLIPLLGTHEVIFAFVMDEHARGTLRFIKLFTELSFTSFQGLMVAILYCFVNNEVQLEFRKSWERWRLEHLHIQRDSSMKPLKCPTSSLSSGATAGSSMYTATCQASCS

SEQ ID NO: 13325 - protein, 560 aa, Homo sapiens
MLRGTLLCAVLGLLRAQPFPCPPACKCVFRDAAQCSGGDVARISALGLPTNLTHILLFGMGRGVLQSQSFSGMTVLQRLMISDSHISAVAPGTFSDLIKLKTLRLSRNKITHLPGALLDKMVLLEQLFLDHNALRGIDQNMFQKLVNLQELALNQNQLDFLPASLFTNLENLKLLDLSGNNLTHLPKGLLGAQAKLERLLLHSNRLVSLDSGLLNSLGALTELQFHRNHIRSIAPGAFDRLPNLSSLTLSRNHLAFLPSALFLHSHNLTLLTLFENPLAELPGVLFGEMGGLQELWLNRTQLRTLPAAAFRNLSRLRYLGVTLSPRLSALPQGAFQGLGELQVLALHSNGLTALPDGLLRGLGKLRQVSLRRNRLRALPRALFRNLSSLESVQLDHNQLETLPGDVFGALPRLTEVLLGHNSWRCDCGLGPFLGWLRQHLGLVGGEEPPRCAGPGAHAGLPLWALPGGDAECPGPRGPPPRPAADSSSEAPVHPALAPNSSEPWVWAQPVTTGKGQDHSPFWGFYFLLLAVQAMITVIIVFAMIKIGQLFRKLIRERALG

SEQ ID NO: 13326 - protein, 331 aa, Homo sapiens
MITLNNQDQPVPFNSSHPDEYKIAALVFYSCIFIIGLFVNITALWVFSCTTKKRTTVTIYMMNVALVDLIFIMTLPFRMFYYAKDEWPFGEYFCQILGALTVFYPSIALWLLAFISADRYMAIVQPKYAKELKNTCKAVLACVGVWIMTLTTTTPLLLLYKDPDKDSTPATCLKISDIIYLKAVNVLNLTRLTFFFLIPLFIMIGCYLVIIHNLLHGRTSKLKPKVKEKSIRIIITLLVQVLVCFMPFHICFAFLMLGTGENSYNPWGAFTTFLMNLSTCLDVILYYIVSKQFQARVISVMLYRNYLRSMRRKSFRSGSLRSLSNINSEML

SEQ ID NO: 13327 - protein, 479 aa, Homo sapiens
MSDVTIVKEGWVQKRGEYIKNWRPRYFLLKTDGSFIGYKEKPQDVDLPYPLNNFSVAKCQLMKTERPKPNTFIIRCLQWTTVIERTFHVDTPEEREEWTEAIQAVADRLQRQEEERMNCSPTSQIDNIGEEEMDASTTHHKRKTMNDFDYLKLLGKGTFGKVILVREKASGKYYAMKILKKEVIIAKDEVAHTLTESRVLKNTRHPFLTSLKYSFQTKDRLCFVMEYVNGGELFFHLSRERVFSEDRTRFYGAEIVSALDYLHSGKIVYRDLKLENLMLDKDGHIKITDFGLCKEGITDAATMKTFCGTPEYLAPEVLEDNDYGRAVDWWGLGVVMYEMMCGRLPFYNQDHEKLFELILMEDIKFPRTLSSDAKSLLSGLLIKDPNKRLGGGPDDAKEIMRHSFFSGVNWQDVYDKKLVPPFKPQVTSETDTRYFDEEFTAQTITITPPEKYDEDGMDCMDNERRPHFPQFSYSASGRE

SEQ ID NO: 13328 - protein, 465 aa, Homo sapiens
MSDVTIVKEGWVQKRGEYIKNWRPRYFLLKTDGSFIGYKEKPQDVDLPYPLNNFSVAKCQLMKTERPKPNTFIIRCLQWTTVIERTFHVDTPEEREEWTEAIQAVADRLQRQEEERMNCSPTSQIDNIGEEEMDASTTHHKRKTMNDFDYLKLLGKGTFGKVILVREKASGKYYAMKILKKEVIIAKDEVAHTLTESRVLKNTRHPFLTSLKYSFQTKDRLCFVMEYVNGGELFFHLSRERVFSEDRTRFYGAEIVSALDYLHSGKIVYRDLKLENLMLDKDGHIKITDFGLCKEGITDAATMKTFCGTPEYLAPEVLEDNDYGRAVDWWGLGVVMYEMMCGRLPFYNQDHEKLFELILMEDIKFPRTLSSDAKSLLSGLLIKDPNKRLGGGPDDAKEIMRHSFFSGVNWQDVYDKKLVPPFKPQVTSETDTRYFDEEFTAQTITITPPEKCQQSDCGMLGNWKK

SEQ ID NO: 13329 - protein, 1667 aa, Homo sapiens
MASKQTKKKEVHRINSAHGSDKSKDFYPFGSNVQSGSTEQKKGKFPLWPEWSEADINSEKWDAGKGAKEKDKTGKSPVFHFFEDPEGKIELPPSLKIYSWKRPQDILFSQTPVVVKNEITFDLFSANEHLLCSELMRWIISEIYAVWKIFNGGILSNYFKGTSGEPPLLPWKPWEHIYSLCKAVKGHMPLFNSYGKYVVKLYWMGCWRKITIDDFLPFDEDNNLLLPATTYEFELWPMLLSKAIIKLANIDIHVADRRELGEFTVIHALTGWLPEVISLHPGYMDKVWELLKEILPEFKLSDEASSESKIAVLDSKLKEPGKEGKEGKEIKDGKEVKDVKEFKPESSLTTLKAPEKSDKVPKEKADARDIGKKRSKDGEKEKFKFSLHGSRPSSEVQYSVQSLSDCSSAIQTSHMVVYATFTPLYLFENKIFSLEKMADSAEKLREYGLSHICSHPVLVTRSRSCPLVAPPKPPPLPPWKLIRQKKETVITDEAQELIVKKPERFLEISSPFLNYRMTPFTIPTEMHFVRSLIKKGIPPGSDLPSVSETDETATHSQTDLSQITKATSQGNTASQVILGKGTDEQTDFGLGDAHQSDGLNLEREIVSQTTATQEKSQEELPTTNNSVSKEIWLDFEDFCVCFQNIYIFHKPSSYCLNFQKSEFKFSEERVSYYLFVDSLKPIELLVCFSALVRWGEYGALTKDSPPIEPGLLTAETFSWKSLKPGSLVLKIHTYATKATVVRLPVGRHMLLFNAYSPVGHSIHICSMVSFVIGDEHVVLPNFEPESCRFTEQSLLIMKAIGNVIANFKDKGKLSAALKDLQTAHYPVPFHDKELTAQHFRVFHLSLWRLMKKVQITKPPPNFKFAFRAMVLDLELLNSSLEEVSLVEWLDVKYCMPTSDKEYSAEEVAAAIKIQAMWRGTYVRLLMKARIPDTKENISVADTLQKVWAVLEMNLEQYAVSLLRLMFKSKCKSLESYPCYQDEETKIAFADYTVTYQEQPPNSWFIVFRETFLVHQDMILVPKVYTTLPICILHIVNNDTMEQVPKVFQKVVPYLYTKNKKGYTFVAEAFTGDTYVAASRWKLRLIGSSAPLPCLSRDSPCNSFAIKEIRDYYIPNDKKILFRYSVKVLTPQPATIQVRTSKPDAFIKLQVLENEETMVSSTGKGQAIIPAFHFLKSEKGLSSQSSKHILSFHSASKKEQEVYVKKKAAQGIQKSPKGRAVSAIQDIGLPLVEEETTSTPTREDSSSTPLQNYKYIIQCSVLYNSWPLTESQLTFVQALKDLKKSNTKAYGERHEELINLGSPDSHTISEGQKSSVTSKTTRKGKEKSSEKEKTAKEKQAPRFEPQISTVHPQQEDPNKPYWILRLVTEHNESELFEVKKDTERADEIRAMKQAWETTEPGRAIKASQARLHYLSGFIKKTSDAESPPISESQTKPKEEVETAARGVKEPNSKNSAGSESKEMTQTGSGSAVWKKWQLTKGLRDVAKSTSSESGGVSSPGKEEREQSTRKENIQTGPRTRSPTILETSPRLIRKALEFMDLSQYVRKTDTDPLLQTDELNQQQAMQKAEEIHQFRQHRTRVLSIRNIDQEERLKLKDEVLDMYKEMQDSLDEARQKIFDIREEYRNKLLEAEHLKLETLAAQEAAMKLETEKMTPAPDTQKKKKGKKK

SEQ ID NO: 13330 - protein, 612 aa, Homo sapiens
MNLEQYAVSLLRLMFKSKCKSLESYPCYQDEETKIAFADYTVTYQEQPPNSWFIVFRETFLVHQDMILVPKVYTTLPICILHIVNNDTMEQVPKVFQKVVPYLYTKNKKGYTFVAEAFTGDTYVAASRWKLRLIGSSAPLPCLSRDSPCNSFAIKEIRDYYIPNDKKILFRYSVKVLTPQPATIQVRTSKPDAFIKLQVLENEETMVSSTGKGQAIIPAFHFLKSEKGLSSQSYGERHEELINLGSPDSHTISEGQKSSVTSKTTRKGKEKSSEKEKTAKEKQAPRFEPQISTVHPQQEDPNKPYWILRLVTEHNESELFEVKKDTERADEIRAMKQAWETTEPGRAIKASQARLHYLSGFIKKTSDAESPPISESQTKPKEEVETAARGVKEPNSKNSAGSESKEMTQTGSGSAVWKKWQLTKGLRDVAKSTSSESGGVSSPGKEEREQSTRKENIQTGPRTRSPTILETSPRLIRKALEFMDLSQYVRKTDTDPLLQTDELNQQQAMQKAEEIHQFRQHRTRVLSIRNIDQEERLKLKDEVLDMYKEMQDSLDEARQKIFDIREEYRNKLLEAEHLKLETLAAQEAAMKLETEKMTPAPDTQKKKKGKKK

SEQ ID NO: 13331 - protein, 238 aa, Homo sapiens
MALVPCQVLRMAILLSYCSILCNYKAIEMPSHQTYGGSWKFLTFIDLVIQAVFFGICVLTDLSSLLTRGSGNQEQERQLKKLISLRDWMLAVLAFPVGVFVVAVFWIIYAYDREMIYPKLLDNFIPGWLNHGMHTTVLPFILIEMRTSHHQYPSRSSGLTAICTFSVGYILWVCWVHHVTGMWVYPFLEHIGPGARIIFFGSTTILMNFLYLLGEVLNNYIWDTQKSMEEEKEKPKLE

SEQ ID NO: 13332 - protein, 245 aa, Homo sapiens
MALVPCQVLRMAILLSYCSILCNYKAIEMPSHQTYGGSWKFLTFIDLVIQAVFFGICVLTDLSSLLTRGSGNQEQERQLKKLISLRDWMLAVLAFPVGVFVVAVFWIIYAYDREMIYPKLLDNFIPGWLNHGMHTTVLPFILIEMRTSHHQYPSRSSGLTAICTFSVGYILWVCWVHHVTGMWVYPFLEHIGPGARIIFFGSTTILMNFLYLLGEVLNNYIWDTQKKPPSWQDMKIKFMYLGPSS

SEQ ID NO: 13333 - protein, 186 aa, Homo sapiens
MALVPCQVLRMAILLSYCSILCNYKAIEMPSHQTYGGSWKFLTFIDLFVVAVFWIIYAYDREMIYPKLLDNFIPGWLNHGMHTTVLPFILIEMRTSHHQYPSRSSGLTAICTFSVGYILWVCWVHHVTGMWVYPFLEHIGPGARIIFFGSTTILMNFLYLLGEVLNNYIWDTQKSMEEEKEKPKLE

SEQ ID NO: 13334 - protein, 228 aa, Homo sapiens
MAILLSYCSILCNYKAIEMPSHQTYGGSWKFLTFIDLVIQAVFFGICVLTDLSSLLTRGSGNQEQERQLKKLISLRDWMLAVLAFPVGVFVVAVFWIIYAYDREMIYPKLLDNFIPGWLNHGMHTTVLPFILIEMRTSHHQYPSRSSGLTAICTFSVGYILWVCWVHHVTGMWVYPFLEHIGPGARIIFFGSTTILMNFLYLLGEVLNNYIWDTQKSMEEEKEKPKLE

SEQ ID NO: 13335 - protein, 137 aa, Homo sapiens
MALVPCQVLRMAILLSYCSILCNYKAIEMPSHQTYGGSWKFLTFIDLVIQAVFFGICVLTDLSSLLTRGSGNQEQERQLKKLISLRDWMLAVLAFPVGVFVVAVFWIIYAYDREMIYPKLLDNFIPGWLNHGMHFKA

SEQ ID NO: 13336 - protein, 134 aa, Homo sapiens
MALVPCQVLRMAILLSYCSILCNYKAIEMPSHQTYGGSWKFLTFIDLVIQAVFFGICVLTDLSSLLTRGSGNQEQERQLKKLISLRDWMLAVLAFPVGVFVVAVFWIIYAYDREMIYPKLLDNFIPGWLNHGML

SEQ ID NO: 13337 - protein, 6306 aa, Homo sapiens
MSVFLGPGMPSASLLVNLLSALLILFVFGETEIRFTGQTEFVVNETSTTVIRLIIERIGEPANVTAIVSLYGEDAGDFFDTYAAAFIPAGETNRTVYIAVCDDDLPEPDETFIFHLTLQKPSANVKLGWPRTVTVTILSNDNAFGIISFNMLPSIAVSEPKGRNESMPLTLIREKGTYGMVMVTFEVEGGPNPPDEDLSPVKGNITFPPGRATVIYNLTVLDDEVPENDEIFLIQLKSVEGGAEINTSRNSIEIIIKKNDSPVRFLQSIYLVPEEDHILIIPVVRGKDNNGNLIGSDEYEVSISYAVTTGNSTAHAQQNLDFIDLQPNTTVVFPPFIHESHLKFQIVDDTIPEIAESFHIMLLKDTLQGDAVLISPSVVQVTIKPNDKPYGVLSFNSVLFERTVIIDEDRISRYEEITVVRNGGTHGNVSANWVLTRNSTDPSPVTADIRPSSGVLHFAQGQMLATIPLTVVDDDLPEEAEAYLLQILPHTIRGGAEVSEPAELLFYIQDSDDVYGLITFFPMENQKIESSPGERYLSLSFTRLGGTKGDVRLLYSVLYIPAGAVDPLQAKEGILNISRRNDLIFPEQKTQVTTKLPIRNDAFLQNGAHFLVQLETVELLNIIPLIPPISPRFGEICNISLLVTPAIANGEIGFLSNLPIILHEPEDFAAEVVYIPLHRDGTDGQATVYWSLKPSGFNSKAVTPDDIGPFNGSVLFLSGQSDTTINITIKGDDIPEMNETVTLSLDRVNVENQVLKSGYTSRDLIILENDDPGGVFEFSPASRGPYVIKEGESVELHIIRSRGSLVKQFLHYRVEPRDSNEFYGNTGVLEFKPGEREIVITLLARLDGIPELDEHYWVVLSSHGERESKLGSATIVNITILKNDDPHGIIEFVSDGLIVMINESKGDAIYSAVYDVVRNRGNFGDVSVSWVVSPDFTQDVFPVQGTVVFGDQEFSKNITIYSLPDEIPEEMEEFTVILLNGTGGAKVGNRTTATLRIRRNDDPIYFAEPRVVRVQEGETANFTVLRNGSVDVTCMVQYATKDGKATARERDFIPVEKGETLIFEVGSRQQSISIFVNEDGIPETDEPFYIILLNSTGDTVVYQYGVATVIIEANDDPNGIFSLEPIDKAVEEGKTNAFWILRHRGYFGSVSVSWQLFQNDSALQPGQEFYETSGTVNFMDGEEAKPIILHAFPDKIPEFNEFYFLKLVNISGGSPGPGGQLAETNLQVTVMVPFNDDPFGVFILDPECLEREVAEDVLSEDDMSYITNFTILRQQGVFGDVQLGWEILSSEFPAGLPPMIDFLLVGIFPTTVHLQQHMRRHHSGTDALYFTGLEGAFGTVNPKYHPSRNNTIANFTFSAWVMPNANTNGFIIAKDDGNGSIYYGVKIQTNESHVTLSLHYKTLGSNATYIAKTTVMKYLEESVWLHLLIILEDGIIEFYLDGNAMPRGIKSLKGEAITDGPGILRIGAGINGNDRFTGLMQDVRSYERKLTLEEIYELHAMPAKSDLHPISGYLEFRQGETNKSFIISARDDNDEEGEELFILKLVSVYGGARISEENTTARLTIQKSDNANGLFGFTGACIPEIAEEGSTISCVVERTRGALDYVHVFYTISQIETDGINYLVDDFANASGTITFLPWQRSEVLNIYVLDDDIPELNEYFRVTLVSAIPGDGKLGSTPTSGASIDPEKETTDITIKASDHPYGLLQFSTGLPPQPKDAMTLPASSVPHITVEEEDGEIRLLVIRAQGLLGRVTAEFRTVSLTAFSPEDYQNVAGTLEFQPGERYKYIFINITDNSIPELEKSFKVELLNLEGGVAELFRVDGSGSGDGDMEFFLPTIHKRASLGVASQILVTIAASDHAHGVFEFSPESLFVSGTEPEDGYSTVTLNVIRHHGTLSPVTLHWNIDSDPDGDLAFTSGNITFEIGQTSANITVEILPDEDPELDKAFSVSVLSVSSGSLGAHINATLTVLASDDPYGIFIFSEKNRPVKVEEATQNITLSIIRLKGLMGKVLVSYATLDDMEKPPYFPPNLARATQGRDYIPASGFALFGANQSEATIAISILDDDEPERSESVFIELLNSTLVAKVQSRSIPNSPRLGPKVETIAQLIIIANDDAFGTLQLSAPIVRVAENHVGPIINVTRTGGAFADVSVKFKAVPITAIAGEDYSIASSDVVLLEGETSKAVPIYVINDIYPELEESFLVQLMNETTGGARLGALTEAVIIIEASDDPYGLFGFQITKLIVEEPEFNSVKVNLPIIRNSGTLGNVTVQWVATINGQLATGDLRVVSGNVTFAPGETIQTLLLEVLADDVPEIEEVIQVQLTDASGGGTIGLDRIANIIIPANDDPYGTVAFAQMVYRVQEPLERSSCANITVRRSGGHFGRLLLFYSTSDIDVVALAMEEGQDLLSYYESPIQGVPDPLWRTWMNVSAVGEPLYTCATLCLKEQACSAFSFFSASEGPQCFWMTSWISPAVNNSDFWTYRKNMTRVASLFSGQAVAGSDYEPVTRQWAIMQEGDEFANLTVSILPDDFPEMDESFLISLLEVHLMNISASLKNQPTIGQPNISTVVIALNGDAFGVFVIYNISPNTSEDGLFVEVQEQPQTLVELMIHRTGGSLGQVAVEWRVVGGTATEGLDFIGAGEILTFAEGETKKTVILTILDDSEPEDDESIIVSLVYTEGGSRILPSSDTVRVNILANDNVAGIVSFQTASRSVIGHEGEILQFHVIRTFPGRGNVTVNWKIIGQNLELNFANFSGQLFFPEGSLNTTLFVHLLDDNIPEEKEVYQVILYDVRTQGVPPAGIALLDAQGYAAVLTVEASDEPHGVLNFALSSRFVLLQEANITIQLFINREFGSLGAINVTYTTVPGMLSLKNQTVGNLAEPEVDFVPIIGFLILEEGETAAAINITILEDDVPELEEYFLVNLTYVGLTMAASTSFPPRLDSEGLTAQVIIDANDGARGVIEWQQSRFEVNETHGSLTLVAQRSREPLGHVSLFVYAQNLEAQVGLDYIFTPMILHFADGERYKNVNIMILDDDIPEGDEKFQLILTNPSPGLELGKNTIALIIVLANDDGPGVLSFNNSEHFFLREPTALYVQESVAVLYIVREPAQGLFGTVTVQFIVTEVNSSNESKDLTPSKGYIVLEEGVRFKALQISAILDTEPEMDEYFVCTLFNPTGGARLGVHVQTLITVLQNQAPLGLFSISAVENRATSIDIEEANRTVYLNVSRTNGIDLAVSVQWETVSETAFGMRGMDVVFSVFQSFLDESASGWCFFTLENLIYGIMLRKSSVTVYRWQGIFIPVEDLNIENPKTCEAFNIGFSPYFVITHEERNEEKPSLNSVFTFTSGFKLFLVQTIIILESSQVRYFTSDSQDYLIIASQRDDSELTQVFRWNGGSFVLHQKLPVRGVLTVALFNKGGSVFLAISQANARLNSLLFRWSGSGFINFQEVPVSGTTEVEALSSANDIYLIFAENVFLGDQNSIDIFIWEMGQSSFRYFQSVDFAAVNRIHSFTPASGIAHILLIGQDMSALYCWNSERNQFSFVLEVPSAYDVASVTVKSLNSSKNLIALVGAHSHIYELAYISSHSDFIPSSGELIFEPGEREATIAVNILDDTVPEKEESFKVQLKNPKGGAEIGINDSVTITILSNDDAYGIVAFAQNSLYKQVEEMEQDSLVTLNVERLKGTYGRITIAWEADGSISDIFPTSGVILFTEGQVLSTITLTILADNIPELSEVVIVTLTRITTEGVEDSYKGATIDQDRSKSVITTLPNDSPFGLVGWRAASVFIRVAEPKENTTTLQLQIARDKGLLGDIAIHLRAQPNFLLHVDNQATENEDYVLQETIIIMKENIKEAHAEVSILPDDLPELEEGFIVTITEVNLVNSDFSTGQPSVRRPGMEIAEIMIEENDDPRGIFMFHVTRGAGEVITAYEVPPPLNVLQVPVVRLAGSFGAVNVYWKASPDSAGLEDFKPSHGILEFADKQVTAMIEITIIDDAEFELTETFNISLISVAGGGRLGDDVVVTVVIPQNDSPFGVFGFEEKTVMIDESLSSDDPDSYVTLTVVRSPGGKGTVRLEWTIDEKAKHNLSPLNGTLHFDETESQKTIVLHTLQDTVLEEDRRFTIQLISIDEVEISPVKGSASIIIRGDKRASGEVGIAPSSRHILIGEPSAKYNGTAIISLVRGPGILGEVTVFWRIFPPSVGEFAETSGKLTMRDEQSAVIVVIQALNDDIPEEKSFYEFQLTAVSEGGVLSESSSTANITVVASDSPYGRFAFSHEQLRVSEAQRVNITIIRSSGDFGHVRLWYKTMSGTAEAGLDFVPAAGELLFEAGEMRKSLHVEILDDDYPEGPEEFSLTITKVELQGRGYDFTIQENGLQIDQPPEIGNISIVRIIIMKNDNAEGIIEFDPKYTAFEVEEDVGLIMIPVVRLHGTYGYVTADFISQSSSASPGGVDYILHGSTVTFQHGQNLSFINISIIDDNESEFEEPIEILLTGATGGAVLGRHLVSRIIIAKSDSPFGVIRFLNQSKISIANPNSTMILSLVLERTGGLLGEIQVNWETVGPNSQEALLPQNRDIADPVSGLFYFGEGEGGVRTIILTIYPHEEIEVEETFIIKLHLVKGEAKLDSRAKDVTLTIQEFGDPNGVVQFAPETLSKKTYSEPLALEGPLLITFFVRRVKGTFGEIMVYWELSSEFDITEDFLSTSGFFTIADGESEASFDVHLLPDEVPEIEEDYVIQLVSVEGGAELDLEKSITWFSVYANDDPHGVFALYSDRQSILIGQNLIRSIQINITRLAGTFGDVAVGLRISSDHKEQPIVTENAERQLVVKDGATYKVDVVPIKNQVFLSLGSNFTLQLVTVMLVGGRFYGMPTILQEAKSAVLPVSEKAANSQVGFESTAFQLMNITAGTSHVMISRRGTYGALSVAWTTGYAPGLEIPEFIVVGNMTPTLGSLSFSHGEQRKGVFLWTFPSPGWPEAFVLHLSGVQSSAPGGAQLRSGFIVAEIEPMGVFQFSTSSRNIIVSEDTQMIRLHVQRLFGFHSDLIKVSYQTTAGSAKPLEDFEPVQNGELFFQKFQTEVDFEITIINDQLSEIEEFFYINLTSVEIRGLQKFDVNWSPRLNLDFSVAVITILDNDDLAGMDISFPETTVAVAVDTTLIPVETESTTYLSTSKTTTILQPTNVVAIVTEATGVSAIPEKLVTLHGTPAVSEKPDVATVTANVSIHGTFSLGPSIVYIEEEMKNGTFNTAEVLIRRTGGFTGNVSITVKTFGERCAQMEPNALPFRGIYGISNLTWAVEEEDFEEQTLTLIFLDGERERKVSVQILDDDEPEGQEFFYVFLTNPQGGAQIVEEKDDTGFAAFAMVIITGSDLHNGIIGFSEESQSGLELREGAVMRRLHLIVTRQPNRAFEDVKVFWRVTLNKTVVVLQKDGVNLVEELQSVSGTTTCTMGQTKCFISIELKPEKVPQVEVYFFVELYEATAGAAINNSARFAQIKILESDESQSLVYFSVGSRLAVAHKKATLISLQVARDSGTGLMMSVNFSTQELRSAETIGRTIISPAISGKDFVITEGTLVFEPGQRSTVLDVILTPETGSLNSFPKRFQIVLFDPKGGARIDKVYGTANITLVSDADSQAIWGLADQLHQPVNDDILNRVLHTISMKVATENTDEQLSAMMHLIEKITTEGKIQAFSVASRTLFYEILCSLINPKRKDTRGFSHFAEVTENFAFSLLTNVTCGSPGEKSKTILDSCPYLSILALHWYPQQINGHKFEGKEGDYIRIPERLLDVQDAEIMAGKSTCKLVQFTEYSSQQWFISGNNLPTLKNKVLSLSVKGQSSQLLTNDNEVLYRIYAAEPRIIPQTSLCLLWNQAAASWLSDSQFCKVVEETADYVECACSHMSVYAVYARTDNLSSYNEAFFTSGFICISGLCLAVLSHIFCARYSMFAAKLLTHMMAASLGTQILFLASAYASPQLAEESCSAMAAVTHYLYLCQFSWMLIQSVNFWYVLVMNDEHTERRYLLFFLLSWGLPAFVVILLIVILKGIYHQSMSQIYGLIHGDLCFIPNVYAALFTAALVPLTCLVVVFVVFIHAYQVKPQWKAYDDVFRGRTNAAEIPLILYLFALISVTWLWGGLHMAYRHFWMLVLFVIFNSLQGLYVFMVYFILHNQMCCPMKASYTVEMNGHPGPSTAFFTPGSGMPPAGGEISKSTQNLIGAMEEVPPDWERASFQQGSQASPDLKPSPQNGATFPSSGGYGQGSLIADEESQEFDDLIFALKTGAGLSVSDNESGQGSQEGGTLTDSQIVELRRIPIADTHL

SEQ ID NO: 13338 - protein, 1967 aa, Homo sapiens
MQLCIFCCCCILFYFDLYDFGRGYDFTIQENGLQIDQPPEIGNISIVRIIIMKNDNAEGIIEFDPKYTAFEVEEDVGLIMIPVVRLHGTYGYVTADFISQSSSASPGGVDYILHGSTVTFQHGQNLSFINISIIDDNESEFEEPIEILLTGATGGAVLGRHLVSRIIIAKSDSPFGVIRFLNQSKISIANPNSTMILSLVLERTGGLLGEIQVNWETVGPNSQEALLPQNRDIADPVSGLFYFGEGEGGVRTIILTIYPHEEIEVEETFIIKLHLVKGEAKLDSRAKDVTLTIQEFGDPNGVVQFAPETLSKKTYSEPLALEGPLLITFFVRRVKGTFGEIMVYWELSSEFDITEDFLSTSGFFTIADGESEASFDVHLLPDEVPEIEEDYVIQLVSVEGGAELDLEKSITWFSVYANDDPHGVFALYSDRQSILIGQNLIRSIQINITRLAGTFGDVAVGLRISSDHKEQPIVTENAERQLVVKDGATYKVDVVPIKNQVFLSLGSNFTLQLVTVMLVGGRFYGMPTILQEAKSAVLPVSEKAANSQVGFESTAFQLMNITAGTSHVMISRRGTYGALSVAWTTGYAPGLEIPEFIVVGNMTPTLGSLSFSHGEQRKGVFLWTFPSPGWPEAFVLHLSGVQSSAPGGAQLRSGFIVAEIEPMGVFQFSTSSRNIIVSEDTQMIRLHVQRLFGFHSDLIKVSYQTTAGSAKPLEDFEPVQNGELFFQKFQTEVDFEITIINDQLSEIEEFFYINLTSVEIRGLQKFDVNWSPRLNLDFSVAVITILDNDDLAGMDISFPETTVAVAVDTTLIPVETESTTYLSTSKTTTILQPTNVVAIVTEATGVSAIPEKLVTLHGTPAVSEKPDVATVTANVSIHGTFSLGPSIVYIEEEMKNGTFNTAEVLIRRTGGFTGNVSITVKTFGERCAQMEPNALPFRGIYGISNLTWAVEEEDFEEQTLTLIFLDGERERKVSVQILDDDEPEGQEFFYVFLTNPQGGAQIVEEKDDTGFAAFAMVIITGSDLHNGIIGFSEESQSGLELREGAVMRRLHLIVTRQPNRAFEDVKVFWRVTLNKTVVVLQKDGVNLVEELQSVSGTTTCTMGQTKCFISIELKPEKVPQVEVYFFVELYEATAGAAINNSARFAQIKILESDESQSLVYFSVGSRLAVAHKKATLISLQVARDSGTGLMMSVNFSTQELRSAETIGRTIISPAISGKDFVITEGTLVFEPGQRSTVLDVILTPETGSLNSFPKRFQIVLFDPKGGARIDKVYGTANITLVSDADSQAIWGLADQLHQPVNDDILNRVLHTISMKVATENTDEQLSAMMHLIEKITTEGKIQAFSVASRTLFYEILCSLINPKRKDTRGFSHFAEVTENFAFSLLTNVTCGSPGEKSKTILDSCPYLSILALHWYPQQINGHKFEGKEGDYIRIPERLLDVQDAEIMAGKSTCKLVQFTEYSSQQWFISGNNLPTLKNKVLSLSVKGQSSQLLTNDNEVLYRIYAAEPRIIPQTSLCLLWNQAAASWLSDSQFCKVVEETADYVECACSHMSVYAVYARTDNLSSYNEAFFTSGFICISGLCLAVLSHIFCARYSMFAAKLLTHMMAASLGTQILFLASAYASPQLAEESCSAMAAVTHYLYLCQFSWMLIQSVNFWYVLVMNDEHTERRYLLFFLLSWGLPAFVVILLIVILKGIYHQSMSQIYGLIHGDLCFIPNVYAALFTAALVPLTCLVVVFVVFIHAYQVKPQWKAYDDVFRGRTNAAEIPLILYLFALISVTWLWGGLHMAYRHFWMLVLFVIFNSLQGLYVFMVYFILHNQMCCPMKASYTVEMNGHPGPSTAFFTPGSGMPPAGGEISKSTQNLIGAMEEVPPDWERASFQQGSQASPDLKPSPQNGATFPSSGGYGQGSLIADEESQEFDDLIFALKTGAGLSVSDNESGQGSQEGGTLTDSQIVELRRIPIADTHL

SEQ ID NO: 13339 - protein, 2306 aa, Homo sapiens
MSVFLGPGMPSASLLVNLLSALLILFVFGETEIRFTGQTEFVVNETSTTVIRLIIERIGEPANVTAIVSLYGEDAGDFFDTYAAAFIPAGETNRTVYIAVCDDDLPEPDETFIFHLTLQKPSANVKLGWPRTVTVTILSNDNAFGIISFNMLPSIAVSEPKGRNESMPLTLIREKGTYGMVMVTFEVEGGPNPPDEDLSPVKGNITFPPGRATVIYNLTVLDDEVPENDEIFLIQLKSVEGGAEINTSRNSIEIIIKKNDSPVRFLQSIYLVPEEDHILIIPVVRGKDNNGNLIGSDEYEVSISYAVTTGNSTAHAQQNLDFIDLQPNTTVVFPPFIHESHLKFQIVDDTIPEIAESFHIMLLKDTLQGDAVLISPSVVQVTIKPNDKPYGVLSFNSVLFERTVIIDEDRISRYEEITVVRNGGTHGNVSANWVLTRNSTDPSPVTADIRPSSGVLHFAQGQMLATIPLTVVDDDLPEEAEAYLLQILPHTIRGGAEVSEPAELLFYIQDSDDVYGLITFFPMENQKIESSPGERYLSLSFTRLGGTKGDVRLLYSVLYIPAGAVDPLQAKEGILNISRRNDLIFPEQKTQVTTKLPIRNDAFLQNGAHFLVQLETVELLNIIPLIPPISPRFGEICNISLLVTPAIANGEIGFLSNLPIILHEPEDFAAEVVYIPLHRDGTDGQATVYWSLKPSGFNSKAVTPDDIGPFNGSVLFLSGQSDTTINITIKGDDIPEMNETVTLSLDRVNVENQVLKSGYTSRDLIILENDDPGGVFEFSPASRGPYVIKEGESVELHIIRSRGSLVKQFLHYRVEPRDSNEFYGNTGVLEFKPGEREIVITLLARLDGIPELDEHYWVVLSSHGERESKLGSATIVNITILKNDDPHGIIEFVSDGLIVMINESKGDAIYSAVYDVVRNRGNFGDVSVSWVVSPDFTQDVFPVQGTVVFGDQEFSKNITIYSLPDEIPEEMEEFTVILLNGTGGAKVGNRTTATLRIRRNDDPIYFAEPRVVRVQEGETANFTVLRNGSVDVTCMVQYATKDGKATARERDFIPVEKGETLIFEVGSRQQSISIFVNEDGIPETDEPFYIILLNSTGDTVVYQYGVATVIIEANDDPNGIFSLEPIDKAVEEGKTNAFWILRHRGYFGSVSVSWQLFQNDSALQPGQEFYETSGTVNFMDGEEAKPIILHAFPDKIPEFNEFYFLKLVNISGGSPGPGGQLAETNLQVTVMVPFNDDPFGVFILDPECLEREVAEDVLSEDDMSYITNFTILRQQGVFGDVQLGWEILSSEFPAGLPPMIDFLLVGIFPTTVHLQQHMRRHHSGTDALYFTGLEGAFGTVNPKYHPSRNNTIANFTFSAWVMPNANTNGFIIAKDDGNGSIYYGVKIQTNESHVTLSLHYKTLGSNATYIAKTTVMKYLEESVWLHLLIILEDGIIEFYLDGNAMPRGIKSLKGEAITDGPGILRIGAGINGNDRFTGLMQDVRSYERKLTLEEIYELHAMPAKSDLHPISGYLEFRQGETNKSFIISARDDNDEEGEELFILKLVSVYGGARISEENTTARLTIQKSDNANGLFGFTGACIPEIAEEGSTISCVVERTRGALDYVHVFYTISQIETDGINYLVDDFANASGTITFLPWQRSEVLNIYVLDDDIPELNEYFRVTLVSAIPGDGKLGSTPTSGASIDPEKETTDITIKASDHPYGLLQFSTGLPPQPKDAMTLPASSVPHITVEEEDGEIRLLVIRAQGLLGRVTAEFRTVSLTAFSPEDYQNVAGTLEFQPGERYKYIFINITDNSIPELEKSFKVELLNLEGGVAELFRVDGSGSGDGDMEFFLPTIHKRASLGVASQILVTIAASDHAHGVFEFSPESLFVSGTEPEDGYSTVTLNVIRHHGTLSPVTLHWNIDSDPDGDLAFTSGNITFEIGQTSANITVEILPDEDPELDKAFSVSVLSVSSGSLGAHINATLTVLASDDPYGIFIFSEKNRPVKVEEATQNITLSIIRLKGLMGKVLVSYATLDDMEKPPYFPPNLARATQGRDYIPASGFALFGANQSEATIAISILDDDEPERSESVFIELLNSTLVAKVQSRSIPNSPRLGPKVETIAQLIIIANDDAFGTLQLSAPIVRVAENHVGPIINVTRTGGAFADVSVKFKAVPITAIAGEDYSIASSDVVLLEGETSKAVPIYVINDIYPELEESFLVQLMNETTGGARLGALTEAVIIIEASDDPYGLFGFQITKLIVEEPEFNSVKVNLPIIRNSGTLGNVTVQWVATINGQLATGDLRVVSGNVTFARVVSGYPSATN

SEQ ID NO: 13340 - protein, 1466 aa, Homo sapiens
MSVFLGPGMPSASLLVNLLSALLILFVFGETEIRFTGQTEFVVNETSTTVIRLIIERIGEPANVTAIVSLYGEDAGDFFDTYAAAFIPAGETNRTVYIAVCDDDLPEPDETFIFHLTLQKPSANVKLGWPRTVTVTILSNDNAFGIISFNMLPSIAVSEPKGRNESMPLTLIREKGTYGMVMVTFEVEGGPNPPDEDLSPVKGNITFPPGRATVIYNLTVLDDEVPENDEIFLIQLKSVEGGAEINTSRNSIEIIIKKNDSPVRFLQSIYLVPEEDHILIIPVVRGKDNNGNLIGSDEYEVSISYAVTTGNSTAHAQQNLDFIDLQPNTTVVFPPFIHESHLKFQIVDDTIPEIAESFHIMLLKDTLQGDAVLISPSVVQVTIKPNDKPYGVLSFNSVLFERTVIIDEDRISRYEEITVVRNGGTHGNVSANWVLTRNSTDPSPVTADIRPSSGVLHFAQGQMLATIPLTVVDDDLPEEAEAYLLQILPHTIRGGAEVSEPAELLFYIQDSDDVYGLITFFPMENQKIESSPGERYLSLSFTRLGGTKGDVRLLYSVLYIPAGAVDPLQAKEGILNISRRNDLIFPEQKTQVTTKLPIRNDAFLQNGAHFLVQLETVELLNIIPLIPPISPRFGEICNISLLVTPAIANGEIGFLSNLPIILHEPEDFAAEVVYIPLHRDGTDGQATVYWSLKPSGFNSKAVTPDDIGPFNGSVLFLSGQSDTTINITIKGDDIPEMNETVTLSLDRVNVENQVLKSGYTSRDLIILENDDPGGVFEFSPASRGPYVIKEGESVELHIIRSRGSLVKQFLHYRVEPRDSNEFYGNTGVLEFKPGEREIVITLLARLDGIPELDEHYWVVLSSHGERESKLGSATIVNITILKNDDPHGIIEFVSDGLIVMINESKGDAIYSAVYDVVRNRGNFGDVSVSWVVSPDFTQDVFPVQGTVVFGDQEFSKNITIYSLPDEIPEEMEEFTVILLNGTGGAKVGNRTTATLRIRRNDDPIYFAEPRVVRVQEGETANFTVLRNGSVDVTCMVQYATKDGKATARERDFIPVEKGETLIFEVGSRQQSISIFVNEDGIPETDEPFYIILLNSTGDTVVYQYGVATVIIEANDDPNGIFSLEPIDKAVEEGKTNAFWILRHRGYFGSVSVSWQLFQNDSALQPGQEFYETSGTVNFMDGEEAKPIILHAFPDKIPEFNEFYFLKLVNISGGSPGPGGQLAETNLQVTVMVPFNDDPFGVFILDPECLEREVAEDVLSEDDMSYITNFTILRQQGVFGDVQLGWEILSSEFPAGLPPMIDFLLVGIFPTTVHLQQHMRRHHSGTDALYFTGLEGAFGTVNPKYHPSRNNTIANFTFSAWVMPNANTNGFIIAKDDGNGSIYYGVKIQTNESHVTLSLHYKTLGSNATYIAKTTVMKYLEESVWLHLLIILEDGIIEFYLDGNAMPRGIKSLKGEAITDGEGHHHN

SEQ ID NO: 13341 - protein, 726 aa, Homo sapiens
MAVGEPLVHIRVTLLLLWFGMFLSISGHSQARPSQYFTSPEVVIPLKVISRGRGAKAPGWLSYSLRFGGQRYIVHMRVNKLLFAAHLPVFTYTEQHALLQDQPFIQDDCYYHGYVEGVPESLVALSTCSGGFLGMLQINDLVYEIKPISVSATFEHLVYKIDSDDTQFPPMRCGLTEEKIAHQMELQLSYNFTLKQSSFVGWWTHQRFVELVVVVDNIRYLFSQSNATTVQHEVFNVVNIVDSFYHPLEVDVILTGIDIWTASNPLPTSGDLDNVLEDFSIWKNYNLNNRLQHDVAHLFIKDTQGMKLGVAYVKGICQNPFNTGVDVFEDNRLVVFAITLGHELGHNLGMQHDTQWCVCELQWCIMHAYRKVTTKFSNCSYAQYWDSTISSGLCIQPPPYPGNIFRLKYCGNLVVEEGEECDCGTIRQCAKDPCCLLNCTLHPGAACAFGICCKDCKFLPSGTLCRQQVGECDLPEWCNGTSHQCPDDVYVQDGISCNVNAFCYEKTCNNHDIQCKEIFGQDARSASQSCYQEINTQGNRFGHCGIVGTTYVKCWTPDIMCGRVQCENVGVIPNLIEHSTVQQFHLNDTTCWGTDYHLGMAIPDIGEVKDGTVCGPEKICIRKKCASMVHLSQACQPKTCNMRGICNNKQHCHCNHEWAPPYCKDKGYGGSADSGPPPKNNMEGLNVMGKLRYLSLLCLLPLVAFLLFCLHVLFKKRTKSKEDEEG

SEQ ID NO: 13342 - protein, 323 aa, Homo sapiens
MDSKYQCVKLNDGHFMPVLGFGTYAPAEVPKSKALEAVKLAIEAGFHHIDSAHVYNNEEQVGLAIRSKIADGSVKREDIFYTSKLWSNSHRPELVRPALERSLKNLQLDYVDLYLIHFPVSVKPGEEVIPKDENGKILFDTVDLCATWEAMEKCKDAGLAKSIGVSNFNHRLLEMILNKPGLKYKPVCNQVECHPYFNQRKLLDFCKSKDIVLVAYSALGSHREEPWVDPNSPVLLEDPVLCALAKKHKRTPALIALRYQLQRGVVVLAKSYNEQRIRQNVQVFEFQLTSEEMKAIDGLNRNVRYLTLDIFAGPPNYPFSDEY

SEQ ID NO: 13343 - protein, 139 aa, Homo sapiens
MDSKYQCVKLNDGHFMPVLGFGTYAPAEVPKSKALEAVKLAIEAGFHHIDSAHVYNNEEQVGLAIRSKIADGSVKREDIFYTSKLWSNSHRPELVRPALERSLKNLQLDYVDLYLIHFPVSVKEDIGILTWKKSPKHNS

SEQ ID NO: 13344 - protein, 325 aa, Homo sapiens
MAASCVLLHTGQKMPLIGLGTWKSEPGQVKAAVKYALSVGYRHIDCAAIYGNEPEIGEALKEDVGPGKAVPREELFVTSKLWNTKHHPEDVEPALRKTLADLQLEYLDLYLMHWPYAFERGDNPFPKNADGTICYDSTHYKETWKALEALVAKGLVQALGLSNFNSRQIDDILSVASVRPAVLQVECHPYLAQNELIAHCQARGLEVTAYSPLGSSDRAWRDPDEPVLLEEPVVLALAEKYGRSPAQILLRWQVQRKVICIPKSITPSRILQNIKVFDFTFSPEEMKQLNALNKNWRYIVPMLTVDGKRVPRDAGHPLYPFNDPY

SEQ ID NO: 13345 - protein, 820 aa, Homo sapiens
MKMLLLLHCLGVFLSCSGHIQDEHPQYHSPPDVVIPVRITGTTRGMTPPGWLSYILPFGGQKHIIHIKVKKLLFSKHLPVFTYTDQGAILEDQPFVQNNCYYHGYVEGDPESLVSLSTCFGGFQGILQINDFAYEIKPLAFSTTFEHLVYKMDSEEKQFSTMRSGFMQNEITCRMEFEEIDNSTQKQSSYVGWWIHFRIVEIVVVIDNYLYIRYERNDSKLLEDLYVIVNIVDSILDVIGVKVLLFGLEIWTNKNLIVVDDVRKSVHLYCKWKSENITPRMQHDTSHLFTTLGLRGLSGIGAFRGMCTPHRSCAIVTFMNKTLGTFSIAVAHHLGHNLGMNHDEDTCRCSQPRCIMHEGNPPITKFSNCSYGDFWEYTVERTKCLLETVHTKDIFNVKRCGNGVVEEGEECDCGPLKHCAKDPCCLSNCTLTDGSTCAFGLCCKDCKFLPSGKVCRKEVNECDLPEWCNGTSHKCPDDFYVEDGIPCKERGYCYEKSCHDRNEQCRRIFGAGANTASETCYKELNTLGDRVGHCGIKNATYIKCNISDVQCGRIQCENVTEIPNMSDHTTVHWARFNDIMCWSTDYHLGMKGPDIGEVKDGTECGIDHICIHRHCVHITILNSNCSPAFCNKRGICNNKHHCHCNYLWDPPNCLIKGYGGSVDSGPPPKRKKKKKFCYLCILLLIVLFILLCCLYRLCKKSKPIKKQQDVQTPSAKEEEKIQRRPHELPPQSQPWVMPSQSQPPVTPSQSHPQVMPSQSQPPVTPSQSQPRVMPSQSQPPVMPSQSHPQLTPSQSQPPVTPSQRQPQLMPSQSQPPVTPS

SEQ ID NO: 13346 - protein, 766 aa, Homo sapiens
MKMLLLLHCLGVFLSCSGHIQDEHPQYHSPPDVVIPVRITGTTRGMTPPGWLSYILPFGGQKHIIHIKVKKLLFSKHLPVFTYTDQGAILEDQPFVQNNCYYHGYVEGDPESLVSLSTCFGGFQGILQINDFAYEIKPLAFSTTFEHLVYKMDSEEKQFSTMRSGFMQNEITCRMEFEEIDNSTQKQSSYVGWWIHFRIVEIVVVIDNYLYIRYERNDSKLLEDLYVIVNIVDSILDVIGVKVLLFGLEIWTNKNLIVVDDVRKSVHLYCKWKSENITPRMQHDTSHLFTTLGLRGLSGIGAFRGMCTPHRSCAIVTFMNKTLGTFSIAVAHHLGHNLGMNHDEDTCRCSQPRCIMHEGNPPITKFSNCSYGDFWEYTVERTKCLLETVHTKDIFNVKRCGNGVVEEGEECDCGPLKHCAKDPCCLSNCTLTDGSTCAFGLCCKDCKFLPSGKVCRKEVNECDLPEWCNGTSHKCPDDFYVEDGIPCKERGYCYEKSCHDRNEQCRRIFGAGANTASETCYKELNTLGDRVGHCGIKNATYIKCNISDVQCGRIQCENVTEIPNMSDHTTVHWARFNDIMCWSTDYHLGMKGPDIGEVKDGTECGIDHICIHRHCVHITILNSNCSPAFCNKRGICNNKHHCHCNYLWDPPNCLIKGYGGSVDSGPPPKRKKKKKFCYLCILLLIVLFILLCCLYRLCKKSKPIKKQQDVQTPSAKEEEKIQRRPHELPPQSQPWVMPSQSQPPVTPSQRQPQLMPSQSQPPVTPS

SEQ ID NO: 13347 - protein, 787 aa, Homo sapiens
MKMLLLLHCLGVFLSCSGHIQDEHPQYHSPPDVVIPVRITGTTRGMTPPGWLSYILPFGGQKHIIHIKVKKLLFSKHLPVFTYTDQGAILEDQPFVQNNCYYHGYVEGDPESLVSLSTCFGGFQGILQINDFAYEIKPLAFSTTFEHLVYKMDSEEKQFSTMRSGFMQNEITCRMEFEEIDNSTQKQSSYVGWWIHFRIVEIVVVIDNYLYIRYERNDSKLLEDLYVIVNIVDSILDVIGVKVLLFGLEIWTNKNLIVVDDVRKSVHLYCKWKSENITPRMQHDTSHLFTTLGLRGLSGIGAFRGMCTPHRSCAIVTFMNKTLGTFSIAVAHHLGHNLGMNHDEDTCRCSQPRCIMHEGNPPITKFSNCSYGDFWEYTVERTKCLLETVHTKDIFNVKRCGNGVVEEGEECDCGPLKHCAKDPCCLSNCTLTDGSTCAFGLCCKDCKFLPSGKVCRKEVNECDLPEWCNGTSHKCPDDFYVEDGIPCKERGYCYEKSCHDRNEQCRRIFGAGANTASETCYKELNTLGDRVGHCGIKNATYIKCNISDVQCGRIQCENVTEIPNMSDHTTVHWARFNDIMCWSTDYHLGMKGPDIGEVKDGTECGIDHICIHRHCVHITILNSNCSPAFCNKRGICNNKHHCHCNYLWDPPNCLIKGYGGSVDSGPPPKRKKKKKFCYLCILLLIVLFILLCCLYRLCKKSKPIKKQQDVQTPSAKEEEKIQRRPHELPPQSQPWVMPSQSQPPVTPSQSHPQVMPSQSQPPQNLFLFSFSISDCVLNFRLLYLQAT

SEQ ID NO: 13348 - protein, 509 aa, Homo sapiens
MVDGVMILPVLIMIALPSPSMEDEKPKVNPKLYMCVCEGLSCGNEDHCEGQQCFSSLSINDGFHVYQKGCFQVYEQGKMTCKTPPSPGQAVECCQGDWCNRNITAQLPTKGKSFPGTQNFHLEVGLIILSVVFAVCLLACLLGVALRKFKRRNQERLNPRDVEYGTIEGLITTNVGDSTLADLLDHSCTSGSGSGLPFLVQRTVARQITLLECVGKGRYGEVWRGSWQGENVAVKIFSSRDEKSWFRETELYNTVMLRHENILGFIASDMTSRHSSTQLWLITHYHEMGSLYDYLQLTTLDTVSCLRIVLSIASGLAHLHIEIFGTQGKPAIAHRDLKSKNILVKKNGQCCIADLGLAVMHSQSTNQLDVGNNPRVGTKRYMAPEVLDETIQVDCFDSYKRVDIWAFGLVLWEVARRMVSNGIVEDYKPPFYDVVPNDPSFEDMRKVVCVDQQRPNIPNRWFSDPTLTSLAKLMKECWYQNPSARLTALRIKKTLTKIDNSLDKLKTDC

SEQ ID NO: 13349 - protein, 286 aa, Homo sapiens
MEEKRRRARVQGAWAAPVKSQAIAQPATTAKSHLHQKPGQTWKNKEHHLSDREFVFKEPQQVVRRAPEPRVIDREGVYEISLSPTGVSRVCLYPGFVDVKEADWILEQLCQDVPWKQRTGIREDITYQQPRLTAWYGELPYTYSRITMEPNPHWHPVLRTLKNRIEENTGHTFNSLLCNLYRNEKDSVDWHSDDEPSLGRCPIIASLSFGATRTFEMRKKPPPEENGDYTYVERVKIPLDHGTLLIMEGATQADWQHRVPKEYHSREPRVNLTFRTVYPDPRGAPW

SEQ ID NO: 13350 - protein, 170 aa, Homo sapiens
MEEKRRRARVQGAWAAPVKSQAIAQPATTAKSHLHQKPGQTWKNKEHHLSDREFVFKEPQQVVRRAPEPRVIEEGVYEISLSPTGVSRVCLYPGFVDVKEADWILEQLCQDVPWKQRTGIREDSILQLTFKKSAPVSGTATAPQSCWYERPSPPHIPGPAILTRTRLWAP

SEQ ID NO: 13351 - protein, 99 aa, Homo sapiens
MSTAQSLKSVDYEVFGRVQGVCFRMYTEDEARKIGVVGWVKNTSKGTVTGQVQGPEDKVNSMKSWLSKVGSPSSRIDRTNFSNEKTISKLEYSNFSIRY

SEQ ID NO: 13352 - protein, 813 aa, Homo sapiens
MGWRPRRARGTPLLLLLLLLLLWPVPGAGVLQGHIPGQPVTPHWVLDGQPWRTVSLEEPVSKPDMGLVALEAEGQELLLELEKNHRLLAPGYIETHYGPDGQPVVLAPNHTDHCHYQGRVRGFPDSWVVLCTCSGMSGLITLSRNASYYLRPWPPRGSKDFSTHEIFRMEQLLTWKGTCGHRDPGNKAGMTSLPGGPQSRGRREARRTRKYLELYIVADHTLFLTRHRNLNHTKQRLLEVANYVDQLLRTLDIQVALTGLEVWTERDRSRVTQDANATLWAFLQWRRGLWAQRPHDSAQLLTGRAFQGATVGLAPVEGMCRAESSGGVSTDHSELPIGAAATMAHEIGHSLGLSHDPDGCCVEAAAESGGCVMAAATGHPFPRVFSACSRRQLRAFFRKGGGACLSNAPDPGLPVPPALCGNGFVEAGEECDCGPGQECRDLCCFAHNCSLRPGAQCAHGDCCVRCLLKPAGALCRQAMGDCDLPEFCTGTSSHCPPDVYLLDGSPCARGSGYCWDGACPTLEQQCQQLWGPGSHPAPEACFQVVNSAGDAHGNCGQDSEGHFLPCAGRDALCGKLQCQGGKPSLLAPHMVPVDSTVHLDGQEVTCRGALALPSAQLDLLGLGLVEPGTQCGPRMVCQSRRCRKNAFQELQRCLTACHSHGVCNSNHNCHCAPGWAPPFCDKPGFGGSMDSGPVQAENHDTFLLAMLLSVLLPLLPGAGLAWCCYRLPGAHLQRCSWGCRRDPACSGPKDGPHRDHPLGGVHPMELGPTATGQPWPLDPENSHEPSSHPEKPLPAVSPDPQADQVQMPRSCLW

SEQ ID NO: 13353 - protein, 787 aa, Homo sapiens
MGWRPRRARGTPLLLLLLLLLLWPVPGAGVLQGHIPGQPVTPHWVLDGQPWRTVSLEEPVSKPDMGLVALEAEGQELLLELEKNHRLLAPGYIETHYGPDGQPVVLAPNHTDHCHYQGRVRGFPDSWVVLCTCSGMSGLITLSRNASYYLRPWPPRGSKDFSTHEIFRMEQLLTWKGTCGHRDPGNKAGMTSLPGGPQSRGRREARRTRKYLELYIVADHTLFLTRHRNLNHTKQRLLEVANYVDQLLRTLDIQVALTGLEVWTERDRSRVTQDANATLWAFLQWRRGLWAQRPHDSAQLLTGRAFQGATVGLAPVEGMCRAESSGGVSTDHSELPIGAAATMAHEIGHSLGLSHDPDGCCVEAAAESGGCVMAAATGHPFPRVFSACSRRQLRAFFRKGGGACLSNAPDPGLPVPPALCGNGFVEAGEECDCGPGQECRDLCCFAHNCSLRPGAQCAHGDCCVRCLLKPAGALCRQAMGDCDLPEFCTGTSSHCPPDVYLLDGSPCARGSGYCWDGACPTLEQQCQQLWGPGSHPAPEACFQVVNSAGDAHGNCGQDSEGHFLPCAGRDALCGKLQCQGGKPSLLAPHMVPVDSTVHLDGQEVTCRGALALPSAQLDLLGLGLVEPGTQCGPRMVCNSNHNCHCAPGWAPPFCDKPGFGGSMDSGPVQAENHDTFLLAMLLSVLLPLLPGAGLAWCCYRLPGAHLQRCSWGCRRDPACSGPKDGPHRDHPLGGVHPMELGPTATGQPWPLDPENSHEPSSHPEKPLPAVSPDPQADQVQMPRSCLW

SEQ ID NO: 13354 - protein, 309 aa, Homo sapiens
MGDCDLPEFCTGTSSHCPPDVYLLDGSPCARGSGYCWDGACPTLEQQCQQLWGPGSHPAPEACFQVVNSAGDAHGNCGQDSEGHFLPCAGRDALCGKLQCQGGKPSLLAPHMVPVDSTVHLDGQEVTCRGALALPSAQLDLLGLGLVEPGTQCGPRMVCNSNHNCHCAPGWAPPFCDKPGFGGSMDSGPVQAENHDTFLLAMLLSVLLPLLPGAGLAWCCYRLPGAHLQRCSWGCRRDPACSGPKDGPHRDHPLGGVHPMELGPTATGQPWPLDPENSHEPSSHPEKPLPAVSPDPQADQVQMPRSCLW

SEQ ID NO: 13355 - protein, 854 aa, Homo sapiens
MMAYSDTTMMSDDIDWLRSHRGVCKVDLYNPEGQQDQDRKVICFVDVSTLNVEDKDYKDAASSSSEGNLNLGSLEEKEIIVIKDTEKKDQSKTEGSVCLFKQAPSDPVSVLNWLLSDLQKYALGFQHALSPSTSTCKHKVGDTEGEYHRASSENCYSVYADQVNIDYLMNRPQNLRLEMTAAKNTNNNQSPSAPPAKPPSTQRAVISPDGECSIDDLSFYVNRLSSLVIQMAHKEIKEKLEGKSKCLHHSICPSPGNKERISPRTPASKIASEMAYEAVELTAAEMRGTGEESREGGQKSFLYSELSNKSKSGDKQMSQRESKEFADSISKGLMVYANQVASDMMVSLMKTLKVHSSGKPIPASVVLKRVLLRHTKEIVSDLIDSCMKNLHNITGVLMTDSDFVSAVKRNLFNQWKQNATDIMEAMLKRLVSALIGEEKETKSQSLSYASLKAGSHDPKCRNQSLEFSTMKAEMKERDKGKMKSDPCKSLTSAEKVGEHILKEGLTIWNQKQGNSCKVATKACSNKDEKGEKINASTDSLAKDLIVSALKLIQYHLTQQTKGKDTCEEDCPGSTMGYMAQSTQYEKCGGGQSAKALSVKQLESHRAPGPSTCQKENQHLDSQKMDMSNIVLMLIQKLLNENPFKCEDPCEGENKCSEPRASKAASMSNRSDKAEEQCQEHQELDCTSGMKQANGQFIDKLVESVMKLCLIMAKYSNDGAALAELEEQAASANKPNFRGTRCIHSGAMPQNYQDSLGHEVIVNNQCSTNSLQKQLQAVLQWIAASQFNVPMLYFMGDKDGQLEKLPQVSAKAAEKGYSVGGLLQEVMKFAKERQPDEAVGKVARKQLLDWLLANL

SEQ ID NO: 13356 - protein, 845 aa, Homo sapiens
MSDDIDWLRSHRGVCKVDLYNPEGQQDQDRKVICFVDVSTLNVEDKDYKDAASSSSEGNLNLGSLEEKEIIVIKDTEKKDQSKTEGSVCLFKQAPSDPVSVLNWLLSDLQKYALGFQHALSPSTSTCKHKVGDTEGEYHRASSENCYSVYADQVNIDYLMNRPQNLRLEMTAAKNTNNNQSPSAPPAKPPSTQRAVISPDGECSIDDLSFYVNRLSSLVIQMAHKEIKEKLEGKSKCLHHSICPSPGNKERISPRTPASKIASEMAYEAVELTAAEMRGTGEESREGGQKSFLYSELSNKSKSGDKQMSQRESKEFADSISKGLMVYANQVASDMMVSLMKTLKVHSSGKPIPASVVLKRVLLRHTKEIVSDLIDSCMKNLHNITGVLMTDSDFVSAVKRNLFNQWKQNATDIMEAMLKRLVSALIGEEKETKSQSLSYASLKAGSHDPKCRNQSLEFSTMKAEMKERDKGKMKSDPCKSLTSAEKVGEHILKEGLTIWNQKQGNSCKVATKACSNKDEKGEKINASTDSLAKDLIVSALKLIQYHLTQQTKGKDTCEEDCPGSTMGYMAQSTQYEKCGGGQSAKALSVKQLESHRAPGPSTCQKENQHLDSQKMDMSNIVLMLIQKLLNENPFKCEDPCEGENKCSEPRASKAASMSNRSDKAEEQCQEHQELDCTSGMKQANGQFIDKLVESVMKLCLIMAKYSNDGAALAELEEQAASANKPNFRGTRCIHSGAMPQNYQDSLGHEVIVNNQCSTNSLQKQLQAVLQWIAASQFNVPMLYFMGDKDGQLEKLPQVSAKAAEKGYSVGGLLQEVMKFAKERQPDEAVGKVARKQLLDWLLANL

SEQ ID NO: 13357 - protein, 427 aa, Homo sapiens
METTISEIHVENKDEKRSAEGSPGAERQKEKASMLCFKRRKKAAKALKPKAGSEAADVARKCPQEAGASDQPEPTRGAWASLKRLVTRRKRSESSKQQKPLEGEMQPAINAEDADLSKKKAKSRLKIPCIKFPRGPKRSNHSKIIEDSDCSIKVQEEAEILDIQTQTPLNDQATKAKSTQDLSEGISRKDGDEVCESNVSNSTTSGEKVISVELGLDNGHSAIQTGTLILEEIETIKEKQDVQPQQASPLETSETDHQQPVLSDVPPLPAIPDQQIVEEASNSTLESAPNGKDYESTEIVAEETKPKDTELSQESDFKENGITEEKSKSEESKRMEPIAIIITDTEISEFDVTKSKNVPKQFLISAENEQVGVFANDNGFEDRTSEQYETLLIETASSLVKNAIQLSIEQLVNEMASDDNKINNLLQ

SEQ ID NO: 13358 - protein, 735 aa, Homo sapiens
MWRVLFLLSGLGGLRMDSNFDSLPVQITVPEKIRSIIKEGIESQASYKIVIEGKPYTVNLMQKNFLPHNFRVYSYSGTGIMKPLDQDFQNFCHYQGYIEGYPKSVVMVSTCTGLRGVLQFENVSYGIEPLESSVGFEHVIYQVKHKKADVSLYNEKDIESRDLSFKLQSVEPQQDFAKYIEMHVIVEKQLYNHMGSDTTVVAQKVFQLIGLTNAIFVSFNITIILSSLELWIDENKIATTGEANELLHTFLRWKTSYLVLRPHDVAFLLVYREKSNYVGATFQGKMCDANYAGGVVLHPRTISLESLAVILAQLLSLSMGITYDDINKCQCSGAVCIMNPEAIHFSGVKIFSNCSFEDFAHFISKQKSQCLHNQPRLDPFFKQQAVCGNAKLEAGEECDCGTEQDCALIGETCCDIATCRFKAGSNCAEGPCCENCLFMSKERMCRPSFEECDLPEYCNGSSASCPENHYVQTGHPCGLNQWICIDGVCMSGDKQCTDTFGKEVEFGPSECYSHLNSKTDVSGNCGISDSGYTQCEADNLQCGKLICKYVGKFLLQIPRATIIYANISGHLCIAVEFASDHADSQKMWIKDGTSCGSNKVCRNQRCVSSSYLGYDCTTDKCNDRGVCNNKKHCHCSASYLPPDCSVQSDLWPGGSIDSGNFPPVAIPARLPERRYIENIYHSKPMRWPFFLFIPFFIIFCVLIAIMVKVNFQRKKWRTEDYSSDEQPESESEPKG

SEQ ID NO: 13359 - protein, 716 aa, Homo sapiens
MWRVLFLLSGLGGLRMDSNFDSLPVQITVPEKIRSIIKEGIESQASYKIVIEGKPYTVNLMQKNFLPHNFRVYSYSGTGIMKPLDQDFQNFCHYQGYIEGYPKSVVMVSTCTGLRGVLQFENVSYGIEPLESSVGFEHVIYQVKHKKADVSLYNEKDIESRDLSFKLQSVEYNHMGSDTTVVAQKVFQLIGLTNAIFVSFNITIILSSLELWIDENKIATTGEANELLHTFLRWKTSYLVLRPHDVAFLLVYREKSNYVGATFQGKMCDANYAGGVVLHPRTISLESLAVILAQLLSLSMGITYDDINKCQCSGAVCIMNPEAIHFSGVKIFSNCSFEDFAHFISKQKSQCLHNQPRLDPFFKQQAVCGNAKLEAGEECDCGTEQDCALIGETCCDIATCRFKAGSNCAEGPCCENCLFMSKERMCRPSFEECDLPEYCNGSSASCPENHYVQTGHPCGLNQWICIDGVCMSGDKQCTDTFGKEVEFGPSECYSHLNSKTDVSGNCGISDSGYTQCEADNLQCGKLICKYVGKFLLQIPRATIIYANISGHLCIAVEFASDHADSQKMWIKDGTSCGSNKVCRNQRCVSSSYLGYDCTTDKCNDRGVCNNKKHCHCSASYLPPDCSVQSDLWPGGSIDSGNFPPVAIPARLPERRYIENIYHSKPMRWPFFLFIPFFIIFCVLIAIMVKVNFQRKKWRTEDYSSDEQPESESEPKG

SEQ ID NO: 13360 - protein, 249 aa, Homo sapiens
MLQLWKLVLLCGVLTGTSESLLDNLGNDLSNVVDKLEPVLHEGLETVDNTLKGILEKLKVDLGVLQKSSAWQLAKQKAQEAEKLLNNVISKLLPTNTDIFGLKISNSLILDVKAEPIDDGKGLNLSFPVTANVTVAGPIIGQIINLKASLDLLTAVTIETDPQTHQPVAVLGECASDPTSISLSLLDKHSQIINKFVNSVINTLKSTVSSLLQKEICPLIRIFIHSLDVNVIQQVVDNPQHKTQLQTLI

SEQ ID NO: 13361 - protein, 481 aa, Homo sapiens
MAASWSLLVTLRPLAQSPLRGRCVGCGAWAAALAPLATAPGKPFWKAYTVQTSESMTPTATSETYLKALAVCHGPLDHYDFLIKAHELKDDEHQRRVIQCLQKLHEDLKGYNIEAEGLFSKLFSRSKPPRGLYVYGDVGTGKTMVMDMFYAYVEMKRKKRVHFHGFMLDVHKRIHRLKQSLPKRKPGFMAKSYDPIAPIAEEISEEACLLCFDEFQVTDIADAMILKQLFENLFKNGVVVVATSNRPPEDLYKNGLQRANFVPFIAVLKEYCNTVQLDSGIDYRKRELPAAGKLYYLTSEADVEAVMDKLFDELAQKQNDLTRPRILKVQGRELRLNKACGTVADCTFEELCERPLGASDYLELSKNFDTIFLRNIPQFTLANRTQGRRFITLIDNFYDLKVRIICSASTPISSLFLHQHHDSELEQSRILMDDLGLSQDSAEGLSMFTGEEEIFAFQRTISRLTEMQTEQYWNEGDRTKK

SEQ ID NO: 13362 - protein, 859 aa, Homo sapiens
MYSGAGPALAPPAPPPPIQGYAFKPPPRPDFGTSGRTIKLQANFFEMDIPKIDIYHYELDIKPEKCPRRVNREIVEHMVQHFKTQIFGDRKPVFDGRKNLYTAMPLPIGRDKVELEVTLPGEGKDRIFKVSIKWVSCVSLQALHDALSGRLPSVPFETIQALDVVMRHLPSMRYTPVGRSFFTASEGCSNPLGGGREVWFGFHQSVRPSLWKMMLNIDVSATAFYKAQPVIEFVCEVLDFKSIEEQQKPLTDSQRVKFTKEIKGLKVEITHCGQMKRKYRVCNVTRRPASHQTFPLQQESGQTVECTVAQYFKDRHKLVLRYPHLPCLQVGQEQKHTYLPLEVCNIVAGQRCIKKLTDNQTSTMIRATARSAPDRQEEISKLMRSASFNTDPYVREFGIMVKDEMTDVTGRVLQPPSILYGGRNKAIATPVQGVWDMRNKQFHTGIEIKVWAIACFAPQRQCTEVHLKSFTEQLRKISRDAGMPIQGQPCFCKYAQGADSVEPMFRHLKNTYAGLQLVVVILPGKTPVYAEVKRVGDTVLGMATQCVQMKNVQRTTPQTLSNLCLKINVKLGGVNNILLPQGRPPVFQQPVIFLGADVTHPPAGDGKKPSIAAVVGSMDAHPNRYCATVRVQQHRQEIIQDLAAMVRELLIQFYKSTRFKPTRIIFYRDGVSEGQFQQVLHHELLAIREACIKLEKDYQPGITFIVVQKRHHTRLFCTDKNERVGKSGNIPAGTTVDTKITHPTEFDFYLCSHAGIQGTSRPSHYHVLWDDNRFSSDELQILTYQLCHTYVRCTRSVSIPAPAYYAHLVAFRARYHLVDKEHDSAEGSHTSGQSNGRDHQALAKAVQVHQDTLRTMYFA

SEQ ID NO: 13363 - protein, 825 aa, Homo sapiens
MYSGAGPALAPPAPPPPIQGYAFKPPPRPDFGTSGRTIKLQANFFEMDIPKIDIYHYELDIKPEKCPRRVNREIVEHMVQHFKTQIFGDRKPVFDGRKNLYTAMPLPIGRDKVELEVTLPGEGKDRIFKVSIKWVSCVSLQALHDALSGRLPSVPFETIQALDVVMRHLPSMRYTPVGRSFFTASEGCSNPLGGGREVWFGFHQSVRPSLWKMMLNIDVSATAFYKAQPVIEFVCEVLDFKSIEEQQKPLTDSQRVKFTKEIKGLKVEITHCGQMKRKYRVCNVTRRPASHQTFPLQQESGQTVECTVAQYFKDRHKLVLRYPHLPCLQVGQEQKHTYLPLEVCNIVAGQRCIKKLTDNQTSTMIRATARSAPDRQEEISKLMRSASFNTDPYVREFGIMVKDEMTDVTGRVLQPPSILYGGRNKAIATPVQGVWDMRNKQFHTGIEIKVWAIACFAPQRQCTEVHLKSFTEQLRKISRDAGMPIQGQPCFCKYAQGADSVEPMFRHLKNTYAGLQLVVVILPGKTPVYAEVKRVGDTVLGMATQCVQMKNVQRTTPQTLSNLCLKINVKLGGVNNILLPQGRPPVFQQPVIFLGADVTHPPAGDGKKPSIAAVVGSMDAHPNRYCATVRVQQHRQEIIQDLAAMVRELLIQFYKSTRFKPTRIIFYRDGVSEGQFQQVLHHELLAIREACIKLEKDYQPGITFIVVQKRHHTRLFCTDKNERGTSRPSHYHVLWDDNRFSSDELQILTYQLCHTYVRCTRSVSIPAPAYYAHLVAFRARYHLVDKEHDSAEGSHTSGQSNGRDHQALAKAVQVHQDTLRTMYFA

SEQ ID NO: 13364 - protein, 230 aa, Homo sapiens
MTKTSTCIYHFLVLSWYTFLNYYISQEGKDEVKPKILANGARWKYMTLLNLLLQTIFYGVTCLDDVLKRTKGGKDIKFLTAFRDLLFTTLAFPVSTFVFLAFWILFLYNRDLIYPKVLDTVIPVWLNHAMHTFIFPITLAEVVLRPHSYPSKKTGLTLLAAASIAYISRILWLYFETGTWVYPVFAKLSLLGLAAFFSLSYVFIASIYLLGEKLNHWKWGDMRQPRKKRK

SEQ ID NO: 13365 - protein, 248 aa, Homo sapiens
MTKTSTCIYHFLVLSWYTFLNYYISQEGKDEVKPKILANGARWKYMTLLNLLKNRTAGFDIYQPGSFRQLLQTIFYGVTCLDDVLKRTKGGKDIKFLTAFRDLLFTTLAFPVSTFVFLAFWILFLYNRDLIYPKVLDTVIPVWLNHAMHTFIFPITLAEVVLRPHSYPSKKTGLTLLAAASIAYISRILWLYFETGTWVYPVFAKLSLLGLAAFFSLSYVFIASIYLLGEKLNHWKWGDMRQPRKKRK

SEQ ID NO: 13366 - protein, 255 aa, Homo sapiens
MTKTSTCIYHFLVLSWYTFLNYYISQEGKDEVKPKILANGARWKYMTLLNLLLQTIFYGVTCLDDVLKRTKGGKDIKFLTAFRDLLFTTLAFPVSTFVFLAFWILFLYNRDLIYPKVLDTVIPVWLNHAMHTFIFPITLAEVVLRPHSYPSKKTGLTLLAAASIAYISRILWLYFETGTWVYPVFAKLSLLGLAAFFSLSYVFIASIYLLGEKLNHWKWVSVQILQRWRLESVGICFQWPDWKSPAKHQLVKNIR

SEQ ID NO: 13367 - protein, 1119 aa, Homo sapiens
MAGAPRGGGGGGGGAGEPGGAERAAGTSRRRGLRACDEEFACPELEALFRGYTLRLEQAATLKALAVLSLLAGALALAELLGAPGPAPGLAKGSHPVHCVLFLALLVVTNVRSLQVPQLQQVGQLALLFSLTFALLCCPFALGGPARGSAGAAGGPATAEQGVWQLLLVTFVSYALLPVRSLLAIGFGLVVAASHLLVTATLVPAKRPRLWRTLGANALLFVGVNMYGVFVRILTERSQRKAFLQARSCIEDRLRLEDENEKQERLLMSLLPRNVAMEMKEDFLKPPERIFHKIYIQRHDNVSILFADIVGFTGLASQCTAQELVKLLNELFGKFDELATENHCRRIKILGDCYYCVSGLTQPKTDHAHCCVEMGLDMIDTITSVAEATEVDLNMRVGLHTGRVLCGVLGLRKWQYDVWSNDVTLANVMEAAGLPGKVHITKTTLACLNGDYEVEPGYGHERNSFLKTHNIETFFIVPSHRRKIFPGLILSDIKPAKRMKFKTVCYLLVQLMHCRKMFKAEIPFSNVMTCEDDDKRRALRTASEKLRNRSSFSTNVVYTTPGTRVNRYISRLLEARQTELEMADLNFFTLKYKHVEREQKYHQLQDEYFTSAVVLTLILAALFGLVYLLIFPQSVVVLLLLVFCICFLVACVLYLHITRVQCFPGCLTIQIRTVLCIFIVVLIYSVAQGCVVGCLPWAWSSKPNSSLVVLSSGGQRTALPTLPCESTHHALLCCLVGTLPLAIFFRVSSLPKMILLSGLTTSYILVLELSGYTRTGGGAVSGRSYEPIVAILLFSCALALHARQVDIRLRLDYLWAAQAEEEREDMEKVKLDNRRILFNLLPAHVAQHFLMSNPRNMDLYYQSYSQVGVMFASIPNFNDFYIELDGNNMGVECLRLLNEIIADFDELMEKDFYKDIEKIKTIGSTYMAAVGLAPTSGTKAKKSISSHLSTLADFAIEMFDVLDEINYQSYNDFVLRVGINVGPVVAGVIGARRPQYDIWGNTVNVASRMDSTGVQGRIQVTEEVHRLLRRCPYHFVCRGKVSVKGKGEMLTYFLEGRTDGNGSQIRSLGLDRKMCPFGRAGLQGRRPPVCPMPGVSVRAGLPPHSPGQYLPSAAAGKEA

SEQ ID NO: 13368 - protein, 626 aa, Homo sapiens
MVAPWRVSVRVCLSHLRCFELRQGLSLLRPSECPRDARLCWLLLGTLPKVVSLCGDVGEGAPDVLSRRRVRCSGAAGAGPAESLPRAGPLGGVFLHLRLWLRAGALLVKFFPLLLLYPLTYLAPSVSTLWLHLLLKATETSGPTYIKLGQWASTRRDLFSEAFCAQFSKLHVRVTPHPWTHTERFLRQAFGDDWGSILSFENREPVGSGCVAQVYKAYANTAFLETDSVQRLGRASCLPPFSHTGAVGGLRELFGYLGNGRKPPENLADQSFLERLLLPKADLVGSNAGVSRAQVPGHQPEATNLISVAVKVLHPGLLAQVHMDLLLMKIGSRVLGVLPGIKWLSLPEIVEEFEKLMVQQIDLRYEAQNLEHFQVNFRNVKAVKFPTPLRPFVTREVLVETYEESVPVSSYQQAGIPVDLKRKIARLGINMLLKMIFVDNFVHADLHPGNILVQGANGLSSSQEAQLQQADICDTLVVAVPSSLCPLRLVLLDAGIVAELQAPDLRNFRAVFMAVVMGQGQRVAELILHHARASECRDVEGFKTEMAMLVTQARKNTITLEKLHVSSLLSSVFKLLMTHKVKLESNFASIVFAIMVLEGLGRSLDPKLDILEAARPFLLTGPVCPP

SEQ ID NO: 13369 - protein, 487 aa, Homo sapiens
MRENMARGPCNAPRWASLMVLVAIGTAVTAAVNPGVVVRISQKGLDYASQQGTAALQKELKRIKIPDYSDSFKIKHLGKGHYSFYSMDIREFQLPSSQISMVPNVGLKFSISNANIKISGKWKAQKRFLKMSGNFDLSIEGMSISADLKLGSNPTSGKPTITCSSCSSHINSVHVHISKSKVGWLIQLFHKKIESALRNKMNSQVCEKVTNSVSSELQPYFQTLPVMTKIDSVAGINYGLVAPPATTAETLDVQMKGEFYSENHHNPPPFAPPVMEFPAAHDRMVYLGLSDYFFNTAGLVYQEAGVLKMTLRDDMIPKESKFRLTTKFFGTFLPEVAKKFPNMKIQIHVSASTPPHLSVQPTGLTFYPAVDVQAFAVLPNSSLASLFLIGMHTTGSMEVSAESNRLVGELKLDRLLLELKHSNIGPFPVELLQDIMNYIVPILVLPRVNEKLQKGFPLPTPARVQLYNVVLQPHQNFLLFGADVVYK

SEQ ID NO: 13370 - protein, 401 aa, Homo sapiens
MGLKALCLGLLCVLFVSHFYTPMPDNIEESWKIMALDAIAKTCTFTAMCFENMRIMRYEEFISMIFRLDYTQPLSDEYITVTDTTFVDIPVRLYLPKRKSETRRRAVIYFHGGGFCFGSSKQRAFDFLNRWTANTLDAVVVGVDYRLAPQHHFPAQFEDGLAAVKFFLLEKILTKYGVDPTRICIAGDSSGGNLATAVTQQVQNDAEIKHKIKMQVLLYPGLQITDSYLPSHRENEHGIVLTRDVAIKLVSLYFTKDEALPWAMRRNQHMPLESRHLFKFVNWSILLPEKYRKDYVYTEPILGGLSYSLPGLTDSRALPLLANDSQLQNLPLTYILTCQHDLLRDDGLMYVTRLRNVGVQVVHEHIEDGIHGALSFMTSPFYLRLGLRIRDMYVSWLDKNL

SEQ ID NO: 13371 - protein, 53 aa, Homo sapiens
MGLKALCLGLLCVLFVSHFYTPMPDNIEESWKIMALDAIAKTCTFTNRGPLTS

SEQ ID NO: 13372 - protein, 580 aa, Homo sapiens
MKIFFRYQTFRFIWLTKPPGRRLHKDHQLWTPLTLADFEAINRCNRPLPKNFNFAADVLDQWSQKEKTGERPANPALWWVNGKGDEVKWSFRELGSLSRKAANVLTKPCGLQRGDRLAVILPRIPEWWLVNVACIRTGIIFMPGTIQLTAKDILYRLRASKAKCIVASEEVAPAVESIVLECPDLKTKLLVSPQSWNGWLSFQELFQFASEEHSCVETGSQEPMTIYFTSGTTGFPKMAQHSQSSLGIGFTLCGRYWLDLKSSDIIWNMSDTGWVKAAIGSVFSSWLCGACVFVHRMAQFDTDTFLDTLTTYPITTLCSPPTVYRMLVQKDLKRYKFKSLRHCLTGGEPLNPEVLEQWRVQTGLELYEGYGQTEVGMICANQKGQEIKPGSMGKGMLPYDVQIIDENGNVLPPGKEGEIALRLKPTRPFCFFSKYVDNPQKTAATIRGDFYVTGDRGVMDSDGYFWFVGRADDVIISSGYRIGPFEVESALIEHPAVVESAVVSSPDQIRGEVVKAFVVLAAPFKSYNPEKLTLELQDHVKKSTAPYKYPRKVEFVQELPKTITGKIKRNVLRDQEWRGR

SEQ ID NO: 13373 - protein, 911 aa, Homo sapiens
MVDYHAANQSYQYGPSSAGNGAGGGGSMGDYMAQEDDWDRDLLLDPAWEKQQRKTFTAWCNSHLRKAGTQIENIDEDFRDGLKLMLLLEVISGERLPKPERGKMRVHKINNVNKALDFIASKGVKLVSIGAEEIVDGNAKMTLGMIWTIILRFAIQDISVEETSAKEGLLLWCQRKTAPYKNVNVQNFHISWKDGLAFNALIHRHRPELIEYDKLRKDDPVTNLNNAFEVAEKYLDIPKMLDAEDIVNTARPDEKAIMTYVSSFYHAFSGAQKAETAANRICKVLAVNQENEHLMEDYEKLASDLLEWIRRTIPWLEDRVPQKTIQEMQQKLEDFRDYRRVHKPPKVQEKCQLEINFNTLQTKLRLSNRPAFMPSEGKMVSDINNGWQHLEQAEKGYEEWLLNEIRRLERLDHLAEKFRQKASIHEAWTDGKEAMLKHRDYETATLSDIKALIRKHEAFESDLAAHQDRVEQIAAIAQELNELDYYDSHNVNTRCQKICDQWDALGSLTHSRREALEKTEKQLEAIDQLHLEYAKRAAPFNNWMESAMEDLQDMFIVHTIEEIEGLISAHDQFKSTLPDADREREAILAIHKEAQRIAESNHIKLSGSNPYTTVTPQIINSKWEKVQQLVPKRDHALLEEQSKQQSNEHLRRQFASQANVVGPWIQTKMEEIGRISIEMNGTLEDQLSHLKQYERSIVDYKPNLDLLEQQHQLIQEALIFDNKHTNYTMEHIRVGWEQLLTTIARTINEVENQILTRDAKGISQEQMQEFRASFNHFDKDHGGALGPEEFKACLISLGYDVENDRQGEAEFNRIMSLVDPNHSGLVTFQAFIDFMSRETTDTDTADQVIASFKVLAGDKNFITAEELRRELPPDQAEYCIARMAPYQGPDAVPGALDYKSFSTALYGESDL

SEQ ID NO: 13374 - protein, 692 aa, Homo sapiens
MVDYHAANQSYQYGPSSAGNGAGGGGSMGDYMAQEDDWDRDLLLDPAWEKQQRKAETAANRICKVLAVNQENEHLMEDYEKLASDLLEWIRRTIPWLEDRVPQKTIQEMQQKLEDFRDYRRVHKPPKVQEKCQLEINFNTLQTKLRLSNRPAFMPSEGKMVSDINNGWQHLEQAEKGYEEWLLNEIRRLERLDHLAEKFRQKASIHEAWTDGKEAMLKHRDYETATLSDIKALIRKHEAFESDLAAHQDRVEQIAAIAQELNELDYYDSHNVNTRCQKICDQWDALGSLTHSRREALEKTEKQLEAIDQLHLEYAKRAAPFNNWMESAMEDLQDMFIVHTIEEIEGLISAHDQFKSTLPDADREREAILAIHKEAQRIAESNHIKLSGSNPYTTVTPQIINSKWEKVQQLVPKRDHALLEEQSKQQSNEHLRRQFASQANVVGPWIQTKMEEIGRISIEMNGTLEDQLSHLKQYERSIVDYKPNLDLLEQQHQLIQEALIFDNKHTNYTMEHIRVGWEQLLTTIARTINEVENQILTRDAKGISQEQMQEFRASFNHFDKDHGGALGPEEFKACLISLGYDVENDRQGEAEFNRIMSLVDPNHSGLVTFQAFIDFMSRETTDTDTADQVIASFKVLAGDKNFITAEELRRELPPDQAEYCIARMAPYQGPDAVPGALDYKSFSTALYGESDL

SEQ ID NO: 13375 - protein, 521 aa, Homo sapiens
MVDYHAANQSYQYGPSSAGNGAGGGGSMGDYMAQEDDWDRDLLLDPAWEKQQRKTFTAWCNSHLRKAGTQIENIDEDFRDGLKLMLLLELNELDYYDSHNVNTRCQKICDQWDALGSLTHSRREALEKTEKQLEAIDQLHLEYAKRAAPFNNWMESAMEDLQDMFIVHTIEEIEGLISAHDQFKSTLPDADREREAILAIHKEAQRIAESNHIKLSGSNPYTTVTPQIINSKWEKVQQLVPKRDHALLEEQSKQQSNEHLRRQFASQANVVGPWIQTKMEEIGRISIEMNGTLEDQLSHLKQYERSIVDYKPNLDLLEQQHQLIQEALIFDNKHTNYTMEHIRVGWEQLLTTIARTINEVENQILTRDAKGISQEQMQEFRASFNHFDKDHGGALGPEEFKACLISLGYDVENDRQGEAEFNRIMSLVDPNHSGLVTFQAFIDFMSRETTDTDTADQVIASFKVLAGDKNFITAEELRRELPPDQAEYCIARMAPYQGPDAVPGALDYKSFSTALYGESDL

SEQ ID NO: 13376 - protein, 492 aa, Homo sapiens
MAAGERSWCLCKLLRFFYSLFFPGLIVCGTLCVCLVIVLWGIRLLLQRKKKLVSTSKNGKNQMVIAFFHPYCNAGGGGERVLWCALRALQKKYPEAVYVVYTGDVNVNGQQILEGAFRRFNIRLIHPVQFVFLRKRYLVEDSLYPHFTLLGQSLGSIFLGWEALMQCVPDVYIDSMGYAFTLPLFKYIGGCQVGSYVHYPTISTDMLSVVKNQNIGFNNAAFITRNPFLSKVKLIYYYLFAFIYGLVGSCSDVVMVNSSWTLNHILSLWKVGNCTNIVYPPCDVQTFLDIPLHEKKMTPGHLLVSVGQFRPEKNHPLQIRAFAKLLNKKMVESPPSLKLVLIGGCRNKDDELRVNQLRRLSEDLGVQEYVEFKINIPFDELKNYLSEATIGLHTMWNEHFGIGVVECMAAGTIILAHNSGGPKLDIVVPHEGDITGFLAESEEDYAETIAHILSMSAEKRLQIRKSARASVSRFSDQEFEVTFLSSVEKLFK

SEQ ID NO: 13377 - protein, 1338 aa, Homo sapiens
MGAGGRRMRGAPARLLLPLLPWLLLLLAPEARGAPGCPLSIRSCKCSGERPKGLSGGVPGPARRRVVCSGGDLPEPPEPGLLPNGTVTLLLSNNKITGLRNGSFLGLSLLEKLDLRNNIISTVQPGAFLGLGELKRLDLSNNRIGCLTSETFQGLPRLLRLNISGNIFSSLQPGVFDELPALKVVDLGTEFLTCDCHLRWLLPWAQNRSLQLSEHTLCAYPSALHAQALGSLQEAQLCCEGALELHTHHLIPSLRQVVFQGDRLPFQCSASYLGNDTRIRWYHNRAPVEGDEQAGILLAESLIHDCTFITSELTLSHIGVWASGEWECTVSMAQGNASKKVEIVVLETSASYCPAERVANNRGDFRWPRTLAGITAYQSCLQYPFTSVPLGGGAPGTRASRRCDRAGRWEPGDYSHCLYTNDITRVLYTFVLMPINASNALTLAHQLRVYTAEAASFSDMMDVVYVAQMIQKFLGYVDQIKELVEVMVDMASNLMLVDEHLLWLAQREDKACSRIVGALERIGGAALSPHAQHISVNARNVALEAYLIKPHSYVGLTCTAFQRREGGVPGTRPGSPGQNPPPEPEPPADQQLRFRCTTGRPNVSLSSFHIKNSVALASIQLPPSLFSSLPAALAPPVPPDCTLQLLVFRNGRLFHSHSNTSRPGAAGPGKRRGVATPVIFAGTSGCGVGNLTEPVAVSLRHWAEGAEPVAAWWSQEGPGEAGGWTSEGCQLRSSQPNVSALHCQHLGNVAVLMELSAFPREVGGAGAGLHPVVYPCTALLLLCLFATIITYILNHSSIRVSRKGWHMLLNLCFHIAMTSAVFAGGITLTNYQMVCQAVGITLHYSSLSTLLWMGVKARVLHKELTWRAPPPQEGDPALPTPSPMLRFYLIAGGIPLIICGITAAVNIHNYRDHSPYCWLVWRPSLGAFYIPVALILLITWIYFLCAGLRLRGPLAQNPKAGNSRASLEAGEELRGSTRLRGSGPLLSDSGSLLATGSARVGTPGPPEDGDSLYSPGVQLGALVTTHFLYLAMWACGALAVSQRWLPRVVCSCLYGVAASALGLFVFTHHCARRRDVRASWRACCPPASPAAPHAPPRALPAAAEDGSPVFGEGPPSLKSSPSGSSGHPLALGPCKLTNLQLAQSQVCEAGAAAGGEGEPEPAGTRGNLAHRHPNNVHHGRRAHKSRAKGHRAGEACGKNRLKALRGGAAGALELLSSESGSLHNSPTDSYLGSSRNSPGAGLQLEGEPMLTPSEGSDTSAAPLSEAGRAGQRRSASRDSLKGGGALEKESHRRSYPLNAASLNGAPKGGKYDDVTLMGAEVASGGCMKTGLWKSETTV

SEQ ID NO: 13378 - protein, 1121 aa, Homo sapiens
MGAGGRRMRGAPARLLLPLLPWLLLLLAPEARGAPGCPLSIRSCKCSGERPKGLSGGVPGPARRRVVCSGGDLPEPPEPGLLPNGTVTLLLSNNKITGLRNGSFLGLSLLEKLDLRNNIISTVQPGAFLGLGELKRLDLSNNRIGCLTSETFQGLPRLLRLNISGNIFSSLQPGVFDELPALKVVDLGTEFLTCDCHLRWLLPWAQNRSLQLSEHTLCAYPSALHAQALGSLQEAQLCCEGALELHTHHLIPSLRQVVFQGDRLPFQCSASYLGNDTRIRWYHNRAPVEGDEQAGILLAESLIHDCTFITSELTLSHIGVWASGEWECTVSMAQGNASKKVEIVVLETSASYCPAERVANNRGDFRWPRTLAGITAYQSCLQYPFTSVPLGGGAPGTRASRRCDRAGRWEPGDYSHCLYTNDITRVLYTFVLMPINASNALTLAHQLRVYTAEAASFSDMMDVVYVAQMIQKFLGYVDQIKELVEVMVDMASNLMLVDEHLLWLAQREDKACSRIVGALERIGGAALSPHAQHISVELSAFPREVGGAGAGLHPVVYPCTALLLLCLFATIITYILNHSSIRVSRKGWHMLLNLCFHIAMTSAVFAGGITLTNYQMVCQAVGITLHYSSLSTLLWMGVKARVLHKELTWRAPPPQEGDPALPTPSPMLRFYLIAGGIPLIICGITAAVNIHNYRDHSPYCWLVWRPSLGAFYIPVALILLITWIYFLCAGLRLRGPLAQNPKAGNSRASLEAGEELRGSTRLRGSGPLLSDSGSLLATGSARVGTPGPPEDGDSLYSPGVQLGALVTTHFLYLAMWACGALAVSQRWLPRVVCSCLYGVAASALGLFVFTHHCARRRDVRASWRACCPPASPAAPHAPPRALPAAAEDGSPVFGEGPPSLKSSPSGSSGHPLALGPCKLTNLQLAQSQVCEAGAAAGGEGEPEPAGTRGNLAHRHPNNVHHGRRAHKSRAKGHRAGEACGKNRLKALRGGAAGALELLSSESGSLHNSPTDSYLGSSRNSPGAGLQLEGEPMLTPSEGSDTSAAPLSEAGRAGQRRSASRDSLKGGGALEKESHRRSYPLNAASLNGAPKGGKYDDVTLMGAEVASGGCMKTGLWKSETTV

SEQ ID NO: 13379 - protein, 185 aa, Homo sapiens
MGAGGRRMRGAPARLLLPLLPWLLLLLAPEARGAPGCPLSIRSCKCSGERPKGLSGGVPGPARRRVVCSGGDLPEPPEPGLLPNGTVTLLLSNNKITGLRNGSFLGLSLLEKLDLRNNIISTVQPGAFLGLGELKRLDLSNNRIGCLTSETFQGLPRLLRLNISGNIFSSLQPGVFDELPALKVV

SEQ ID NO: 13380 - protein, 429 aa, Homo sapiens
MQLRNPELHLGCALALRFLALVSWDIPGARALDNGLARTPTMGWLHWERFMCNLDCQEEPDSCISEKLFMEMAELMVSEGWKDAGYEYLCIDDCWMAPQRDSEGRLQADPQRFPHGIRQLANYVHSKGLKLGIYADVGNKTCAGFPGSFGYYDIDAQTFADWGVDLLKFDGCYCDSLENLADGYKHMSLALNRTGRSIVYSCEWPLYMWPFQKPNYTEIRQYCNHWRNFADIDDSWKSIKSILDWTSFNQERIVDVAGPGGWNDPDMLVIGNFGLSWNQQVTQMALWAIMAAPLFMSNDLRHISPQAKALLQDKDVIAINQDPLGKQGYQLRQGDNFEVWERPLSGLAWAVAMINRQEIGGPRSYTIAVASLGKGVACNPACFITQLLPVKRKLGFYEWTSRLRSHINPTGTVLLQLENTMQMSLKDLL

SEQ ID NO: 13381 - protein, 148 aa, Homo sapiens
MARIPTAALGCISLLCLQLPGSLSRSLGGDPRPVKPREPPARSPSSSLQPRHPAPRPVVWKLHRALQAQRGAGLAPVMGQPLRDGGRQHSGPRRHSGPRRTQAQLLRVGCVLGTCQVQNLSHRLWQLMGPAGRQDSAPVDPSSPHSYG

SEQ ID NO: 13382 - protein, 153 aa, Homo sapiens
MTIHILILLLLLAFSAQGDLDTAARRGQHQVPQHRGHVCYLGVCRTHRLAEIIYWIRCLHQGALGEGQPRAPGPLQLWAPPVARGGSPARFPGFRPAARGLAQCPARWVTSGTARPLLGFSLPICMLELLLHISSPLTPAPETVFPSPSPGCD

SEQ ID NO: 13383 - protein, 292 aa, Homo sapiens
MMPVDVCPRDRGSQWVWLEMGQCYSKKSVVPESDTSERSSMTSGSSESDIPQENKVSKASLDTGQMAFTLAQLESLEICLKEAEEKAKALSEQLSVSEGTKSKLLEQVSRLEEKLEAVDHKEASGGPYEKMVLVKDQCIQKLQAEVKASQEQLIAQKLKHEKKVKKLQTDLATANAITVLELNEKIKTLYEGKPAPREDSLLEGFCGGLPPVEEGDRKISLIMELSTQVSLQTERITQLKEVLEEKERKIQQLEAERSPHPPQEVKDPPGCLPEAPVFSTHDIPPVVSDENL

SEQ ID NO: 13384 - protein, 234 aa, Homo sapiens
MAEPGPEPGRAWRVLALCGVAVFLAAAAAGGALVAWNLAASAARGPRCPEPGANATAPPGDPPPGVDDLRRRLAEAAEREEALARQLDQAESIRHELEKALKACEGRQSRLQTQLTTLKIEMDEAKAQGTQMGAENGALTEALARWEAAATESTRRLDEALRRAGVAEAEGEACAAREAALRERLNVLEAEMSPQRRVPRPRPRSGSRPRPSPRSRSRSGPSGGCRRPARRARG

SEQ ID NO: 13385 - protein, 526 aa, Homo sapiens
MAALTIATGTGNWFSALALGVTLLKCLLIPTYHSTDFEVHRNWLAITHSLPISQWYYEATSEWTLDYPPFFAWFEYILSHVAKYFDQEMLNVHNLNYSSSRTLLFQRFSVIFMDVLFVYAVRECCKCIDGKKVGKELTEKPKFILSVLLLWNFGLLIVDHIHFQYNGFLFGLMLLSIARLFQKRHMEGAFLFAVLLHFKHIYLYVAPAYGVYLLRSYCFTANKPDGSIRWKSFSFVRVISLGLVVFLVSALSLGPFLALNQLPQVFSRLFPFKRGLCHAYWAPNFWALYNALDKVLSVIGLKLKFLDPNNIPKASMTSGLVQQFQHTVLPSVTPLATLICTLIAILPSIFCLWFKPQGPRGFLRCLTLCALSSFMFGWHVHEKAILLAILPMSLLSVGKAGDASIFLILTTTGHYSLFPLLFTAPELPIKILLMLLFTIYSISSLKTLFRKEKPLFNWMETFYLLGLGPLEVCCEFVFPFTSWKVKYPFIPLLLTSVYCAVGITYAWFKLYVSVLIDSAIGKTKKQ

SEQ ID NO: 13386 - protein, 467 aa, Homo sapiens
MAALTIATGTGNWFSALALGVTLLKCLLIPTYHSTDFEVHRNWLAITHSLPISQWYYEATSEWTLDYPPFFAWFEYILSHVAKYFDQEMLNVHNLNYSSSRTLLFQRFSVIFMDVLFVYAVRECCKCIDGKKVGKELTEKPKFILSVLLLWNFGLLIVDHIHFQYNGFLFGLMLLSIARLFQKRHMEGAFLFAVLLHFKHIYLYVAPAYGVYLLRSYCFTANKPDGSIRWKSFSFVRVISLGLVVFLVSALSLGPFLALNQLPQVFSRLFPFKRGLCHAYWAPNFWALYNALDKVLSVIGLKLKFLDPNNIPKASMTSGLVQQFQHTVLPSVTPLATLICTLIAILPSIFCLWFKPQGPRGFLRCLTLCALSSFMFGWHVHEKAILLAILPMSLLSVGKAGDASIFLILTTTGHYSLFPLLFTAPELPIKILLMLLFTIYSISSLKTLFRRSFTLVAQAGVQWHDLS

SEQ ID NO: 13387 - protein, 769 aa, Homo sapiens
MRLLRRWAFAALLLSLLPTPGLGTQGPAGALRWGGLPQLGGPGAPEVTEPSRLVRESSGGEVRKQQLDTRVRQEPPGGPPVHLAQVSFVIPAFNSNFTLDLELNHHLLSSQYVERHFSREGTTQHSTGAGDHCYYQGKLRGNPHSFAALSTCQGLHGVFSDGNLTYIVEPQEVAGPWGAPQGPLPHLIYRTPLLPDPLGCREPGCLFAVPAQSAPPNRPRLRRKRQVRRGHPTVHSETKYVELIVINDHQLFEQMRQSVVLTSNFAKSVVNLADVIYKEQLNTRIVLVAMETWADGDKIQVQDDLLETLARLMVYRREGLPEPSDATHLFSGRTFQSTSSGAAYVGGICSLSHGGGVNEYGNMGAMAVTLAQTLGQNLGMMWNKHRSSAGDCKCPDIWLGCIMEDTGFYLPRKFSRCSIDEYNQFLQEGGGSCLFNKPLKLLDPPECGNGFVEAGEECDCGSVQECSRAGGNCCKKCTLTHDAMCSDGLCCRRCKYEPRGVSCREAVNECDIAETCTGDSSQCPPNLHKLDGYYCDHEQGRCYGGRCKTRDRQCQVLWGHAAADRFCYEKLNVEGTERGSCGRKGSGWVQCSKQDVLCGFLLCVNISGAPRLGDLVGDISSVTFYHQGKELDCRGGHVQLADGSDLSYVEDGTACGPNMLCLDHRCLPASAFNFSTCPGSGERRICSHHGVCSNEGKCICQPDWTGKDCSIHNPLPTSPPTGETERYKGPSGTNIIIGSIAGAVLVAAIVLGGTGWGFKNIRRGRSGGA

SEQ ID NO: 13388 - protein, 524 aa, Homo sapiens
MCWLSHHLLSSQYVERHFSREGTTQHSTGAGDHCYYQGKLRGNPHSFAALSTCQGLHGVFSDGNLTYIVEPQEVAGPWGAPQGPLPHLIYRTPLLPDPLGCREPGCLFAVPAQSAPPNRPRLRRKRQVRRGHPTVHSETKYVELIVINDHQLFEQMRQSVVLTSNFAKSVVNLADVIYKEQLNTRIVLVAMETWADGDKIQVQDDLLETLARLMVYRREGLPEPSDATHLFSGRTFQSTSSGAAYVGGICSLSHGGGVNEYGNMGAMAVTLAQTLGQNLGMMWNKHRSSAGDCKCPDIWLGCIMEDTGFYLPRKFSRCSIDEYNQFLQEGGGSCLFNKPLKLLDPPECGNGFVEAGEECDCGSVQECSRAGGNCCKKCTLTHDAMCSDGLCCRRCKYEPRGVSCREAVNECDIAETCTGDSSQCPPNLHKLDGYYCDHEQGRCYGGRCKTRDRQCQVLWGHAAADRFCYEKLNVEGTERGSCGRKGSGWVQCSKQPQQGRAVWLPPLCQHLWSSSARGPGGRHQ

SEQ ID NO: 13389 - protein, 568 aa, Homo sapiens
MASSCAVQVKLELGHRAQVRKKPTVEGFTHDWMVFVRGPEHSNIQHFVEKVVFHLHESFPRPKRVCKDPPYKVEESGYAGFILPIEVYFKNKEEPRKVRFDYDLFLHLEGHPPVNHLRCEKLTFNNPTEDFRRKLLKAGGDPNRSIHTSSSSSSSSSSSSSSSSSSSSSSSSSSSSSSSSSSSSSSSSSSTSFSKPHKLMKEHKEKPSKDSREHKSAFKEPSRDHNKSSKESSKKPKENKPLKEEKIVPKMAFKEPKPMSKEPKPDSNLLTITSGQDKKAPSKRPPISDSEELSAKKRKKSSSEALFKSFSSAPPLILTCSADKKQIKDKSHVKMGKVKIESETSEKKKSTLPPFDDIVDPNDSDVEENISSKSDSEQPSPASSSSSSSSSFTPSQTRQQGPLRSIMKDLHSDDNEEESDEVEDNDNDSEMERPVNRGGSRSRRVSLSDGSDSESSSASSPLHHEPPPPLLKTNNNQILEVKSPIKQSKSDKQIKNGECDKAYLDELVELHRRLMTLRERHILQQIVNLIEETGHFHITNTTFDFDLCSLDKTTVRKLQSYLETSGTS

SEQ ID NO: 13390 - protein, 565 aa, Homo sapiens
MCAVQVKLELGHRAQVRKKPTVEGFTHDWMVFVRGPEHSNIQHFVEKVVFHLHESFPRPKRVCKDPPYKVEESGYAGFILPIEVYFKNKEEPRKVRFDYDLFLHLEGHPPVNHLRCEKLTFNNPTEDFRRKLLKAGGDPNRSIHTSSSSSSSSSSSSSSSSSSSSSSSSSSSSSSSSSSSSSSSSSSTSFSKPHKLMKEHKEKPSKDSREHKSAFKEPSRDHNKSSKESSKKPKENKPLKEEKIVPKMAFKEPKPMSKEPKPDSNLLTITSGQDKKAPSKRPPISDSEELSAKKRKKSSSEALFKSFSSAPPLILTCSADKKQIKDKSHVKMGKVKIESETSEKKKSTLPPFDDIVDPNDSDVEENISSKSDSEQPSPASSSSSSSSSFTPSQTRQQGPLRSIMKDLHSDDNEEESDEVEDNDNDSEMERPVNRGGSRSRRVSLSDGSDSESSSASSPLHHEPPPPLLKTNNNQILEVKSPIKQSKSDKQIKNGECDKAYLDELVELHRRLMTLRERHILQQIVNLIEETGHFHITNTTFDFDLCSLDKTTVRKLQSYLETSGTS

SEQ ID NO: 13391 - protein, 1102 aa, Homo sapiens
MFQLPVNNLGSLRKARKTVKKILSDIGLEYCKEHIEDFKQFEPNDFYLKNTTWEDVGLWDPSLTKNQDYRTKPFCCSACPFSSKFFSAYKSHFRNVHSEDFENRILLNCPYCTFNADKKTLETHIKIFHAPNASAPSSSLSTFKDKNKNDGLKPKQADSVEQAVYYCKKCTYRDPLYEIVRKHIYREHFQHVAAPYIAKAGEKSLNGAVPLGSNAREESSIHCKRCLFMPKSYEALVQHVIEDHERIGYQVTAMIGHTNVVVPRSKPLMLIAPKPQDKKSMGLPPRIGSLASGNVRSLPSQQMVNRLSIPKPNLNSTGVNMMSSVHLQQNNYGVKSVGQGYSVGQSMRLGLGGNAPVSIPQQSQSVKQLLPSGNGRSYGLGSEQRSQAPARYSLQSANASSLSSGQLKSPSLSQSQASRVLGQSSSKPAAAATGPPPGNTSSTQKWKICTICNELFPENVYSVHFEKEHKAEKVPAVANYIMKIHNFTSKCLYCNRYLPTDTLLNHMLIHGLSCPYCRSTFNDVEKMAAHMRMVHIDEEMGPKTDSTLSFDLTLQQGSHTNIHLLVTTYNLRDAPAESVAYHAQNNPPVPPKPQPKVQEKADIPVKSSPQAAVPYKKDVGKTLCPLCFSILKGPISDALAHHLRERHQVIQTVHPVEKKLTYKCIHCLGVYTSNMTASTITLHLVHCRGVGKTQNGQDKTNAPSRLNQSPSLAPVKRTYEQMEFPLLKKRKLDDDSDSPSFFEEKPEEPVVLALDPKGHEDDSYEARKSFLTKYFNKQPYPTRREIEKLAASLWLWKSDIASHFSNKRKKCVRDCEKYKPGVLLGFNMKELNKVKHEMDFDAEWLFENHDEKDSRVNASKTADKKLNLGKEDDSSSDSFENLEEESNESGSPFDPVFEVEPKISNDNPEEHVLKVIPEDASESEEKLDQKEDGSKYETIHLTEEPTKLMHNASDSEVDQDDVVEWKDGASPSESGPGSQQVSDFEDNTCEMKPGTWSDESSQSEDARSSKPAAKKKATMQGDREQLKWKNSSYGKVEGFWSKDQSQWKNASENDERLSNPQIEWQNSTIDSEDGEQFDNMTDGVAEPMHGSLAGVKLSSQQA

SEQ ID NO: 13392 - protein, 824 aa, Homo sapiens
MRQSLLFLTSVVPFVLAPRPPDDPGFGPHQRLEKLDSLLSDYDILSLSNIQQHSVRKRDLQTSTHVETLLTFSALKRHFKLYLTSSTERFSQNFKVVVVDGKNESEYTVKWQDFFTGHVVGEPDSRVLAHIRDDDVIIRINTDGAEYNIEPLWRFVNDTKDKRMLVYKSEDIKNVSRLQSPKVCGYLKVDNEELLPKGLVDREPPEELVHRVKRRADPDPMKNTCKLLVVADHRFYRYMGRGEESTTTNYLIELIDRVDDIYRNTSWDNAGFKGYGIQIEQIRILKSPQEVKPGEKHYNMAKSYPNEEKDAWDVKMLLEQFSFDIAEEASKVCLAHLFTYQDFDMGTLGLAYVGSPRANSHGGVCPKAYYSPVGKKNIYLNSGLTSTKNYGKTILTKEADLVTTHELGHNFGAEHDPDGLAECAPNEDQGGKYVMYPIAVSGDHENNKMFSNCSKQSIYKTIESKAQECFQERSNKVCGNSRVDEGEECDPGIMYLNNDTCCNSDCTLKEGVQCSDRNSPCCKNCQFETAQKKCQEAINATCKGVSYCTGNSSECPPPGNAEDDTVCLDLGKCKDGKCIPFCEREQQLESCACNETDNSCKVCCRDLSGRCVPYVDAEQKNLFLRKGKPCTVGFCDMNGKCEKRVQDVIERFWDFIDQLSINTFGKFLADNIVGSVLVFSLIFWIPFSILVHCVDKKLDKQYESLSLFHPSNVEMLSSMDSASVRIIKPFPAPQTPGRLQPAPVIPSAPAAPKLDHQRMDTIQEDPSTDSHMDEDGFEKDPFPNSSTAAKSFEDLTDHPVTRSEKAASFKLQRQNRVDSKETEC

SEQ ID NO: 13393 - protein, 694 aa, Homo sapiens
MRQSLLFLTSVVPFVLAPRPPDDPGFGPHQRLEKLDSLLSDYDILSLSNIQQHSVRKRDLQTSTHVETLLTFSALKRHFKLYLTSSTERFSQNFKVVVVDGKNESEYTVKWQDFFTGHVVGEPDSRVLAHIRDDDVIIRINTDGAEYNIEPLWRFVNDTKDKRMLVYKSEDIKNVSRLQSPKVCGYLKVDNEELLPKGLVDREPPEELVHRVKRRADPDPMKNTCKLLVVADHRFYRYMGRGEESTTTNYLIELIDRVDDIYRNTSWDNAGFKGYGIQIEQIRILKSPQEVKPGEKHYNMAKSYPNEEKDAWDVKMLLEQFSFDIAEEASKVCLAHLFTYQDFDMGTLGLAYVGSPRANSHGGVCPKAYYSPVGKKNIYLNSGLTSTKNYGKTILTKEADLVTTHELGHNFGAEHDPDGLAECAPNEDQGGKYVMYPIAVSGDHENNKMFSNCSKQSIYKTIESKAQECFQERSNKVCGNSRVDEGEECDPGIMYLNNDTCCNSDCTLKEGVQCSDRNSPCCKNCQFETAQKKCQEAINATCKGVSYCTGNSSECPPPGNAEDDTVCLDLGKCKDGKCIPFCEREQQLESCACNETDNSCKVCCRDLSGRCVPYVDAEQKNLFLRKGKPCTVGFCDMNGKCEKRVQDVIERFWDFIDQLSINTFGKFLADNIVGSVLVFSLIFWIPFSILVHCV

SEQ ID NO: 13394 - protein, 1824 aa, Homo sapiens
MSAGGRDEERRKLADIIHHWNANRLDLFEISQPTEDLEFHGVMRFYFQDKAAGNFATKCIRVSSTATTQDVIETLAEKFRPDMRMLSSPKYSLYEVHVSGERRLDIDEKPLVVQLNWNKDDREGRFVLKNENDAIPPKKAQSNGPEKQEKEGVIQNFKRTLSKKEKKEKKKREKEALRQASDKDDRPFQGEDVENSRLAAEVYKDMPETSFTRTISNPEVVMKRRRQQKLEKRMQEFRSSDGRPDSGGTLRIYADSLKPNIPYKTILLSTTDPADFAVAEALEKYGLEKENPKDYCIARVMLPPGAQHSDEKGAKEIILDDDECPLQIFREWPSDKGILVFQLKRRPPDHIPKKTKKHLEGKTPKGKERADGSGYGSTLPPEKLPYLVELSPGRRNHFAYYNYHTYEDGSDSRDKPKLYRLQLSVTEVGTEKLDDNSIQLFGPGIQPHHCDLTNMDGVVTVTPRSMDAETYVEGQRISETTMLQSGMKVQFGASHVFKFVDPSQDHALAKRSVDGGLMVKGPRHKPGIVQETTFDLGGDIHSGTALPTSKSTTRLDSDRVSSASSTAERGMVKPMIRVEQQPDYRRQESRTQDASGPELILPASIEFRESSEDSFLSAIINYTNSSTVHFKLSPTYVLYMACRYVLSNQYRPDISPTERTHKVIAVVNKMVSMMEGVIQKQKNIAGALAFWMANASELLNFIKQDRDLSRITLDAQDVLAHLVQMAFKYLVHCLQSELNNYMPAFLDDPEENSLQRPKIDDVLHTLTGAMSLLRRCRVNAALTIQLFSQLFHFINMWLFNRLVTDPDSGLCSHYWGAIIRQQLGHIEAWAEKQGLELAADCHLSRIVQATTLLTMDKYAPDDIPNINSTCFKLNSLQLQALLQNYHCAPDEPFIPTDLIENVVTVAENTADELARSDGREVQLEEDPDLQLPFLLPEDGYSCDVVRNIPNGLQEFLDPLCQRGFCRLIPHTRSPGTWTIYFEGADYESHLLRENTELAQPLRKEPEIITVTLKKQNGMGLSIVAAKGAGQDKLGIYVKSVVKGGAADVDGRLAAGDQLLSVDGRSLVGLSQERAAELMTRTSSVVTLEVAKQGAIYHGLATLLNQPSPMMQRISDRRGSGKPRPKSEGFELYNNSTQNGSPESPQLPWAEYSEPKKLPGDDRLMKNRADHRSSPNVANQPPSPGGKSAYASGTTAKITSVSTGNLCTEEQTPPPRPEAYPIPTQTYTREYFTFPASKSQDRMAPPQNQWPNYEEKPHMHTDSNHSSIAIQRVTRSQEELREDKAYQLERHRIEAAMDRKSDSDMWINQSSSLDSSTSSQEHLNHSSKSVTPASTLTKSGPGRWKTPAAIPATPVAVSQPIRTDLPPPPPPPPVHYAGDFDGMSMDLPLPPPPSANQIGLPSAQVAAAERRKREEHQRWYEKEKARLEEERERKRREQERKLGQMRTQSLNPAPFSPLTAQQMKPEKPSTLQRPQETVIRELQPQQQPRTIERRDLQYITVSKEELSSGDSLSPDPWKRDAKEKLEKQQQMHIVDMLSKEIQELQSKPDRSAEESDRLRKLMLEWQFQKRLQESKQKDEDDEEEEDDDVDTMLIMQRLEAERRARLQDEERRRQQQLEEMRKREAEDRARQEEERRRQEEERTKRDAEEKRRQEEGYYSRLEAERRRQHDEAARRLLEPEAPGLCRPPLPRDYEPPSPSPAPGAPPPPPQRNASYLKTQVLSPDSLFTAKFVAYNEEEEEEDCSLAGPNSYPGSTGAAVGAHDACRDAKEKRSKSQDADSPGSSGAPENLTFKERQRLFSQGQDVSNKVKASRKLTELENELNTK

SEQ ID NO: 13395 - protein, 1612 aa, Homo sapiens
MSAGGRDEERRKLADIIHHWNANRLDLFEISQPTEDLEFHGVMRFYFQDKAAGNFATKCIRVSSTATTQDVIETLAEKFRPDMRMLSSPKYSLYEVHVSGERRLDIDEKPLVVQLNWNKDDREGRFVLKNENDAIPPKAQSNGPEKQEKEGVIQNFKRTLSKKEKKEKKKREKEALRQASDKDDRPFQGEDVENSRLAAEVYKDMPETSFTRTISNPEVVMKRRRQQKLEKRMQEFRSSDGRPDSGGTLRIYADSLKPNIPYKTILLSTTDPADFAVAEALEKYGLEKENPKDYCIARVMLPPGAQHSDEKGAKEIILDDDECPLQIFREWPSDKGILVFQLKRRPPDHIPKKTKKHLEGKTPKGKERADGSGYGSTLPPEKLPYLVELSPDGSDSRDKPKLYRLQLSVTEVGTEKLDDNSIQLFGPGIQPHHCDLTNMDGVVTVTPRSMDAETYVEGQRISETTMLQSGMKVQFGASHVFKFVDPSQDHALAKRSVDGGLMVKGPRHKPGIVQETTFDLGGDIHSGTALPTSKSTTRLDSDRVSSASSTAERGMVKPMIRVEQQPDYRRQESRTQDASGPELILPASIEFRESSEDSFLSAIINYTNSSTVHFKLSPTYVLYMACRYVLSNQYRPDISPTERTHKVIAVVNKMVSMMEGVIQKQKNIAGALAFWMANASELLNFIKQDRDLSRITLDAQDVLAHLVQMAFKYLVHCLQSELNNYMPAFLDDPEENSLQRPKIDDVLHTLTGAMSLLRRCRVNAALTIQLFSQLFHFINMWLFNRLVTDPDSGLCSHYWGAIIRQQLGHIEAWAEKQGLELAADCHLSRIVQATTLLTMDKYAPDDIPNINSTCFKLNSLQLQALLQNYHCAPDEPFIPTDLIENVVTVAENTADELARSDGREVQLEEDPDLQLPFLLPEDGYSCDVVRNIPNGLQEFLDPLCQRGFCRLIPHTRSPGTWTIYFEGADYESHLLRENTELAQPLRKEPEIITVTLKKQNGMGLSIVAAKGAGQDKLGIYVKSVVKGGAADVDGRLAAGDQLLSVDGRSLVGLSQERAAELMTRTSSVVTLEVAKQGAIYHGLATLLNQPSPMMQRISDRRGSGKPRPKSEGFELYNNSTQNGSPESPQLPWAEYSEPKKLPGDDRLMKNRADHRSSPNVANQPPSPGGKSAYASGTTAKITSVSTGNLCTEEQTPPPRPEAYPIPTQTYTREYFTFPASKSQDRMAPPQNQWPNYEEKPHMHTDSNHSSIAIQRVTRSQEELREDKAYQLERHRIEAAMDRKSDSDMWINQSSSLDSSTSSQEHLNHSSKSVTPASTLTKSGPGRWKTPAAIPATPVAVSQPIRTDLPPPPPPPPVHYAGDFDGMSMDLPLPPPPSANQIGLPSAQVAAAERRKREEHQRWYEKEKARLEEERERKRREQERKLGQMRTQSLNPAPFSPLTAQQMKPEKPSTLQRPQETVIRELQPQQQPRTIERRDLQYITVSKEELSSGDSLSPDPWKRDAKEKLEKQQQMHIVDMLSKEIQELQSKPDRSAEESDRLRKLMLEWQFQKRLQESKQKDEDDEEEEDDDVDTMLIMQRLEAERRARVKGGVLWLCPSVVPILASACFPWG

SEQ ID NO: 13396 - protein, 1816 aa, Homo sapiens
MSAGGRDEERRKLADIIHHWNANRLDLFEISQPTEDLEFHGVMRFYFQDKAAGNFATKCIRVSSTATTQDVIETLAEKFRPDMRMLSSPKYSLYEVHVSGERRLDIDEKPLVVQLNWNKDDREGRFVLKNENDAIPPKAQSNGPEKQEKEGVIQNFKRTLSKKEKKEKKKREKEALRQASDKDDRPFQGEDVENSRLAAEVYKDMPETSFTRTISNPEVVMKRRRQQKLEKRMQEFRSSDGRPDSGGTLRIYADSLKPNIPYKTILLSTTDPADFAVAEALEKYGLEKENPKDYCIARVMLPPGAQHSDEKGAKEIILDDDECPLQIFREWPSDKGILVFQLKRRPPDHIPKKTKKHLEGKTPKGKERADGSGYGSTLPPEKLPYLVELSPDGSDSRDKPKLYRLQLSVTEVGTEKLDDNSIQLFGPGIQPHHCDLTNMDGVVTVTPRSMDAETYVEGQRISETTMLQSGMKVQFGASHVFKFVDPSQDHALAKRSVDGGLMVKGPRHKPGIVQETTFDLGGDIHSGTALPTSKSTTRLDSDRVSSASSTAERGMVKPMIRVEQQPDYRRQESRTQDASGPELILPASIEFRESSEDSFLSAIINYTNSSTVHFKLSPTYVLYMACRYVLSNQYRPDISPTERTHKVIAVVNKMVSMMEGVIQKQKNIAGALAFWMANASELLNFIKQDRDLSRITLDAQDVLAHLVQMAFKYLVHCLQSELNNYMPAFLDDPEENSLQRPKIDDVLHTLTGAMSLLRRCRVNAALTIQLFSQLFHFINMWLFNRLVTDPDSGLCSHYWGAIIRQQLGHIEAWAEKQGLELAADCHLSRIVQATTLLTMDKYAPDDIPNINSTCFKLNSLQLQALLQNYHCAPDEPFIPTDLIENVVTVAENTADELARSDGREVQLEEDPDLQLPFLLPEDGYSCDVVRNIPNGLQEFLDPLCQRGFCRLIPHTRSPGTWTIYFEGADYESHLLRENTELAQPLRKEPEIITVTLKKQNGMGLSIVAAKGAGQDKLGIYVKSVVKGGAADDGRLAAGDQLLSVDGRSLVGLSQERAAELMTRTSSVVTLEVAKQGAIYHGLATLLNQPSPMMQRISDRRGSGKPRPKSEGFELYNNSTQNGSPESPQLPWAEYSEPKKLPGDDRLMKNRADHRSSPNVANQPPSPGGKSAYASGTTAKITSVSTGNLCTEEQTPPPRPEAYPIPTQTYTREYFTFPASKSQDRMAPPQNQWPNYEEKPHMHTDSNHSSIAIQRVTRSQEELREDKAYQLERHRIEAAMDRKSDSDMWINQSSSLDSSTSSQEHLNHSSKSVTPASTLTKSGPGRWKTPAAIPATPVAVSQPIRTDLPPPPPPPPVHYAGDFDGMSMDLPLPPPPSANQIGLPSAQVAAAERRKREEHQRWYEKEKARLEEERERKRREQERKLGQMRTQSLNPAPFSPLTAQQMKPEKPSTLQRPQETVIRELQPQQQPRTIERRDLQYITVSKEELSSGDSLSPDPWKRDAKEKLEKQQQMHIVDMLSKEIQELQSKPDRSAEESDRLRKLMLEWQFQKRLQESKQKDEDDEEEEDDDVDTMLIMQRLEAERRARLQDEERRRQQQLEEMRKREAEDRARQEEERRRQEEERTKRDAEEKRRQEEGYYSRLEAERRRQHDEAARRLLEPEAPGLCRPPLPRDYEPPSPSPAPGAPPPPPQRNASYLKTQVLSPDSLFTAKFVAYNEEEEEEDCSLAGQDKYSSTRKSHGDLLPAPLKPRPPPCQPRPASDGVFLSNSFQPPSAKANSTAHKKGQPLPPPKKSSSYHPSHCKGRGKRVTNQLSLS

SEQ ID NO: 13397 - protein, 1743 aa, Homo sapiens
MSAGGRDEERRKLADIIHHWNANRLDLFEISQPTEDLEFHGVMRFYFQDKAAGNFATKCIRVSSTATTQDVIETLAEKFRPDMRMLSSPKYSLYEVHVSGERRLDIDEKPLVVQLNWNKDDREGRFVLKNENDAIPPKAQSNGPEKQEKEGVIQNFKRTLSKKEKKEKKKREKEALRQASDKDDRPFQGEDVENSRLAAEVYKDMPETSFTRTISNPEVVMKRRRQQKLEKRMQEFRSSDGRPDSGGTLRIYADSLKPNIPYKTILLSTTDPADFAVAEALEKYGLEKENPKDYCIARVMLPPGAQHSDEKGAKEIILDDDECPLQIFREWPSDKGILVFQLKRRPPDHIPKKTKKHLEGKTPKGKERADGSGYGSTLPPEKLPYLVELSPDGSDSRDKPKLYRLQLSVTEVGTEKLDDNSIQLFGPGIQPHHCDLTNMDGVVTVTPRSMDAETYVEGQRISETTMLQSGMKVQFGASHVFKFVDPSQDHALAKRSVDGGLMVKGPRHKPGIVQETTFDLGGDIHSGTALPTSKSTTRLDSDRVSSASSTAERGMVKPMIRVEQQPDYRRQESRTQDASGPELILPASIEFRESSEDSFLSAIINYTNSSTVHFKLSPTYVLYMACRYVLSNQYRPDISPTERTHKVIAVVNKMVSMMEGVIQKQKNIAGALAFWMANASELLNFIKQDRDLSRITLDAQDVLAHLVQMAFKYLVHCLQSELNNYMPAFLDDPEENSLQRPKIDDVLHTLTGAMSLLRRCRVNAALTIQLFSQLFHFINMWLFNRLVTDPDSGLCSHYWGAIIRQQLGHIEAWAEKQGLELAADCHLSRIVQATTLLTMDKYAPDDIPNINSTCFKLNSLQLQALLQNYHCAPDEPFIPTDLIENVVTVAENTADELARSDGREVQLEEDPDLQLPFLLPEDGYSCDVVRNIPNGLQEFLDPLCQRGFCRLIPHTRSPGTWTIYFEGADYESHLLRENTELAQPLRKEPEIITVTLKKQNGMGLSIVAAKGAGQDKLGIYVKSVVKGGAADDGRLAAGDQLLSVDGRSLVGLSQERAAELMTRTSSVVTLEVAKQGAIYHGLATLLNQPSPMMQRISDRRGSGKPRPKSEGFELYNNSTQNGSPESPQLPWAEYSEPKKLPGDDRLMKNRADHRSSPNVANQPPSPGGKSAYASGTTAKITSVSTGNLCTEEQTPPPRPEAYPIPTQTYTREYFTFPASKSQDRMAPPQNQWPNYEEKPHMHTDSNHSSIAIQRVTRSQEELREDKAYQLERHRIEAAMDRKSDSDMWINQSSSLDSSTSSQEHLNHSSKSVTPASTLTKSGPGRWKTPAAIPATPVAVSQPIRTDLPPPPPPPPVHYAGDFDGMSMDLPLPPPPSANQIGLPSAQVAAAERRKREEHQRWYEKEKARLEEERERKRREQERKLGQMRTQSLNPAPFSPLTAQQMKPEKPSTLQRPQETVIRELQPQQQPRTIERRDLQYITVSKEELSSGDSLSPDPWKRDAKEKLEKQQQMHIVDMLSKEIQELQSKPDRSAEESDRLRKLMLEWQFQKRLQESKQKDEDDEEEEDDDVDTMLIMQRLEAERRARLQDEERRRQQQLEEMRKREAEDRARQEEERRRQEEERTKRDAEEKRRQEEGYYSRLEAERRRQHDEAARRLLEPEAPGPNSYPGSTGAAVGAHDACRDAKEKRSKSQDADSPGSSGAPENLTFKERQRLFSQGQDVSNKVKASRKLTELENELNTK

SEQ ID NO: 13398 - protein, 1651 aa, Homo sapiens
MSAGGRDEERRKLADIIHHWNANRLDLFEISQPTEDLEFHGVMRFYFQDKAAGNFATKCIRVSSTATTQDVIETLAEKFRPDMRMLSSPKYSLYEVHVSGERRLDIDEKPLVVQLNWNKDDREGRFVLKNENDAIPPKKAQSNGPEKQEKEGVIQNFKRTLSKKEKKEKKKREKEALRQASDKDDRPFQGEDVENSRLAAEVYKDMPETSFTRTISNPEVVMKRRRQQKLEKRMQEFRSSDGRPDSGGTLRIYADSLKPNIPYKTILLSTTDPADFAVAEALEKYGLEKENPKDYCIARVMLPPGAQHSDEKGAKEIILDDDECPLQIFREWPSDKGILVFQLKRRPPDHIPKKTKKHLEGKTPKGKERADGSGYGSTLPPEKLPYLVELSPGRRNHFAYYNYHTYEDGSDSRDKPKLYRLQLSVTEVGTEKLDDNSIQLFGPGIQPHHCDLTNMDGVVTVTPRSMDAETYVEGQRISETTMLQSGMKVQFGASHVFKFVDPSQDHALAKRSVDGGLMVKGPRHKPGIVQETTFDLGGDIHSGTALPTSKSTTRLDSDRVSSASSTAERGMVKPMIRVEQQPDYRRQESRTQDASGPELILPASIEFRESSEDSFLSAIINYTNSSTVHFKLSPTYVLYMACRYVLSNQYRPDISPTERTHKVIAVVNKMVSMMEGVIQKQKNIAGALAFWMANASELLNFIKQDRDLSRITLDAQDVLAHLVQMAFKYLVHCLQSELNNYMPAFLDDPEENSLQRPKIDDVLHTLTGAMSLLRRCRVNAALTIQLFSQLFHFINMWLFNRLVTDPDSGLCSHYWGAIIRQQLGHIEAWAEKQGLELAADCHLSRIVQATTLLTMDKYAPDDIPNINSTCFKLNSLQLQALLQNYHCAPDEPFIPTDLIENVVTVAENTADELARSDGREVQLEEDPDLQLPFLLPEDGYSCDVVRNIPNGLQEFLDPLCQRGFCRLIPHTRSPGTWTIYFEGADYESHLLRENTELAQPLRKEPEIITVTLKKQNGMGLSIVAAKGAGQDKLGIYVKSVVKGGAADVDGRLAAGDQLLSVDGRSLVGLSQERAAELMTRTSSVVTLEVAKQGAIYHGLATLLNQPSPMMQRISDRRGSGKPRPKSEGFELYNNSTQNGSPESPQLPWAEYSEPKKLPGDDRLMKNRADHRSSPNVANQPPSPGGKSAYASGTTAKITSVSTGNLCTEEQTPPPRPEAYPIPTQTYTREYFTFPASKSQDRMAPPQNQWPNYEEKPHMHTDSNHSSIAIQRVTRSQEELREDKAYQLERHRIEAAMDRKSDSDMWINQSSSLDSSTSSQEHLNHSSKSVTPASTLTKSGPGRWKTPAAIPATPVAVSQPIRTDLPPPPPPPPVHYAGDFDGMSMDLPLPPPPSANQIGLPSAQVAAAERRKREEHQRWYEKEKARLEEERERKRREQERKLGQMRTQSLNPAPFSPLTAQQMKPEKPSTLQRPQETVIRELQPQQQPRTIERRDLQYITVSKEELSSGDSLSPDPWKRDAKEKLEKQQQMHIVDMLSKEIQELQSKPDRSAEESDRLRKLMLEWQFQKRLQESKQKDEDDEEEEDDDVDTMLIMQRLEAERRARDEERRRQQQLEEMRKREAEDRARQEEERRRQEEERTKRDAEEKVMVL

SEQ ID NO: 13399 - protein, 1834 aa, Homo sapiens
MSAGGRDEERRKLADIIHHWNANRLDLFEISQPTEDLEFHGVMRFYFQDKAAGNFATKCIRVSSTATTQDVIETLAEKFRPDMRMLSSPKYSLYEVHVSGERRLDIDEKPLVVQLNWNKDDREGRFVLKNENDAIPPKAQSNGPEKQEKEGVIQNFKRTLSKKEKKEKKKREKEALRQASDKDDRPFQGEDVENSRLAAEVYKDMPETSFTRTISNPEVVMKRRRQQKLEKRMQEFRSSDGRPDSGGTLRIYADSLKPNIPYKTILLSTTDPADFAVAEALEKYGLEKENPKDYCIARVMLPPGAQHSDEKGAKEIILDDDECPLQIFREWPSDKGILVFQLKRRPPDHIPKKTKKHLEGKTPKGKERADGSGYGSTLPPEKLPYLVELSPGRRNHFAYYNYHTYEDGSDSRDKPKLYRLQLSVTEVGTEKLDDNSIQLFGPGIQPHHCDLTNMDGVVTVTPRSMDAETYVEGQRISETTMLQSGMKVQFGASHVFKFVDPSQDHALAKRSVDGGLMVKGPRHKPGIVQETTFDLGGDIHSGTALPTSKSTTRLDSDRVSSASSTAERGMVKPMIRVEQQPDYRRQESRTQDASGPELILPASIEFRESSEDSFLSAIINYTNSSTVHFKLSPTYVLYMACRYVLSNQYRPDISPTERTHKVIAVVNKMVSMMEGVIQKQKNIAGALAFWMANASELLNFIKQDRDLSRITLDAQDVLAHLVQMAFKYLVHCLQSELNNYMPAFLDDPEENSLQRPKIDDVLHTLTGAMSLLRRCRVNAALTIQLFSQLFHFINMWLFNRLVTDPDSGLCSHYWGAIIRQQLGHIEAWAEKQGLELAADCHLSRIVQATTLLTMDKYAPDDIPNINSTCFKLNSLQLQALLQNYHCAPDEPFIPTDLIENVVTVAENTADELARSDGREVQLEEDPDLQLPFLLPEDGYSCDVVRNIPNGLQEFLDPLCQRGFCRLIPHTRSPGTWTIYFEGADYESHLLRENTELAQPLRKEPEIITVTLKKQNGMGLSIVAAKGAGQDKLGIYVKSVVKGGAADVDGRLAAGDQLLSVDGRSLVGLSQERAAELMTRTSSVVTLEVAKQGAIYHGLATLLNQPSPMMQRISDRRGSGKPRPKSEGFELYNNSTQNGSPESPQLPWAEYSEPKKLPGDDRLMKNRADHRSSPNVANQPPSPGGKSAYASGTTAKITSVSTGNLCTEEQTPPPRPEAYPIPTQTYTREYFTFPASKSQDRMAPPQNQWPNYEEKPHMHTDSNHSSIAIQRVTRSQEELREDKAYQLERHRIEAAMDRKSDSDMWINQSSSLDSSTSSQEHLNHSSKSVTPASTLTKSGPGRWKTPAAIPATPVAVSQPIRTDLPPPPPPPPVHYAGDFDGMSMDLPLPPPPSANQIGLPSAQVAAAERRKREEHQRWYEKEKARLEEERERKRREQERKLGQMRTQSLNPAPFSPLTAQQMKPEKPSTLQRPQETVIRELQPQQQPRTIERRDLQYITVSKEELSSGDSLSPDPWKRDAKEKLEKQQQMHIVDMLSKEIQELQSKPDRSAEESDRLRKLMLEWQFQKRLQESKQKDEDDEEEEDDDVDTMLIMQRLEAERRARTAMPAISVLDLLQDEERRRQQQLEEMRKREAEDRARQEEERRRQEEERTKRDAEEKRRQEEGYYSRLEAERRRQHDEAARRLLEPEAPGLCRPPLPRDYEPPSPSPAPGAPPPPPQRNASYLKTQVLSPDSLFTAKFVAYNEEEEEEDCSLAGPNSYPGSTGAAVGAHDACRDAKEKRSKSQDADSPGSSGAPENLTFKERQRLFSQGQDVSNKVKASRKLTELENELNTK

SEQ ID NO: 13400 - protein, 562 aa, Homo sapiens
MAASAKRKQEEKHLKMLRDMTGLPHNRKCFDCDQRGPTYVNMTVGSFVCTSCSGSLRGLNPPHRVKSISMTTFTQQEIEFLQKHGNEVCKQIWLGLFDDRSSAIPDFRDPQKVKEFLQEKYEKKRWYVPPEQAKVVASVHASISGSSASSTSSTPEVKPLKSLLGDSAPTLHLNKGTPSQSPVVGRSQGQQQEKKQFDLLSDLGSDIFAAPAPQSTATANFANFAHFNSHAAQNSANADFANFDAFGQSSGSSNFGGFPTASHSPFQPQTTGGSAASVNANFAHFDNFPKSSSADFGTFNTSQSHQTASAVSKVSTNKAGLQTADKYAALANLDNIFSAGQGGDQGSGFGTTGKAPVGSVVSVPSQSSASSDKYAALAELDSVFSSAATSSNAYTSTSNASSNVFGTVPVVASAQTQPASSSVPAPFGATPSTNPFVAAAGPSVASSTNPFQTNARGATAATFGTASMSMPTGFGTPAPYSLPTSFSGSFQQPAFPAQAAFPQQTAFSQQPNGAGFAAFGQTKPVVTPFGQVAAAGVSSNPFMTGAPTGQFPTGSSSTNPFL

SEQ ID NO: 13401 - protein, 522 aa, Homo sapiens
MAASAKRKQEEKHLKMLRDMTGLPHNRKCFDCDQRGPTYVNMTVGSFVCTSCSGSLRGLNPPHRVKSISMTTFTQQEIEFLQKHGNEVCKQIWLGLFDDRSSAIPDFRDPQKVKEFLQEKYEKKRWYVPPEQAKVVASVHASISGSSASSTSSTPEVKPLKSLLGDSAPTLHLNKGTPSQSPVVGRSQGQQQEKKQFDLLSDLGSDIFAAPAPQSTATANFANFAHFNSHAGGSAASVNANFAHFDNFPKSSSADFGTFNTSQSHQTASAVSKVSTNKAGLQTADKYAALANLDNIFSAGQGGDQGSGFGTTGKAPVGSVVSVPSQSSASSDKYAALAELDSVFSSAATSSNAYTSTSNASSNVFGTVPVVASAQTQPASSSVPAPFGATPSTNPFVAAAGPSVASSTNPFQTNARGATAATFGTASMSMPTGFGTPAPYSLPTSFSGSFQQPAFPAQAAFPQQTAFSQQPNGAGFAAFGQTKPVVTPFGQVAAAGVSSNPFMTGAPTGQFPTGSSSTNPFL

SEQ ID NO: 13402 - protein, 560 aa, Homo sapiens
MAASAKRKQEEKHLKMLRDMTGLPHNRKCFDCDQRGPTYVNMTVGSFVCTSCSGSLRGLNPPHRVKSISMTTFTQQEIEFLQKHGNEVCKQIWLGLFDDRSSAIPDFRDPQKVKEFLQEKYEKKRWYVPPEQAKVVASVHASISGSSASSTSSTPEVKPLKSLLGDSAPTLHLNKGTPSQSPVVGRSQGQQQEKKQFDLLSDLGSDIFAAPAPQSTATANFANFAHFNSHAAQNSANADFANFDAFGQSSGSSNFGGFPTASHSPFQPQTTGGSAASVNANFAHFDNFPKSSSADFGTFNTSQSHQTASAVSKVSTNKAGLQTADKYAALANLDNIFSAGQGGDQGSGFGTTGKAPVGSVVSVPSQSSASSDKYAALAELDSVFSSAATSSNAYTSTSNASSNVFGTVPVVASAQTQPASSSVPAPFGATPSTNPFVAAAGPSVASSTNPFQTNARGATAATFGTASMSMPTGFGTPAPYSLPTSFSGSFQQPAFPAQAAFPQQTAFSQQPNGFAAFGQTKPVVTPFGQVAAAGVSSNPFMTGAPTGQFPTGSSSTNPFL

SEQ ID NO: 13403 - protein, 584 aa, Homo sapiens
MAASAKRKQEEKHLKMLRDMTGLPHNRKCFDCDQRGPTYVNMTVGSFVCTSCSGSLRGLNPPHRVKSISMTTFTQQEIEFLQKHGNEVCKQIWLGLFDDRSSAIPDFRDPQKVKEFLQEKYEKKRWYVPPEQAKVVASVHASISGSSASSTSSTPEVKPLKSLLGDSAPTLHLNKGTPSQSPVVGRSQGQQQEKKQFDLLSDLGSDIFAAPAPQSTATANFANFAHFNSHAAQNSANADFANFDAFGQSSGSSNFGGFPTASHSPFQPQTTAFRMLSSSCSFGEFTSAFPLQATHSGSAASVNANFAHFDNFPKSSSADFGTFNTSQSHQTASAVSKVSTNKAGLQTADKYAALANLDNIFSAGQGGDQGSGFGTTGKAPVGSVVSVPSQSSASSDKYAALAELDSVFSSAATSSNAYTSTSNASSNVFGTVPVVASAQTQPASSSVPAPFGATPSTNPFVAAAGPSVASSTNPFQTNARGATAATFGTASMSMPTGFGTPAPYSLPTSFSGSFQQPAFPAQAAFPQQTAFSQQPNGFAAFGQTKPVVTPFGQVAAAGVSSNPFMTGAPTGQFPTGSSSTNPFL

SEQ ID NO: 13404 - protein, 357 aa, Homo sapiens
MEKYVAAMVLSAAGDALGYYNGKWEFLQDGEKIHRQLAQLGGLDALDVGRWRVSDDTVMHLATAEALVEAGKAPKLTQLYYLLAKHYQDCMEDMDGRAPGGASVHNAMQLKPGKPNGWRIPFNSHEGGCGAAMRAMCIGLRFPHHSQLDTLIQVSIESGRMTHHHPTGYLGALASALFTAYAVNSRPPLQWGKGLMELLPEAKKYIVQSGYFVEENLQHWSYFQTKWENYLKLRGILDGESAPTFPESFGVKERDQFYTSLSYSGWGGSSGHDAPMIAYDAVLAAGDSWKELAHRAFFHGGDSDSTAAIAGCWWGVMYGFKGVSPSNYEKLEYRNRLEETARALYSLGSKEDTVISL

SEQ ID NO: 13405 - protein, 422 aa, Homo sapiens
MTVFFKTLRNHWKKTTAGLCLLTWGGHWLYGKHCDNLLRRAACQEAQVFGNQLIPPNAQVKKATVFLNPAACKGKARTLFEKNAAPILHLSGMDVTIVKTDYEGQAKKLLELMENTDVIIVAGGDGTLQEVVTGVLRRTDEATFSKIPIGFIPLGETSSLSHTLFAESGNKVQHITDATLAIVKGETVPLDVLQIKGEKEQPVFAMTGLRWGSFRDAGVKVSKYWYLGPLKIKAAHFFSTLKEWPQTHQASISYTGPTERPPNEPEETPVQRPSLYRRILRRLASYWAQPQDALSQEVSPEVWKDVQLSTIELSITTRNNQLDPTSKEDFLNICIEPDTISKGDFITIGSRKVRNPKLHVEGTECLQASQCTLLIPEGAGGSFSIDSEEYEAMPVEVKLLPRKLQFFCDPRKREQMLTSPTQ

SEQ ID NO: 13406 - protein, 65 aa, Homo sapiens
MTVFFKTLRNHWKKTTAGLCLLTWGGHWLYGKHCDNLLRRAACQEAQHYQDESRWEPTLSRTPGS

SEQ ID NO: 13407 - protein, 319 aa, Homo sapiens
MMVLKVEELVTGKKNGNGEAGEFLPEDFRDGEYEAAVTLEKQEDLKTLLAHPVTLGEQQWKSEKQREAELKKKKLEQRSKLENLEDLEIIIQLKKRKKYRKTKVPVVKEPEPEIITEPVDVPTFLKAALENKLPVVEKFLSDKNNPDVCDEYKRTALHRACLEGHLAIVEKLMEAGAQIEFRDMLESTAIHWASRGGNLDVLKLLLNKGAKISARDKLLSTALHVAVRTGHYECAEHLIACEADLNAKDREGDTPLHDAVRLNRYKMIRLLIMYGADLNIKNCAGKTPMDLVLHWQNGTKAIFDSLRENSYKTSRIATF

SEQ ID NO: 13408 - protein, 179 aa, Homo sapiens
MGQLIAKLMSIFGNQEHTVIIVGLDNEGKTTILYRFLTNEVVHMCPTIGSNVEEIILPKTHFFMWDIVRPEALSFIWNTYYSNTEFIILVIDSTDRDRLLTTREELYKMLAHEALQDASVLIFANKQDVKDSMRMVEISHFLTLSTIKDHSWHIQGCCALTREGLPARLQWMESQAAAN

SEQ ID NO: 13409 - protein, 464 aa, Homo sapiens
MASESGKLWGGRFVGAVDPIMEKFNASIAYDRHLWEVDVQGSKAYSRGLEKAGLLTKAEMDQILHGLDKVAEEWAQGTFKLNSNDEDIHTANERRLKELIGATAGKLHTGRSRNDQVVTDLRLWMRQTCSTLSGLLWELIRTMVDRAEAERDVLFPGYTHLQRAQPIRWSHWILSHAVALTRDSERLLEVRKRINVLPLGSGAIAGNPLGVDRELLRAELNFGAITLNSMDATSERDFVAEFLFWASLCMTHLSRMAEDLILYCTKEFSFVQLSDAYSTGSSLMPQKKNPDSLELIRSKAGRVFGRCAGLLMTLKGLPSTYNKDLQEDKEAVFEVSDTMSAVLQVATGVISTLQIHQENMGQALSPDMLATDLAYYLVRKGMPFRQAHEASGKAVFMAETKGVALNQLSLQELQTISPLFSGDVICVWDYGHSVEQYGALGGTARSSVDWQIRQVRALLQAQQA

SEQ ID NO: 13410 - protein, 444 aa, Homo sapiens
MASESGKLWGGRFVGAVDPIMEKFNASIAYDRHLWEVDVQGSKAYSRGLEKAGLLTKAEMDQILHGLDKVAEEWAQGTFKLNSNDEDIHTANERRLKELIGATAGKLHTGRSRNDQVVTDLRLWMRQTCSTLSGLLWELIRTMVDRAEAERDVLFPGYTHLQRAQPIRWSHWILSHAVALTRDSERLLEVRKRINVLPLGSGAIAGNPLGVDRELLRAELNFGAITLNSMDATSERDFVAEFLFWASLCMTHLSRMAEDLILYCTKEFSFVQLSDAYSTGSSLMPQKKNPDSLELIRSKAGRVFGREDKEAVFEVSDTMSAVLQVATGVISTLQIHQENMGQALSPDMLATDLAYYLVRKGMPFRQAHEASGKAVFMAETKGVALNQLSLQELQTISPLFSGDVICVWDYGHSVEQYGALGGTARSSVDWQIRQVRALLQAQQA

SEQ ID NO: 13411 - protein, 438 aa, Homo sapiens
MASESGKLWGGRFVGAVDPIMEKFNASIAYDRHLWEVDVQGSKAYSRGLEKAGLLTKAEMDQILHGLDKVAEEWAQGTFKLNSNDEDIHTANERRLKELIGATAGKLHTGRSRNDQVVTDLRLWMRQTCSTLSGLLWELIRTMVDRAEAERDVLFPGYTHLQRAQPIRWSHWILSGAIAGNPLGVDRELLRAELNFGAITLNSMDATSERDFVAEFLFWASLCMTHLSRMAEDLILYCTKEFSFVQLSDAYSTGSSLMPQKKNPDSLELIRSKAGRVFGRCAGLLMTLKGLPSTYNKDLQEDKEAVFEVSDTMSAVLQVATGVISTLQIHQENMGQALSPDMLATDLAYYLVRKGMPFRQAHEASGKAVFMAETKGVALNQLSLQELQTISPLFSGDVICVWDYGHSVEQYGALGGTARSSVDWQIRQVRALLQAQQA

SEQ ID NO: 13412 - protein, 526 aa, Homo sapiens
MVAKDYPFYLTVKRANCSLELPPASGPAKDAEEPSNKRVKPLSRVTSLANLIPPVKATPLKRFSQTLQRSISFRSESRPDILAPRPWSRNAAPSSTKRRDSKLWSETFDVCVNQMLTSKEIKRQEAIFELSQGEEDLIEDLKLAKKAYHDPMLKLSIMTEQELNQIFGTLDSLIPLHEELLSQLRDVRKPDGSTEHVGPILVGWLPCLSSYDSYCSNQVAAKALLDHKKQDHRVQDFLQRCLESPFSRKLDLWNFLDIPRSRLVKYPLLLREILRHTPNDNPDQQHLEEAINIIQGIVAEINTKTGESECRYYKERLLYLEEGQKDSLIDSSRVLCCHGELKNNRGVKLHVFLFQEVLVITRAVTHNEQLCYQLYRQPIPVKDLLLEDLQDGEVRLGGSLRGAFSNNERIKNFFRVSFKNGSQSQTHSLQANDTFNKQQWLNCIRQAKETVLCAAGQAGVLDSEGSFLNPTTGSRELQGETKLEQMDQSDSESDCSMDTSEVSLDCERMEQTDSSCGNSRHGESNV

SEQ ID NO: 13413 - protein, 558 aa, Homo sapiens
MDSSTAMNQCSCRGMEENKERPKRQRQNNFPMFPSPKAWNFRGRKRKQSTQDEDAVSLCSLDISEPSNKRVKPLSRVTSLANLIPPVKATPLKRFSQTLQRSISFRSESRPDILAPRPWSRNAAPSSTKRRDSKLWSETFDVCVNQMLTSKEIKRQEAIFELSQGEEDLIEDLKLAKKAYHDPMLKLSIMTEQELNQIFGTLDSLIPLHEELLSQLRDVRKPDGSTEHVGPILVGWLPCLSSYDSYCSNQVAAKALLDHKKQDHRVQDFLQRCLESPFSRKLDLWNFLDIPRSRLVKYPLLLREILRHTPNDNPDQQHLEEAINIIQGIVAEINTKTGESECRYYKERLLYLEEGQKDSLIDSSRVLCCHGELKNNRGVKLHVFLFQEVLVITRAVTHNEQLCYQLYRQPIPVKDLLLEDLQDGEVRLGGSLRGAFSNNERIKNFFRVSFKNGSQSQTHSLQANDTFNKQQWLNCIRQAKETVLCAAGQAGVLDSEGSFLNPTTGSRELQGETKLEQMDQSDSESDCSMDTSEVSLDCERMEQTDSSCGNSRHGESNV

SEQ ID NO: 13414 - protein, 532 aa, Homo sapiens
MIEVCHHNWLLWLCPSKFGIFMCCLASTTGQMELRRTREPSNKRVKPLSRVTSLANLIPPVKATPLKRFSQTLQRSISFRSESRPDILAPRPWSRNAAPSSTKRRDSKLWSETFDVCVNQMLTSKEIKRQEAIFELSQGEEDLIEDLKLAKKAYHDPMLKLSIMTEQELNQIFGTLDSLIPLHEELLSQLRDVRKPDGSTEHVGPILVGWLPCLSSYDSYCSNQVAAKALLDHKKQDHRVQDFLQRCLESPFSRKLDLWNFLDIPRSRLVKYPLLLREILRHTPNDNPDQQHLEEAINIIQGIVAEINTKTGESECRYYKERLLYLEEGQKDSLIDSSRVLCCHGELKNNRGVKLHVFLFQEVLVITRAVTHNEQLCYQLYRQPIPVKDLLLEDLQDGEVRLGGSLRGAFSNNERIKNFFRVSFKNGSQSQTHSLQANDTFNKQQWLNCIRQAKETVLCAAGQAGVLDSEGSFLNPTTGSRELQGETKLEQMDQSDSESDCSMDTSEVSLDCERMEQTDSSCGNSRHGESNV

SEQ ID NO: 13415 - protein, 324 aa, Homo sapiens
MKLPCLSSYDSYCSNQVAAKALLDHKKQDHRVQDFLQRCLESPFSRKLDLWNFLDIPRSRLVKYPLLLREILRHTPNDNPDQQHLEEAINIIQGIVAEINTKTGESECRYYKERLLYLEEGQKDSLIDSSRVLCCHGELKNNRGVKLHVFLFQEVLVITRAVTHNEQLCYQLYRQPIPVKDLLLEDLQDGEVRLGGSLRGAFSNNERIKNFFRVSFKNGSQSQTHSLQANDTFNKQQWLNCIRQAKETVLCAAGQAGVLDSEGSFLNPTTGSRELQGETKLEQMDQSDSESDCSMDTSEVSLDCERMEQTDSSCGNSRHGESNV

SEQ ID NO: 13416 - protein, 1086 aa, Homo sapiens
MATVGEWSCVRCTFLNPAGQRQCSICEAPRHKPDLNHILRLSVEEQKWPCARCTFRNFLGKEACEVCGFTPEPAPGAAFLPVLNGVLPKPPAILGEPKGSCQEEAGPVRTAGLVATEPARGQCEDKDEEEKEEQEEEEGAAEPRGGWACPRCTLHNTPVASSCSVCGGPRRLSLPRIPPEALVVPEVVAPAGFHVVPAAPPPGLPGEGAEANPPATSQGPAAEPEPPRVPPFSPFSSTLQNNPVPRSRREVPPQLQPPVPEAAQPSPSAGCRGAPQGSGWAGASRLAELLSGKRLSVLEEEATEGGTSRVEAGSSTSGSDIIDLAGDTVRYTPASPSSPDFTTWSCAKCTLRNPTVAPRCSACGCSKLHGFQEHGEPPTHCPDCGADKPSPCGRSCGRVSSAQKAARVLPERPGQWACPACTLLNALRAKHCAACHTPQLLVAQRRGAAPLRRRESMHVEQRRQTDEGEAKALWENIVAFCRENNVSFVDDSFPPGPESVGFPAGDSVQQRVRQWLRPQEINCSVFRDHRATWSVFHTLRPSDILQGLLGNCWFLSALAVLAERPDLVERVMVTRSLCAEGAYQVRLCKDGTWTTVLVDDMLPCDEAGCLLFSQAQRKQLWVALIEKALAKLHGSYFALQAGRAIEGLATLTGAPCESLALQLSSTNPREEPVDTDLIWAKMLSSKEAGFLMGASCGGGNMKVDDSAYESLGLRPRHAYSILDVRDVQGTRLLRLRNPWGRFSWNGSWSDEWPHWPGHLRGELMPHGSSEGVFWMEYGDFVRYFDSVDICKVHSDWQEARVQGCFPSSASAPVGVTALTVLERASLEFALFQEGSRRSDAVDSHLLDLCILVFRATFGSGGHLSLGRLLAHSKRAVKKFVSCDVMLEPGEYAVVCCAFNHWGPPLPGTPAPQASSPSAGVPRASPEPPGHVLAVYSSRLVMVEPVEAQPTTLADAIILLTESRGERHEGREGMTCYYLTHGWAGLIVVVENRHPKAYLHVQCDCTDSFNVVSTRGSLRTQDSVPPLHRQVLVILSQLEGNAGFSITHRLAHRKAAQAFLSDWTASKGTHSPPLTPEVAGLHGPRPL

SEQ ID NO: 13417 - protein, 415 aa, Homo sapiens
MATVGEWSCVRCTFLNPAGQRQCSICEAPRHKPDLNHILRLSVEEQKWPCARCTFRNFLGKEACEVCGFTPEPAPGAAFLPVLNGVLPKPPAILGEPKGSCQEEAGPVRTAGLVATEPARGQCEDKDEEEKEEQEEEEGAAEPRGGWACPRCTLHNTPVASSCSVCGGPRRLSLPRIPPEALVVPEVVAPAGFHVVPAAPPPGLPGEGAEANPPATSQGPAAEPEPPRVPPFSPFSSTLQNNPVPRSRREVPPQLQPPVPEAAQPSPSAGCRGAPQGSGWAGASRLAELLSGKRLSVLEEEATEGGTSRVEAGSSTSGSDIIDLAGDTVRYTPASPSSPDFTTWSCAKCTLRNPCPPGLQPLGRGPESLPRAAGPRAGCVQLEAGHGGARGSPADHAGRRHHPAHREPRRAARGP

SEQ ID NO: 13418 - protein, 776 aa, Homo sapiens
MNPEEQIVTWLISLGVLESPKKTICDPEEFLKSSLKNGVVLCKLINRLMPGSVEKFCLDPQTEADCINNINDFLKGCATLQVEIFDPDDLYSGVNFSKVLSTLLAVNKATEDQLSERPCGRSSSLSAANTSQTNPQGAVSSTVSGLQRQSKTVEMTENGSHQLIVKARFNFKQTNEDELSVCKGDIIYVTRVEEGGWWEGTLNGRTGWFPSNYVREIKSSERPLSPKAVKGFETAPLTKNYYTVVLQNILDTEKEYAKELQSLLVTYLRPLQSNNNLSTVEVTSLLGNFEEVCTFQQTLCQALEECSKFPENQHKVGGCLLSLMPHFKSMYLAYCANHPSAVNVLTQHSDELEQFMENQGASSPGILILTTNLSKPFMRLEKYVTLLQELERHMEDTHPDHQDILKAIVAFKTLMGQCQDLRKRKQLELQILSEPIQAWEGEDIKNLGNVIFMSQVMVQYGACEEKEERYLMLFSNVLIMLSASPRMSGFIYQGKIPIAGTVVTRLDEIEGNDCTFEITGNTVERIVVHCNNNQDFQEWLEQLNRLIRGPASCSSLSKTSSSSCSAHSSFSSTGQPRGPLEPPQIIKPWSLSCLRPAPPLRPSAALGYKERMSYILKESSKSPKTMKKFLHKRKTERKPSEEEYVIRKSTAALEEDAQILKVIEAYCTSANFQQGHGSSTRKDSIPQVLLPEEEKLIIEETRSNGQTIMEEKSLVDTVYALKDEVRELKQENKRMKQCLEEELKSRRDLEKLVRRLLKQTDECIRGESSSKTSILP

SEQ ID NO: 13419 - protein, 622 aa, Homo sapiens
MTENGSHQLIVKARFNFKQTNEDELSVCKGDIIYVTRVEEGGWWEGTLNGRTGWFPSNYVREIKSSERPLSPKAVKGFETAPLTKNYYTVVLQNILDTEKEYAKELQSLLVTYLRPLQSNNNLSTVEVTSLLGNFEEVCTFQQTLCQALEECSKFPENQHKVGGCLLSLMPHFKSMYLAYCANHPSAVNVLTQHSDELEQFMENQGASSPGILILTTNLSKPFMRLEKYVTLLQELERHMEDTHPDHQDILKAIVAFKTLMGQCQDLRKRKQLELQILSEPIQAWEGEDIKNLGNVIFMSQVMVQYGACEEKEERYLMLFSNVLIMLSASPRMSGFIYQGKIPIAGTVVTRLDEIEGNDCTFEITGNTVERIVVHCNNNQDFQEWLEQLNRLIRGPASCSSLSKTSSSSCSAHSSFSSTGQPRGPLEPPQIIKPWSLSCLRPAPPLRPSAALGYKERMSYILKESSKSPKTMKKFLHKRKTERKPSEEEYVIRKSTAALEEDAQILKVIEAYCTSANFQQGHGSSTRKDSIPQVLLPEEEKLIIEETRSNGQTIMEEKSLVDTVYALKDEVRELKQENKRMKQCLEEELKSRRDLEKLVRRLLKQTDECIRGESSSKTSILP

SEQ ID NO: 13420 - protein, 834 aa, Homo sapiens
MKYKNLMARALYDNVPECAEELAFRKGDILTVIEQNTGGLEGWWLCSLHGRQGIVPGNRVKLLIGPMQETASSHEQPASGLMQQTFGQQKLYQVPNPQAAPRDTIYQVPPSYQNQGIYQVPTGHGTQEQEVYQVPPSVQRSIGGTSGPHVGKKVITPVRTGHGYVYEYPSRYQKDVYDIPPSHTTQGVYDIPPSSAKGPVFSVPVGEIKPQGVYDIPPTKGVYAIPPSACRDEAGLREKDYDFPPPMRQAGRPDLRPEGVYDIPPTCTKPAGKDLHVKYNCDIPGAAEPVARRHQSLSPNHPPPQLGQSVGSQNDAYDVPRGVQFLEPPAETSEKANPQERDGVYDVPLHNPPDAKGSRDLVDGINRLSFSSTGSTRSNMSTSSTSSKESSLSASPAQDKRLFLDPDTAIERLQRLQQALEMGVSSLMALVTTDWRCYGYMERHINEIRTAVDKVELFLKEYLHFVKGAVANAACLPELILHNKMKRELQRVEDSHQILSQTSHDLNECSWSLNILAINKPQNKCDDLDRFVMVAKTVPDDAKQLTTTINTNAEALFRPGPGSLHLKNGPESIMNSTEYPHGGSQGQLLHPGDHKAQAHNKALPPGLSKEQAPDCSSSDGSERSWMDDYDYVHLQGKEEFERQQKELLEKENIMKQNKMQLEHHQLSQFQLLEQEITKPVENDISKWKPSQSLPTTNSGVSAQDRQLLCFYYDQCETHFISLLNAIDALFSCVSSAQPPRIFVAHSKFVILSAHKLVFIGDTLTRQVTAQDIRNKVMNSSNQLCEQLKTIVMATKMAALHYPSTTALQEMVHQVTDLSRNAQLFKRSLLEMATF

SEQ ID NO: 13421 - protein, 174 aa, Homo sapiens
MKYKNLMARALYDNVPECAEELAFRKGDILTVIEQNTGGLEGWWLCSLHGRQGIVPGNRVKLLIGPMQETASSHEQPASGLMQQTFGQQKLYQVPNPQAAPRDTIYQVPPSYQNQGIYQVPTGHGTQEQEVYQVPPSVQRSIGGTSGPHVGKKVFQRDGQVSYFLVRASKQTSL

SEQ ID NO: 13422 - protein, 834 aa, Homo sapiens
MWTRNLMARALYDNVPECAEELAFRKGDILTVIEQNTGGLEGWWLCSLHGRQGIVPGNRVKLLIGPMQETASSHEQPASGLMQQTFGQQKLYQVPNPQAAPRDTIYQVPPSYQNQGIYQVPTGHGTQEQEVYQVPPSVQRSIGGTSGPHVGKKVITPVRTGHGYVYEYPSRYQKDVYDIPPSHTTQGVYDIPPSSAKGPVFSVPVGEIKPQGVYDIPPTKGVYAIPPSACRDEAGLREKDYDFPPPMRQAGRPDLRPEGVYDIPPTCTKPAGKDLHVKYNCDIPGAAEPVARRHQSLSPNHPPPQLGQSVGSQNDAYDVPRGVQFLEPPAETSEKANPQERDGVYDVPLHNPPDAKGSRDLVDGINRLSFSSTGSTRSNMSTSSTSSKESSLSASPAQDKRLFLDPDTAIERLQRLQQALEMGVSSLMALVTTDWRCYGYMERHINEIRTAVDKVELFLKEYLHFVKGAVANAACLPELILHNKMKRELQRVEDSHQILSQTSHDLNECSWSLNILAINKPQNKCDDLDRFVMVAKTVPDDAKQLTTTINTNAEALFRPGPGSLHLKNGPESIMNSTEYPHGGSQGQLLHPGDHKAQAHNKALPPGLSKEQAPDCSSSDGSERSWMDDYDYVHLQGKEEFERQQKELLEKENIMKQNKMQLEHHQLSQFQLLEQEITKPVENDISKWKPSQSLPTTNSGVSAQDRQLLCFYYDQCETHFISLLNAIDALFSCVSSAQPPRIFVAHSKFVILSAHKLVFIGDTLTRQVTAQDIRNKVMNSSNQLCEQLKTIVMATKMAALHYPSTTALQEMVHQVTDLSRNAQLFKRSLLEMATF

SEQ ID NO: 13423 - protein, 121 aa, Homo sapiens
MGCASAKHVATVQNEEEAQKGKNYQNGDVFGDEYRIKPVEEVKYMKNGAEEEQKIAARNQENLEKSASSNVRLKTNKEVPGLVHQPRANMHISESQQEFFRMLDEKIEKGRDYCSEEEDIT

SEQ ID NO: 13424 - protein, 575 aa, Homo sapiens
MDFPTISRSPSGPPAMDLEGPRDILVPSEDLTPDSQWDPMPGGPGSLSRMELDESSLQELVQQFEALPGDLVGPSPGGAPCPLHIATGHGLASQEIADAHGLLSAEAGRDDLLGLLHCEECPPSQTGPEEPLEPAPRLLQPPEDPDEDSDSPEWVEGASAEQEGSRSSSSSPEPWLETVPLVTPEEPPAGAQSPETLASYPAPQEVPGPCDHEDLLDGVIFGARYLGSTQLVSERNPPTSTRMAQAREAMDRVKAPDGETQPMTEVDLFVSTKRIKVLTADSQEAMMDHALHTISYTADIGCVLVLMARRRLARRPAPQDHGRRLYKMLCHVFYAEDAQLIAQAIGQAFAAAYSQFLRESGIDPSQVGVHPSPGACHLHNGDLDHFSNSDNCREVHLEKRRGEGLGVALVESGWGSLLPTAVIANLLHGGPAERSGALSIGDRLTAINGTSLVGLPLAACQAAVRETKSQTSVTLSIVHCPPVTTAIIHRPHAREQLGFCVEDGIICSLLRGGIAERGGIRVGHRIIEINGQSVVATPHARIIELLTEAYGEVHIKTMPAATYRLLTGQEQPVYL

SEQ ID NO: 13425 - protein, 709 aa, Homo sapiens
MPSATSHSGSGSKSSGPPPPSGSSGSEAAAGAGAAAPASQHPATGTGAVQTEAMKQILGVIDKKLRNLEKKKGKLDDYQERMNKGERLNQDQLDAVSKYQEVTNNLEFAKELQRSFMALSQDIQKTIKKTARREQLMREEAEQKRLKTVLELQYVLDKLGDDEVRTDLKQGLNGVPILSEEELSLLDEFYKLVDPERDMSLRLNEQYEHASIHLWDLLEGKEKPVCGTTYKVLKEIVERVFQSNYFDSTHNHQNGLCEEEEAASAPAVEDQVPEAEPEPAEEYTEQSEVESTEYVNRQFMAETQFTSGEKEQVDEWTVETVEVVNSLQQQPQAASPSVPEPHSLTPVAQADPLVRRQRVQDLMAQMQGPYNFIQDSMLDFENQTLDPAIVSAQPMNPTQNMDMPQLVCPPVHSESRLAQPNQVPVQPEATQVPLVSSTSEGYTASQPLYQPSHATEQRPQKEPIDQIQATISLNTDQTTASSSLPAASQPQVFQAGTSKPLHSSGINVNAAPFQSMQTVFNMNAPVPPVNEPETLKQQNQYQASYNQSFSSQPHQVEQTELQQEQLQTVVGTYHGSPDQSHQVTGNHQQPPQQNTGFPRSNQPYYNSRGVSRGGSRGARGLMNGYRGPANGFRGGYDGYRPSFSNTPNSGYTQSQFSAPRDYSGYQRDGYQQNFKRGSGQSGPRGAPRGRGGPPRPNRGMPQMNTQQVN

SEQ ID NO: 13426 - protein, 694 aa, Homo sapiens
MPSATSHSGSGSKSSGPPPPSGSSGSEAAAGAGAAAPASQHPATGTGAVQTEAMKQILGVIDKKLRNLEKKKGKLDDYQERMNKGERLNQDQLDAVSKYQEVTNNLEFAKELQRSFMALSQDIQKTIKKTARREQLMREEAEQKRLKTVLELQYVLDKLGDDEVRTDLKQGLNGVPILSEEELSLLDEFYKLVDPERDMSLRLNEQYEHASIHLWDLLEGKEKPVCGTTYKVLKEIVERVFQSNYFDSTHNHQNGLCEEEEAASAPAVEDQVPEAEPEPAEEYTEQSEVESTEYVNRQFMAETQFTSGEKEQVDEWTVETVEVVNSLQQQPQAASPSVPEPHSLTPVAQADPLVRRQRVQDLMAQMQGPYNFIQDSMLDFENQTLDPAIVSAQPMNPTQNMDMPQLVCPPVHSESRLAQPNQVPVQPEATQVPLVSSTSEGYTASQPLYQPSHATEQRPQKEPIDQIQATISLNTDQTTASSSLPAASQPQVFQAGTSKPLHSSGINVNAAPFQSMQTVFNMNAPVPPVNEPETLKQQNQYQASYNQSFSSQPHQVEQTELQQEQLQTVVGTYHGSPDQSHQVTGNHQQPPQQNTGFPRSNQPYYNSRGVSRGGSRGARGLMNGYRGPANGFRGGYDGYRPSFSNTPNSGYTQSQFSAPRDYSGYQRDGYQQNFKRGSGQSGPRGAPRGNILWW

SEQ ID NO: 13427 - protein, 286 aa, Homo sapiens
MADFDDRVSDEEKVRIAAKFITHAPPGEFNEVFNDVRLLLNNDNLLREGAAHAFAQYNMDQFTPVKIEGYEDQVLITEHGDLGNSRFLDPRNKISFKFDHLRKEASDPQPEEADGGLKSWRESCDSALRAYVKDHYSNGFCTVYAKTIDGQQTIIACIESHQFQPKNFWNGRWRSEWKFTITPPTAQVVGVLKIQVHYYEDGNVQLVSHKDVQDSLTVSNEAQTAKEFIKIIENAENEYQTAISENYQTMSDTTFKALRRQLPVTRTKIDWNKILSYKIGKEMQNA

SEQ ID NO: 13428 - protein, 709 aa, Homo sapiens
MAQRHSDSSLEEKLLGHRFHSELRLDAGGNPASGLPMVRGSPRVRDDAAFQPQVPAPPQPRPPGHEEPWPIVLSTESPAALKLGTQQLIPKSLAVASKAKTPARHQSFGAAVLSREAARRDPKLLPAPSFSLDDMDVDKDPGGMLRRNLRNQSYRAAMKGLGKPGGQGDAIQLSPKLQALAEEPSQPHTRSPAKNKKTLGRKRGHKGSFKDDPQLYQEIQERGLNTSQESDDDILDESSSPEGTQKVDATIVVKSYRPAQVTWSQLPEVVELGILDQLSTEERKRQEAMFEILTSEFSYQHSLSILVEEFLQSKELRATVTQMEHHHLFSNILDVLGASQRFFEDLEQRHKAQVLVEDISDILEEHAEKHFHPYIAYCSNEVYQQRTLQKLISSNAAFREALREIERRPACGGLPMLSFLILPMQRVTRLPLLMDTLCLKTQGHSERYKAASRALKAISKLVRQCNEGAHRMERMEQMYTLHTQLDFSKVKSLPLISASRWLLKRGELFLVEETGLFRKIASRPTCYLFLFNDVLVVTKKKSEESYMVQDYAQMNHIQVEKIEPSELPLPGGGNRSSSVPHPFQVTLLRNSEGRQEQLLLSSDSASDRARWIVALTHSERQWQGLSSKGDLPQVEITKAFFAKQADEVTLQQADVVLVLQQEDGWLYGERLRDGETGWFPEDFARFITSRVAVEGNVRRMERLRVETDV

SEQ ID NO: 13429 - protein, 421 aa, Homo sapiens
MFEILTSEFSYQHSLSILVEEFLQSKELRATVTQMEHHHLFSNILDVLGASQRFFEDLEQRHKAQVLVEDISDILEEHAEKHFHPYIAYCSNEVYQQRTLQKLISSNAAFREALREIERRPACGGLPMLSFLILPMQRVTRLPLLMDTLCLKTQGHSERYKAASRALKAISKLVRQCNEGAHRMERMEQMYTLHTQLDFSKVKSLPLISASRWLLKRGELFLVEETGLFRKIASRPTCYLFLFNDVLVVTKKKSEESYMVQDYAQMNHIQVEKIEPSELPLPGGGNRSSSVPHPFQVTLLRNSEGRQEQLLLSSDSASDRARWIVALTHSERQWQGLSSKGDLPQVEITKAFFAKQADEVTLQQADVVLVLQQEDGWLYGERLRDGETGWFPEDFARFITSRVAVEGNVRRMERLRVETDV

SEQ ID NO: 13430 - protein, 1127 aa, Homo sapiens
MEVQVSQASLGFELTSVEKSLREWSRLSREVIAWLCPSSPNFILNFPPPPSASSVSMVQLFSSPFGYQSPSGHSEEEREGNMKSAKPQVNHSQHGESQRALSPLQSTLSSAASPSQAYETYIENGLICLKHKIRNIEKKKLKLEDYKDRLKSGEHLNPDQLEAVEKYEEVLHNLEFAKELQKTFSGLSLDLLKAQKKAQRREHMLKLEAEKKKLRTILQVQYVLQNLTQEHVQKDFKGGLNGAVYLPSKELDYLIKFSKLTCPERNESLSVEDQMEQSSLYFWDLLEGSEKAVVGTTYKHLKDLLSKLLNSGYFESIPVPKNAKEKEVPLEEEMLIQSEKKTQLSKTESVKESESLMEFAQPEIQPQEFLNRRYMTEVDYSNKQGEEQPWEADYARKPNLPKRWDMLTEPDGQEKKQESFKSWEASGKHQEVSKPAVSLEQRKQDTSKLRSTLPEEQKKQEISKSKPSPSQWKQDTPKSKAGYVQEEQKKQETPKLWPVQLQKEQDPKKQTPKSWTPSMQSEQNTTKSWTTPMCEEQDSKQPETPKSWENNVESQKHSLTSQSQISPKSWGVATASLIPNDQLLPRKLNTEPKDVPKPVHQPVGSSSTLPKDPVLRKEKLQDLMTQIQGTCNFMQESVLDFDKPSSAIPTSQPPSATPGSPVASKEQNLSSQSDFLQEPLQATSSPVTCSSNACLVTTDQASSGSETEFMTSETPEAAIPPGKQPSSLASPNPPMAKGSEQGFQSPPASSSSVTINTAPFQAMQTVFNVNAPLPPRKEQEIKESPYSPGYNQSFTTASTQTPPQCQLPSIHVEQTVHSQETAANYHPDGTIQVSNGSLAFYPAQTNVFPRPTQPFVNSRGSVRGCTRGGRLITNSYRSPGGYKGFDTYRGLPSISNGNYSQLQFQAREYSGAPYSQRDNFQQCYKRGGTSGGPRANSRAGWSDSSQVSSPERDNETFNSGDSGQGDSRSMTPVDVPVTNPAATILPVHVYPLPQQMRVAFSAARTSNLAPGTLDQPIVFDLLLNNLGETFDLQLGRFNCPVNGTYVFIFHMLKLAVNVPLYVNLMKNEEVLVSAYANDGAPDHETASNHAILQLFQGDQIWLRLHRGAIYGSSWKYSTFSGYLLYQD

SEQ ID NO: 13431 - protein, 1077 aa, Homo sapiens
MEVQVSQASLGFELTSVEKSLREWSRLSREVIAWLCPSSPNFILNFPPPPSASSVSMVQLFSSPFGYQSPSGHSEEEREGNMKSAKPQVNHSQHGESQRALSPLQSTLSSAASPSQAYETYIENGLICLKHKIRNIEKKKLKLEDYKDRLKSGEHLNPDQLEAVEKYEEVLHNLEFAKELQKTFSGLSLDLLKAQKKAQRREHMLKLEAEKKKLRTILQVQYVLQNLTQEHVQKDFKGGLNGAVYLPSKELDYLIKFSKLTCPERNESLSVEDQMEQSSLYFWDLLEGSEKAVVGTTYKHLKDLLSKLLNSGYFESIPVPKNAKEKEVPLEEEMLIQSEKKTQLSKTESVKESESLMEFAQPEIQPQEFLNRRYMTEVDYSNKQGEEQPWEADYARKPNLPKRWDMLTEPDGQEKKQESFKSWEASGKHQEVSKPAVSLEQRKQDTSKLRSTLPEEQKKQEISKSKPSPSQWKQDTPKSKAGYVQEEQKKQETPKLWPVQLQKEQDPKKQTPKSWTPSMQSEQNTTKSWTTPMCEEQDSKQPETPKSWENNVESQKHSLTSQSQISPKSWGVATASLIPNDQLLPRKLNTEPKDVPKPVHQPVGSSSTLPKDPVLRKEKLQDLMTQIQGTCNFMQESVLDFDKPSSAIPTSQPPSATPGSPVASKEQNLSSQSDFLQEPLQATSSPVTCSSNACLVTTDQASSGSETEFMTSETPEVFNVNAPLPPRKEQEIKESPYSPGYNQSFTTASTQTPPQCQLPSIHVEQTVHSQETANYHPDGTIQVSNGSLAFYPAQTNVFPRPTQPFVNSRGSVRGCTRGGRLITNSYRSPGGYKGFDTYRGLPSISNGNYSQLQFQAREYSGAPYSQRDNFQQCYKRGGTSGGPRANSRAGWSDSSQVSSPERDNETFNSGDSGQGDSRSMTPVDVPVTNPAATILPVHVYPLPQQMRVAFSAARTSNLAPGTLDQPIVFDLLLNNLGETFDLQLGRFNCPVNGTYVFIFHMLKLAVNVPLYVNLMKNEEVLVSAYANDGAPDHETASNHAILQLFQGDQIWLRLHRGAIYGSSWKYSTFSGYLLYQD

SEQ ID NO: 13432 - protein, 960 aa, Homo sapiens
MEVQVSQASLGFELTSVEKSLREWSRLSREVIAWLCPSSPNFILNFPPPPSASSVSMVQLFSSPFGYQSPSGHSEEEREGNMKSAKPQVNHSQHGESQRALSPLQSTLSSAASPSQAYETYIENGLICLKHKIRNIEKKKLKLEDYKDRLKSGEHLNPDQLEAVEKYEEVLHNLEFAKELQKTFSGLSLDLLKAQKKAQRREHMLKLEAEKKKLRTILQVQYVLQNLTQEHVQKDFKGGLNGAVYLPSKELDYLIKFSKLTCPERNESLSVEDQMEQSSLYFWDLLEGSEKAVVGTTYKHLKDLLSKLLNSGYFESIPVPKNAKEKEVPLEEEMLIQSEKKTQLSKTESVKESESLMEFAQPEIQPQEFLNRRYMTEVDYSNKQGEEQPWEADYARKPNLPKRWDMLTEPDGQEKKQESFKSWEASGKHQEVSKPAVSLEQRKQDTSKLRSTLPEEQKKQEISKSKPSPSQWKQDTPKSKAGYVQEEQKKQETPKLWPVQLQKEQDPKKQTPKSWTPSMQSEQNTTKSWTTPMCEEQDSKQPETPKSWENNVESQKHSLTSQSQISPKSWGVATASLIPNDQLLPRKLNTEPKDVPKPVHQPVGSSSTLPKDPVLRKEKLQDLMTQIQGTCNFMQESVLDFDKPSSAIPTSQPPSATPGSPVASKEQNLSSQSDFLQEPLQATSSPVTCSSNACLVTTDQASSGSETEFMTSETPEAAIPPGKQPSSLASPNPPMAKGSEQGFQSPPASSSSVTINTAPFQAMQTVFNVNAPLPPRKEQEIKESPYSPGYNQSFTTASTQTPPQCQLPSIHVEQTVHSQETANYHPDGTIQVSNGSLAFYPAQTNVFPRPTQPFVNSRGSVRGCTRGGRLITNSYRSPGGYKGFDTYRGLPSISNGNYSQLQFQAREYSGAPYSQRDNFQQCYKRGGTSGGPRANSRANCFIMRNSLLLIKQQGGVILLR

SEQ ID NO: 13433 - protein, 794 aa, Homo sapiens
MLIQSEKKTQLSKTESVKESESLMEFAQPEIQPQEFLNRRYMTEVDYSNKQGEEQPWEADYARKPNLPKRWDMLTEPDGQEKKQESFKSWEASGKHQEVSKPAVSLEQRKQDTSKLRSTLPEEQKKQEISKSKPSPSQWKQDTPKSKAGYVQEEQKKQETPKLWPVQLQKEQDPKKQTPKSWTPSMQSEQNTTKSWTTPMCEEQDSKQPETPKSWENNVESQKHSLTSQSQISPKSWGVATASLIPNDQLLPRKLNTEPKDVPKPVHQPVGSSSTLPKDPVLRKEKLQDLMTQIQGTCNFMQESVLDFDKPSSAIPTSQPPSATPGSPVASKEQNLSSQSDFLQEPLQATSSPVTCSSNACLVTTDQASSGSETEFMTSETPEAAIPPGKQPSSLASPNPPMAKGSEQGFQSPPASSSSVTINTAPFQAMQTVFNVNAPLPPRKEQEIKESPYSPGYNQSFTTASTQTPPQCQLPSIHVEQTVHSQETAANYHPDGTIQVSNGSLAFYPAQTNVFPRPTQPFVNSRGSVRGCTRGGRLITNSYRSPGGYKGFDTYRGLPSISNGNYSQLQFQAREYSGAPYSQRDNFQQCYKRGGTSGGPRANSRAGWSDSSQVSSPERDNETFNSGDSGQGDSRSMTPVDVPVTNPAATILPVHVYPLPQQMRVAFSAARTSNLAPGTLDQPIVFDLLLNNLGETFDLQLGRFNCPVNGTYVFIFHMLKLAVNVPLYVNLMKNEEVLVSAYANDGAPDHETASNHAILQLFQGDQIWLRLHRGAIYGSSWKYSTFSGYLLYQD

SEQ ID NO: 13434 - protein, 278 aa, Homo sapiens
MEVQVSQASLGFELTSVEKSLREWSRLSREVIAWLCPSSPNFILNFPPPPSASSVSMVQLFSSPFGYQSPSGHSEEEREGNMKSAKPQVNHSQHGESQRALSPLQSTLSSAASPSQAYETYIENGLICLKHKIRNIEKKKLKLEDYKDRLKSGEHLNPDQLEAVEKYEEVLHNLEFAKELQKTFSGLSLDLLKAQKKAQRREHMLKLEAEKKKLRTILQVQYVLQNLTQEHVQKDFKGGLNGAVYLPSKELDYLIKFSKLTCPERNESLRQTLEGSTV

SEQ ID NO: 13435 - protein, 596 aa, Homo sapiens
MEVQVSQASLGFELTSVEKSLREWSRLSREVIAWLCPSSPNFILNFPPPPSASSVSMVQLFSSPFGYQSPSGHSEEEREGNMKSAKPQVNHSQHGESQRALSPLQSTLSSAASPSQAYETYIENGLICLKHKIRNIEKKKLKLEDYKDRLKSGEHLNPDQLEAVEKYEEVLHNLEFAKELQKTFSGLSLDLLKAQKKAQRREHMLKLEAEKKKLRTILQVQYVLQNLTQEHVQKDFKGGLNGAVYLPSKELDYLIKFSKLTCPERNESLSVEDQMEQSSLYFWDLLEGSEKAVVGTTYKHLKDLLSKLLNSGYFESIPVPKNAKEKEVPLEEEMLIQSEKKTQLSKTESVKESESLMEFAQPEIQPQEFLNRRYMTEVDYSNKQGEEQPWEADYARKPNLPKRWDMLTEPDGQEKKQESFKSWEASGKHQEVSKPAVSLEQRKQDTSKLRSTLPEEQKKQEISKSKPSPSQWKQDTPKSKAGYVQEEQKKQETPKLWPVQLQKEQDPKKQTPKSWTPSMQSEQNTTKSWTTPMCEEQDSKQPETPKSWENNVESQKHSLTSQSQISPKSWGVATASLIPNDQLLPRKLNTEPKDVS

SEQ ID NO: 13436 - protein, 940 aa, Homo sapiens
MEVQVSQASLGFELTSVEKSLREWSRLSREVIAWLCPSSPNFILNFPPPPSASSVSMVQLFSSPFGYQSPSGHSEEEREGNMKSAKPQVNHSQHGESQRALSPLQSTLSSAASPSQAYETYIENGLICLKHKIRNIEKKKLKLEDYKDRLKSGEHLNPDQLEAVEKYEEVLHNLEFAKELQKTFSGLSLDLLKAQKKAQRREHMLKLEAEKKKLRTILQVQYVLQNLTQEHVQKDFKGGLNGAVYLPSKELDYLIKFSKLTCPERNESLSVEDQMEQSSLYFWDLLEGSEKAVVGTTYKHLKDLLSKLLNSGYFESIPVPKNAKEKEVPLEEEMLIQSEKKTQLSKTESVKESESLMEFAQPEIQPQEFLNRRYMTEVDYSNKQGEEQPWEADYARKPNLPKRWDMLTEPDGQEKKQESFKSWEASGKHQEVSKPAVSLEQRKQDTSKLRSTLPEEQKKQEISKSKPSPSQWKQDTPKSKAGYVQEEQKKQETPKLWPVQLQKEQDPKKQTPKSWTPSMQSEQNTTKSWTTPMCEEQDSKQPETPKSWENNVESQKHSLTSQSQISPKSWGVATASLIPNDQLLPRKLNTEPKDVPKPVHQPVGSSSTLPKDPVLRKEKLQDLMTQIQGTCNFMQESVLDFDKPSSAIPTSQPPSATPGSPVASKEQNLSSQSDFLQEPLQATSSPVTCSSNACLVTTDQASSGSETEFMTSETPEAAIPPGKQPSSLASPNPPMAKGSEQGFQSPPASSSSVTINTAPFQAMQTVFNVNAPLPPRKEQEIKESPYSPGYNQSFTTASTQTPPQCQLPSIHVEQTVHSQETAQTNVFPRPTQPFVNSRGSVRGCTRGGRLITNSYRSPGGYKGFDTYRGLPSISNGNYSQLQFQAREYSGAPYSQRDNFQQCYKRGGTSGGPRANSRANCFIMRNSLLLIKQQGGVILLR

SEQ ID NO: 13437 - protein, 1126 aa, Homo sapiens
MEVQVSQASLGFELTSVEKSLREWSRLSREVIAWLCPSSPNFILNFPPPPSASSVSMVQLFSSPFGYQSPSGHSEEEREGNMKSAKPQVNHSQHGESQRALSPLQSTLSSAASPSQAYETYIENGLICLKHKIRNIEKKKLKLEDYKDRLKSGEHLNPDQLEAVEKYEEVLHNLEFAKELQKTFSGLSLDLLKAQKKAQRREHMLKLEAEKKKLRTILQVQYVLQNLTQEHVQKDFKGGLNGAVYLPSKELDYLIKFSKLTCPERNESLSVEDQMEQSSLYFWDLLEGSEKAVVGTTYKHLKDLLSKLLNSGYFESIPVPKNAKEKEVPLEEEMLIQSEKKTQLSKTESVKESESLMEFAQPEIQPQEFLNRRYMTEVDYSNKQGEEQPWEADYARKPNLPKRWDMLTEPDGQEKKQESFKSWEASGKHQEVSKPAVSLEQRKQDTSKLRSTLPEEQKKQEISKSKPSPSQWKQDTPKSKAGYVQEEQKKQETPKLWPVQLQKEQDPKKQTPKSWTPSMQSEQNTTKSWTTPMCEEQDSKQPETPKSWENNVESQKHSLTSQSQISPKSWGVATASLIPNDQLLPRKLNTEPKDVPKPVHQPVGSSSTLPKDPVLRKEKLQDLMTQIQGTCNFMQESVLDFDKPSSAIPTSQPPSATPGSPVASKEQNLSSQSDFLQEPLQATSSPVTCSSNACLVTTDQASSGSETEFMTSETPEAAIPPGKQPSSLASPNPPMAKGSEQGFQSPPASSSSVTINTAPFQAMQTVFNVNAPLPPRKEQEIKESPYSPGYNQSFTTASTQTPPQCQLPSIHVEQTVHSQETANYHPDGTIQVSNGSLAFYPAQTNVFPRPTQPFVNSRGSVRGCTRGGRLITNSYRSPGGYKGFDTYRGLPSISNGNYSQLQFQAREYSGAPYSQRDNFQQCYKRGGTSGGPRANSRAGWSDSSQVSSPERDNETFNSGDSGQGDSRSMTPVDVPVTNPAATILPVHVYPLPQQMRVAFSAARTSNLAPGTLDQPIVFDLLLNNLGETFDLQLGRFNCPVNGTYVFIFHMLKLAVNVPLYVNLMKNEEVLVSAYANDGAPDHETASNHAILQLFQGDQIWLRLHRGAIYGSSWKYSTFSGYLLYQD

SEQ ID NO: 13438 - protein, 905 aa, Homo sapiens
MEVQVSQASLGFELTSVEKSLREWSRLSREVIAWLCPSSPNFILNFPPPPSASSVSMVQLFSSPFGYQSPSGHSEEEREGNMKSAKPQVNHSQHGESQRALSPLQSTLSSAASPSQAYETYIENGLICLKHKIRNIEKKKLKLEDYKDRLKSGEHLNPDQLEAVEKYEEVLHNLEFAKELQKTFSGLSLDLLKAQKKAQRREHMLKLEAEKKKLRTILQVQYVLQNLTQEHVQKDFKGGLNGAVYLPSKELDYLIKFSKLTCPERNESLSVEDQMEQSSLYFWDLLEGSEKAVVGTTYKHLKDLLSKLLNSGYFESIPVPKNAKEKEVPLEEEMLIQSEKKTQLSKTESVKESESLMEFAQPEIQPQEFLNRRYMTEVDYSNKQGEEQPWEADYARKPNLPKRWDMLTEPDGQEKKQESFKSWEASGKHQEVSKPAVSLEQRKQDTSKLRSTLPEEQKKQEISKSKPSPSQWKQDTPKSKAGYVQEEQKKQETPKLWPVQLQKEQDPKKQTPKSWTPSMQSEQNTTKSWTTPMCEEQDSKQPETPKSWENNVESQKHSLTSQSQISPKSWGVATASLIPNDQLLPRKLNTEPKDVPKPVHQPVGSSSTLPKDPVLRKEKLQDLMTQIQGTCNFMQESVLDFDKPSSAIPTSQPPSATPGSPVASKEQNLSSQSDFLQEPLQAAIPPGKQPSSLASPNPPMAKGSEQGFQSPPASSSSVTINTAPFQAMQTVFNVNAPLPPRKEQEIKESPYSPGYNQSFTTASTQTPPQCQLPSIHVEQTVHSQETAQTNVFPRPTQPFVNSRGSVRGCTRGGRLITNSYRSPGGYKGFDTYRGLPSISNGNYSQLQFQAREYSGAPYSQRDNFQQCYKRGGTSGGPRANSRANCFIMRNSLLLIKQQGGVILLR

SEQ ID NO: 13439 - protein, 758 aa, Homo sapiens
MSEVLPADSGVDTLAVFMASSGTTDVTNRNSPATPPNTLNLRSSHNELLNAEIKHTETKNSTPPKCRKKYALTNIQAAMGLSDPAAQPLLGNGSANIKLVKNGENQLRKAAEQGQQDPNKNLSPTAVINITSEKLEGKEPHPQDSSSCEILPSQPRRTKSFLNYYADLETSARELEQNRGNHHGTAEEKSQPVQGQASTIIGNGDLLLQKPNRPQSSPEDGQVATVSSSPETKKDHPKTGAKTDCALHRIQNLAPSDEESSWTTLSQDSASPSSPDETDIWSDHSFQTDPDLPPGWKRVSDIAGTYYWHIPTGTTQWERPVSIPADLQGSRKGSLSSVTPSPTPENEKQPWSDFAVLNGGKINSDIWKDLHAATVNPDPSLKEFEGATLRYASLKLRNAPHPDDDDSCSINSDPEAKCFAVRSLGWVEMAEEDLAPGKSSVAVNNCIRQLSYCKNDIRDTVGIWGEGKDMYLILENDMLSLVDPMDRSVLHSQPIVSIRVWGVGRDNGRDFAYVARDKDTRILKCHVFRCDTPAKAIATSLHEICSKIMAERKNAKALACSSLQERANVNLDVPLQVDFPTPKTELVQKFHVQYLGMLPVDKPVGMDILNSAIENLMTSSNKEDWLSVNMNVADATVTVISEKNEEEVLVECRVRFLSFMGVGKDVHTFAFIMDTGNQRFECHVFWCEPNAGNVSEAVQAACMLRYQKCLVARPPSQKVRPPPPPADSVTRRVTTNVKRGVLSLIDTLKQKRPVTEMP

SEQ ID NO: 13440 - protein, 736 aa, Homo sapiens
MSEVLPADSGVDTLAVFMASSGTTDVTNRNSPATPPNTLNLRSSHNELLNAEIKHTETKNSTPPKCRKKYALTNIQAAMGLSDPAAQPLLGNGSANIKLVKNGENQLRKAAEQGQQDPNKNLSPTAVINITSEKLEGKEPHPQDSSSCEILPSQPRRTKSFLNYYADLETSARELEQNRGNHHGTAEEKSQPVQGQASTIIGNGDLLLQKPNRPQSSPEDGQVATVSSSPETKKDHPKTGAKTDCALHRIQNLAPSDEESSWTTLSQDSASPSSPDETDIWSDHSFQTDPDLPPGWKRVSDIAGTYYWHIPTGTTQWERPVSIPADLQGSRKGSLSSVTPSPTPENEDLHAATVNPDPSLKEFEGATLRYASLKLRNAPHPDDDDSCSINSDPEAKCFAVRSLGWVEMAEEDLAPGKSSVAVNNCIRQLSYCKNDIRDTVGIWGEGKDMYLILENDMLSLVDPMDRSVLHSQPIVSIRVWGVGRDNGRDFAYVARDKDTRILKCHVFRCDTPAKAIATSLHEICSKIMAERKNAKALACSSLQERANVNLDVPLQDFPTPKTELVQKFHVQYLGMLPVDKPVGMDILNSAIENLMTSSNKEDWLSVNMNVADATVTVISEKNEEEVLVECRVRFLSFMGVGKDVHTFAFIMDTGNQRFECHVFWCEPNAGNVSEAVQAACMLRYQKCLVARPPSQKVRPPPPPADSVTRRVTTNVKRGVLSLIDTLKQKRPVTEMP

SEQ ID NO: 13441 - protein, 210 aa, Homo sapiens
MAERKNAKALACSSLQERANVNLDVPLQVDFPTPKTELVQKFHVQYLGMLPVDKPVGMDILNSAIENLMTSSNKEDWLSVNMNVADATVTVISEKNEEEVLVECRVRFLSFMGVGKDVHTFAFIMDTGNQRFECHVFWCEPNAGNVSEAVQAACMLRYQKCLVARPPSQKVRPPPPPADSVTRRVTTNVKRGVLSLIDTLKQKRPVTEMP

SEQ ID NO: 13442 - protein, 759 aa, Homo sapiens
MSEVLPADSGVDTLAVFMASSGTTDVTNRNSPATPPNTLNLRSSHNELLNAEIKHTETKNSTPPKCRKKYALTNIQAAMGLSDPAAQPLLGNGSANIKLVKNGENQLRKAAEQGQQDPNKNLSPTAVINITSEKLEGKEPHPQDSSSCEILPSQPRRTKSFLNYYADLETSARELEQNRGNHHGTAEEKSQPVQGQASTIIGNGDLLLQKPNRPQSSPEDGQVATVSSSPETKKDHPKTGAKTDCALHRIQNLAPSDEESSWTTLSQDSASPSSPDETADIWSDHSFQTDPDLPPGWKRVSDIAGTYYWHIPTGTTQWERPVSIPADLQGSRKGSLSSVTPSPTPENEKQPWSDFAVLNGGKINSDIWKDLHAATVNPDPSLKEFEGATLRYASLKLRNAPHPDDDDSCSINSDPEAKCFAVRSLGWVEMAEEDLAPGKSSVAVNNCIRQLSYCKNDIRDTVGIWGEGKDMYLILENDMLSLVDPMDRSVLHSQPIVSIRVWGVGRDNGRDFAYVARDKDTRILKCHVFRCDTPAKAIATSLHEICSKIMAERKNAKALACSSLQERANVNLDVPLQVDFPTPKTELVQKFHVQYLGMLPVDKPVGMDILNSAIENLMTSSNKEDWLSVNMNVADATVTVISEKNEEEVLVECRVRFLSFMGVGKDVHTFAFIMDTGNQRFECHVFWCEPNAGNVSEAVQAACMLRYQKCLVARPPSQKVRPPPPPADSVTRRVTTNVKRGVLSLIDTLKQKRPVTEMP

SEQ ID NO: 13443 - protein, 1759 aa, Homo sapiens
MDLGTAEGTRCTDPPAGKPAMAPKRKGGLKLNAICAKLSRQVVVEKRADAGSHTEGSPSQPRDQERSGPESGAARAPRSEEDKRRAVIEKWVNGEYSEEPAPTPVLGRIAREGLELPPEGVYMVQPQGCSDEEDHAEEPSKDGGALEEKDSDGAASKEDSGPSTRQASGEASSLRDYAASTMTEFLGMFGYDDQNTRDELARKISFEKLHAGSTPEAATSSMLPTSEDTLSKRARFSKYEEYIRKLKAGEQLSWPAPSTKTEERVGKEVVGTLPGLRLPSSTAHLETKATILPLPSHSSVQMQNLVARASKYDFFIQKLKTGENLRPQNGSTYKKPSKYDLENVKYLHLFKPGEGSPDMGGAIAFKTGKVGRPSKYDVRGIQKPGPAKVPPTPSLAPAPLASVPSAPSAPGPGPEPPASLSFNTPEYLKSTFSKTDSITTGTVSTVKNGLPTDKPAVTEDVNIYQKYIARFSGSQHCGHIHCAYQYREHYHCLDPECNYQRFTSKQDVIRHYNMHKKRDNSLQHGFMRFSPLDDCSVYYHGCHLNGKSTHYHCMQVGCNKVYTSTSDVMTHENFHKKNTQLINDGFQRFRATEDCGTADCQFYGQKTTHFHCRRPGCTFTFKNKCDIEKHKSYHIKDDAYAKDGFKKFYKYEECKYEGCVYSKATNHFHCIRAGCGFTFTSTSQMTSHKRKHERRHIRSSGALGLPPSLLGAKDTEHEESSNDDLVDFSALSSKNSSLSASPTSQQSSASLAAATAATEAGPSATKPPNSKISGLLPQGLPGSIPLALALSNSGLPTPTPYFPILAGRGSTSLPVGTPSLLGAVSSGSAASATPDTPTLVASGAGDSAPVAAASVPAPPASIMERISASKGLISPMMARLAAAALKPSATFDPGSGQQVTPARFPPAQVKPEPGESTGAPGPHEASQDRSLDLTVKEPSNESNGHAVPANSSLLSSLMNKMSQGNPGLGSLLNIKAEAEGSPAAEPSPFLGKAVKALVQEKLAEPWKVYLRRFGTKDFCDGQCDFLHKAHFHCVVEECGALFSTLDGAIKHANFHFRTEGGAAKGNTEAAFPASAAETKPPMAPSSPPVPPVTTATVSSLEGPAPSPASVPSTPTLLAWKQLASTIPQMPQIPASVPHLPASPLATTSLENAKPQVKPGFLQFQENDPCLATDCKYANKFHFHCLFGNCKYVCKTSGKAESHCLDHINPNNNLVNVRDQFAYYSLQCLCPNQHCEFRMRGHYHCLRTGCYFVTNITTKLPWHIKKHEKAERRAANGFKYFTKREECGRLGCKYNQVNSHFHCIREGCQFSFLLKHQMTSHARKHMRRMLGKNFDRVPPSQGPPGLMDAETDECMDYTGCSPGAMSSESSTMDRSCSSTPVGNESTAAGNTISMPTASGAKKRFWIIEDMSPFGKRRKTASSRKMLDEGMMLEGFRRFDLYEDCKDAACQFSLKVTHYHCTRENCGYKFCGRTHMYKHAQHHDRVDNLVLDDFKRFKASLSCHFADCPFSGTSTHFHCLRCRFRCTDSTKVTAHRKHHGKQDVISAAGFCQFSSSADCAVPDCKYKLKCSHFHCTFPGCRHTVVGMSQMDSHKRKHEKQERGEPAAEGPAPGPPISLDGSLSLGAEPGSLLFLQSAAAGLGLALGDAGDPGPPDAAAPGPREGAAAAAAAAGESSQEDEEEELELPEEEAEDDEDEDDDEDDDDEDDDEDDDDEDLRTDSEESLPEAAAEAAGAGARTPALAALAALGAPGPAPTAASSP

SEQ ID NO: 13444 - protein, 1166 aa, Homo sapiens
MDLGTAEGTRCTDPPAGKPAMAPKRKGGLKLNAICAKLSRQVVVEKRADAGSHTEGSPSQPRDQERSGPESGAARAPRSEEDKRRAVIEKWVNGEYSEEPAPTPVLGRIAREGLELPPEGVYMVQPQGCSDEEDHAEEPSKDGGALEEKDSDGAASKEDSGPSTRQASGEASSLRDYAASTMTEFLGMFGYDDQNTRDELARKISFEKLHAGSTPEAATSSMLPTSEDTLSKRARFSKYEEYIRKLKAGEQLSWPAPSTKTEERVGKEVVGTLPGLRLPSSTAHLETKATILPLPSHSSVQMQNLVARASKYDFFIQKLKTGENLRPQNGSTYKKPSKYDLENVKYLHLFKPGEGSPDMGGAIAFKTGKVGRPSKYDVRGIQKPGPAKVPPTPSLAPAPLASVPSAPSAPGPGPEPPASLSFNTPEYLKSTFSKTDSITTGTVSTVKNGLPTDKPAVTEDVNIYQKYIARFSGSQHCGHIHCAYQYREHYHCLDPECNYQRFTSKQDVIRHYNMHKKRDNSLQHGFMRFSPLDDCSVYYHGCHLNGKSTHYHCMQVGCNKVYTSTSDVMTHENFHKKNTQLINDGFQRFRATEDCGTADCQFYGQKTTHFHCRRPGCTFTFKNKCDIEKHKSYHIKDDAYAKDGFKKFYKYEECKYEGCVYSKATNHFHCIRAGCGFTFTSTSQMTSHKRKHERRHIRSSGALGLPPSLLGAKDTEHEESSNDDLVDFSALSSKNSSLSASPTSQQSSASLAAATAATEAGPSATKPPNSKISGLLPQGLPGSIPLALALSNSGLPTPTPYFPILAGRGSTSLPVGTPSLLGAVSSGSAASATPDTPTLVASGAGDSAPVAAASVPAPPASIMERISASKGLISPMMARLAAAALKPSATFDPGSGQQVTPARFPPAQVKPEPGESTGAPGPHEASQDRSLDLTVKEPSNESNGHAVPANSSLLSSLMNKMSQGNPGLGSLLNIKAEAEGSPAAEPSPFLGKAVKALVQEKLAEPWKVYLRRFGTKDFCDGQCDFLHKAHFHCVVEECGALFSTLDGAIKHANFHFRTEGGAAKGNTEAAFPASAAETKPPMAPSSPPVPPVTTATVSSLEGPAPSPASVPSTPTLLAWKQLASTIPQMPQIPASVPHLPASPLATTSLENAKPQVKPGFLQFQEK

SEQ ID NO: 13445 - protein, 373 aa, Homo sapiens
MAQESPKNSAAEIPVTSNGEVDDSREHSFNRDLKHSLPSGLGLSETQITSHGFDNTKEGVIEAGAFQGSPAPPLPSVMSPSRVAASRLAQQGSDLIVPAGGQRTQTKSGPVILADEIKNPAMEKLELVRKWSLNTYKCTRQIISEKLGRGSRTVDLELEAQIDILRDNKKKYENILKLAQTLSTQLFQMVHTQRQLGDAFADLSLKSLELHEEFGYNADTQKLLAKNGETLLGAINFFIASVNTLVNKTIEDTLMTVKQYESARIEYDAYRTDLEELNLGPRDANTLPKIEQSQHLFQAHKEKYDKMRNDVSVKLKFLEENKVKVLHNQLVLFHNAIAAYFAGNQKQLEQTLKQFHIKLKTPGVDAPSWLEEQ

SEQ ID NO: 13446 - protein, 341 aa, Homo sapiens
MAQESPKNSAAEIPVTSNGEVDDSREHSFNRDLKHSLPSGLGLSETQITSHGFDNTKEGVIEAGAFQGGQRTQTKSGPVILADEIKNPAMEKLELVRKWSLNTYKCTRQIISEKLGRGSRTVDLELEAQIDILRDNKKKYENILKLAQTLSTQLFQMVHTQRQLGDAFADLSLKSLELHEEFGYNADTQKLLAKNGETLLGAINFFIASVNTLVNKTIEDTLMTVKQYESARIEYDAYRTDLEELNLGPRDANTLPKIEQSQHLFQAHKEKYDKMRNDVSVKLKFLEENKVKVLHNQLVLFHNAIAAYFAGNQKQLEQTLKQFHIKLKTPGVDAPSWLEEQ

SEQ ID NO: 13447 - protein, 193 aa, Homo sapiens
MAQESPKNSAAEIPVTSNGEVDDSREHSFNREEFGYNADTQKLLAKNGETLLGAINFFIASVNTLVNKTIEDTLMTVKQYESARIEYDAYRTDLEELNLGPRDANTLPKIEQSQHLFQAHKEKYDKMRNDVSVKLKFLEENKVKVLHNQLVLFHNAIAAYFAGNQKQLEQTLKQFHIKLKTPGVDAPSWLEEQ

SEQ ID NO: 13448 - protein, 341 aa, Homo sapiens
MTDGILGKAATMEIPIHGNGEARQLPEDDGLEQDLQQVMVSGPNLNETSIVSGGYGGSGDGLIPTGSGRHPSHSTTPSGPGDEVARGIAGEKFDIVKKWGINTYKCTKQLLSERFGRGSRTVDLELELQIELLRETKRKYESVLQLGRALTAHLYSLLQTQHALGDAFADLSQKSPELQEEFGYNAETQKLLCKNGETLLGAVNFFVSSINTLVTKTMEDTLMTVKQYEAARLEYDAYRTDLEELSLGPRDAGTRGRLESAQATFQAHRDKYEKLRGDVAIKLKFLEENKIKVMHKQLLLFHNAVSAYFAGNQKQLEQTLQQFNIKLRPPGAEKPSWLEEQ

SEQ ID NO: 13449 - protein, 256 aa, Homo sapiens
MKPALCLVAMGALVMDSSPQCTKQLLSERFGRGSRTVDLELELQIELLRETKRKYESVLQLGRALTAHLYSLLQTQHALGDAFADLSQKSPELQEEFGYNAETQKLLCKNGETLLGAVNFFVSSINTLVTKTMEDTLMTVKQYEAARLEYDAYRTDLEELSLGPRDAGTRGRLESAQATFQAHRDKYEKLRGDVAIKLKFLEENKIKVMHKQLLLFHNAVSAYFAGNQKQLEQTLQQFNIKLRPPGAEKPSWLEEQ

SEQ ID NO: 13450 - protein, 303 aa, Homo sapiens
MVSGPNLNETSIVSGGYGGSGDGLIPTGSGRHPSHSTTPSGPGDEVARGIAGEKFDIVKKWGINTYKCTKQLLSERFGRGSRTVDLELELQIELLRETKRKYESVLQLGRALTAHLYSLLQTQHALGDAFADLSQKSPELQEEFGYNAETQKLLCKNGETLLGAVNFFVSSINTLVTKTMEDTLMTVKQYEAARLEYDAYRTDLEELSLGPRDAGTRGRLESAQATFQAHRDKYEKLRGDVAIKLKFLEENKIKVMHKQLLLFHNAVSAYFAGNQKQLEQTLQQFNIKLRPPGAEKPSWLEEQ

SEQ ID NO: 13451 - protein, 162 aa, Homo sapiens
MGSHPTPGLQRTTSAGYRLPPTRPPASVSPAARGGPMASRGLAGGCQAPQALKAQRVAQGAACDGVQQDQLWRELLEAERRGQQRWIQNWSFLKDYDPMGNKKEPEKLPDHVPLFSDTVPSSTNQVVGSRLDTPLGQTLIRMDFFFTEGARKKKLEDQMQPI

SEQ ID NO: 13452 - protein, 108 aa, Homo sapiens
MSEAKDNGSRDEVLVPHKNCRKNTTVPGKKGEEKSLAPVFAEKLISPSRRGAKLKDRESHQENEDRNSELDQDEEDKESFCRGFPMSGCELETSCCVCHSTALGERFC

SEQ ID NO: 13453 - protein, 287 aa, Homo sapiens
MEEKEDKHQQHKIEDAAITYVSENEEIKHEEKPGKSIHHSKSHVGRGRIYYAKFINTNARTYNEPFPYIDPKKGPEIQGDWWSHGKALEPVFLPPYDSKSTQRSDFQKPSCPLVLPVKHSKMQKPSCGIVPLASPGTSAELQNNFIEYISFIHQYDARKTPNEPLQGKRHGAFVQREIKPGSRPTVPKGAEVLLNTPGSRSSEQSKKTEKGNSAESRMISPGLCQQNSQELLEPKTHLSETDVRQAAKACPSTPESREKTSGATQTTVGDALFTRHKPLNPPIKKSE

SEQ ID NO: 13454 - protein, 166 aa, Homo sapiens
MQKPSCGIVPLASPGTSAELQNNFIEYISFIHQYDARKTPNEPLQGKRHGAFVQREIKPGSRPTVPKGAEVLLNTPGSRSSEQSKKTEKGNSAESRMISPGLCQQNSQELLEPKTHLSETDVRQAAKACPSTPESREKTSGATQTTVGDALFTRHKPLNPPIKKSE

SEQ ID NO: 13455 - protein, 194 aa, Homo sapiens
MSLLAKPMSFETTAITFFIILLICLICILLLLVVFLYKCFQGRKGKETKKVPCTDANGGVDCAAAKVVTSNPEDHERILMQVMNLNVPMRPGILVQRQSKEVLATPLENRRDMEAEEENQINEKQEPENAGETGQEEDDGLQKIHTSVTRTPSVVESQKRPLKGVTFSREVIVVDLGNEYPTPRSYTREHKERK

SEQ ID NO: 13456 - protein, 871 aa, Homo sapiens
MDGESEVDFSSNSITPLWRRRSIPQPHQVLGRSKPRPQSYQSPNGLLITDFPVEDGGTLLAAQIPAQVPTASDSRTVHRSPLLLGAQRRAVANGGTASPEYRAASPRLRRPKSPKLPKAVPGGSPKSPANGAVTLPAPPPPPVLRPPRTPNAPAPCTPEEDLTGLTASPVPSPTANGLAANNDSPGSGSQSGRKAKDPERGLFPGPQKSSSEQKLPLQRLPSQENELLENPSVVLSTNSPAALKVGKQQIIPKSLASEIKISKSNNQNVEPHKRLLKVRSMVEGLGGPLGHAGEESEVDNDVDSPGSLRRGLRSTSYRRAVVSGFDFDSPTSSKKKNRMSQPVLKVVMEDKEKFSSLGRIKKKMLKGQGTFDGEENAVLYQNYKEKALDIDSDEESEPKEQKSDEKIVIHHKPLRSTWSQLSAVKRKGLSQTVSQEERKRQEAIFEVISSEHSYLLSLEILIRMFKNSKELSDTMTKTERHHLFSNITDVCEASKKFFIELEARHQNNIFIDDISDIVEKHTASTFDPYVKYCTNEVYQQRTLQKLLATNPSFKEVLSRIESHEDCRNLPMISFLILPMQRVTRLPLLMDTICQKTPKDSPKYEVCKRALKEVSKLVRLCNEGARKMERTEMMYTINSQLEFKIKPFPLVSSSRWLVKRGELTAYVEDTVLFSRRTSKQQVYFFLFNDVLIITKKKSEESYNVNDYSLRDQLLVESCDNEELNSSPGKNSSTMLYSRQSSASHLFTLTVLSNHANEKVEMLLGAETQSERARWITALGHSSGKPPADRTSLTQVEIVRSFTAKQPDELSLQVADVVLIYQRVSDGWYEGERLRDGERGWFPMECAKEITCQATIDKNVERMGRLLGLETNV

SEQ ID NO: 13457 - protein, 446 aa, Homo sapiens
MDGESEVDFSSNSITPLWRRRSIPQPHQVLGRSKPRPQSYQSPNGLLITDFPVEDGGTLLAAQIPAQVPTASDSRTVHRSPLLLGAQRRAVANGGTASPEYRAASPRLRRPKSPKLPKAVPGGSPKSPANGAVTLPAPPPPPVLRPPRTPNAPAPCTPEEDLTGLTASPVPSPTANGLAANNDSPGSGSQSGRKAKDPERGLFPGPQKSSSEQKLPLQRLPSQENELLENPSVVLSTNSPAALKVGKQQIIPKSLASEIKISKSNNQNVEPHKRLLKVRSMVEGLGGPLGHAGEESEVDNDVDSPGSLRRGLRSTSYRRAVVSGFDFDSPTSSKKKNRMSQPVLKVVMEDKEKFSSLGRIKKKMLKGQGTFDGEENAVLYQNYKEKALDIDSDEESEPKEQKSDEKIVIHHKPLRSTWSQLSAVKRKVILIVGFMEMKDGRLRGGK

SEQ ID NO: 13458 - protein, 791 aa, Homo sapiens
MDGESEVDFSSNSITPLWRRRSIPQPHQVLGRSKPRPQSYQSPNGLLITDFPVEDGGTLLAAQIPAQVPTASDSRTVHRSPLLLGAQRRAVANGGTASPEYRAASPRLRRPKSPKLPKAVPGGSPKSPANGAVTLPAPPPPPVLRPPRTPNAPAPCTPEEDLTGLTASPVPSPTANGLAANNDSPGSGSQSGRKAKDPERGLFPGPQKSSSEQKLPLQRLPSQENELLENPSVVLSTNSPAALKVGKQQIIPKSLASEIKISKSNNQNVEPHKRLLKVRSMVEGLGGPLGHAGEESEVDNDVDSPGSLRRGLRSTSYRRAVVSGFDFDSPTSSKKKNRMSQPVLKVVMEDKEKFSSLGRIKKKMLKGQGTFDGEENAVLYQNYKEKALDIDSDEESEPKEQKSDEKIVIHHKPLRSTWSQLSAVKRKGLSQTVSQEERKRQEAIFEVISSEHSYLLSLEILIRMFKNSKELSDTMTKTERHHLFSNITDVCEASKKFFIELEARHQNNIFIDDISDIVEKHTASTFDPYVKYCTNEVYQQRTLQKLLATNPSFKEVLSRIESHEDCRNLPMISFLILPMQRVTRLPLLMDTICQKTPKDSPKYEVCKRALKEVSKLVRLCNEGARKMERTEMMYTINSQLEFKIKPFPLVSSSRWLVKRGELTAYVEDTVLFSRRTSKQQVYFFLFNDVLIITKKKSEESYNVNDYSLRDQLLVESCDNEELNSSPGKNSSTMLYSRQSSASHLFTLTVLSNHANEKVEMLLGAETQSERARWITALGHSSGKPPADRTCG

SEQ ID NO: 13459 - protein, 442 aa, Homo sapiens
MASVVLPSGSQCAAAAAAAAPPGLRLRLLLLLFSAAALIPTGDGQNLFTKDVTVIEGEVATISCQVNKSDDSVIQLLNPNRQTIYFRDFRPLKDSRFQLLNFSSSELKVSLTNVSISDEGRYFCQLYTDPPQESYTTITVLVPPRNLMIDIQKDTAVEGEEIEVNCTAMASKPATTIRWFKGNTELKGKSEVEEWSDMYTVTSQLMLKVHKEDDGVPVICQVEHPAVTGNLQTQRYLEVQYKPQVHIQMTYPLQGLTREGDALELTCEAIGKPQPVMVTWVRVDDEMPQHAVLSGPNLFINNLNKTDNGTYRCEASNIVGKAHSDYMLYVYDPPTTIPPPTTTTTTTTTTTTTILTIITDSRAGEEGSIRAVDHAVIGGVVAVVVFAMLCLLIILGRYFARHKGTYFTHEAKGADDAADADTAIINAEGGQNNSEEKKEYFI

SEQ ID NO: 13460 - protein, 333 aa, Homo sapiens
MASVVLPSGSQCAAAAAAAAPPGLRLRLLLLLFSAAALIPTGDGQNLFTKDVTVIEGEVATISCQVNKSDDSVIQLLNPNRQTIYFRDFRPLKDSRFQLLNFSSSELKVSLTNVSISDEGRYFCQLYTDPPQESYTTITVLVPPRNLMIDIQKDTAVEGEEIEVNCTAMASKPATTIRWFKGNTELKGKSEVEEWSDMYTVTSQLMLKVHKEDDGVPVICQVEHPAVTGNLQTQRYLEVQYKPQVHIQMTYPLQGLTREGDALELTCEAIGKPQPVMVTWVRVDDEMPQHAVLSGPNLFINNLNKTDNGTYRCEASNIVGKAHSDYMLYVYGT

SEQ ID NO: 13461 - protein, 471 aa, Homo sapiens
MASVVLPSGSQCAAAAAAAAPPGLRLRLLLLLFSAAALIPTGDGQNLFTKDVTVIEGEVATISCQVNKSDDSVIQLLNPNRQTIYFRDFRPLKDSRFQLLNFSSSELKVSLTNVSISDEGRYFCQLYTDPPQESYTTITVLVPPRNLMIDIQKDTAVEGEEIEVNCTAMASKPATTIRWFKGNTELKGKSEVEEWSDMYTVTSQLMLKVHKEDDGVPVICQVEHPAVTGNLQTQRYLEVQYKPQVHIQMTYPLQGLTREGDALELTCEAIGKPQPVMVTWVRVDDEMPQHAVLSGPNLFINNLNKTDNGTYRCEASNIVGKAHSDYMLYVYDPPTTIPPPTTTTTTTTTTTTTILTIITDTTATTEPAVHGLTQLPNSAEELDSEDLSDSRAGEEGSIRAVDHAVIGGVVAVVVFAMLCLLIILGRYFARHKGTYFTHEAKGADDAADADTAIINAEGGQNNSEEKKEYFI

SEQ ID NO: 13462 - protein, 453 aa, Homo sapiens
MASVVLPSGSQCAAAAAAAAPPGLRLRLLLLLFSAAALIPTGDGQNLFTKDVTVIEGEVATISCQVNKSDDSVIQLLNPNRQTIYFRDFRPLKDSRFQLLNFSSSELKVSLTNVSISDEGRYFCQLYTDPPQESYTTITVLVPPRNLMIDIQKDTAVEGEEIEVNCTAMASKPATTIRWFKGNTELKGKSEVEEWSDMYTVTSQLMLKVHKEDDGVPVICQVEHPAVTGNLQTQRYLEVQYKPQVHIQMTYPLQGLTREGDALELTCEAIGKPQPVMVTWVRVDDEMPQHAVLSGPNLFINNLNKTDNGTYRCEASNIVGKAHSDYMLYVYDPPTTIPPPTTTTTTTTTTTTTILTIITDTTATTEPAVHDSRAGEEGSIRAVDHAVIGGVVAVVVFAMLCLLIILGRYFARHKGTYFTHEAKGADDAADADTAIINAEGGQNNSEEKKEYFI

SEQ ID NO: 13463 - protein, 414 aa, Homo sapiens
MASVVLPSGSQCAAAAAAAAPPGLRLRLLLLLFSAAALIPTGDGQNLFTKDVTVIEGEVATISCQVNKSDDSVIQLLNPNRQTIYFRDFRPLKDSRFQLLNFSSSELKVSLTNVSISDEGRYFCQLYTDPPQESYTTITVLVPPRNLMIDIQKDTAVEGEEIEVNCTAMASKPATTIRWFKGNTELKGKSEVEEWSDMYTVTSQLMLKVHKEDDGVPVICQVEHPAVTGNLQTQRYLEVQYKPQVHIQMTYPLQGLTREGDALELTCEAIGKPQPVMVTWVRVDDEMPQHAVLSGPNLFINNLNKTDNGTYRCEASNIVGKAHSDYMLYVYDSRAGEEGSIRAVDHAVIGGVVAVVVFAMLCLLIILGRYFARHKGTYFTHEAKGADDAADADTAIINAEGGQNNSEEKKEYFI

SEQ ID NO: 13464 - protein, 844 aa, Homo sapiens
MEKTKTKQGENEHMPVNNPSTQIYQLQALASELKTGFTEAMQELSRIQHGEYALEEKVKSCRCSMEEKVTEMKNSLNYFKEELSNAMSMIQAITSKQEEMQQKIEQLQQEKRRESRKVKAKKTQKEEHSSQAGPAQAQGSPFRSINIPEPVLPSEDFTNLLPSQAYEKAQESRSVHVGDSNVKGMMGPGVNPTTPEAEENLKSCLSADIQSKGHLPSGMWRQPKDGKEWGEEYVTKDHPDKLKEAGQGRHSSLENVLCETSLAAKRQTVALELLESERKYVINISLILKIKATFQGSDGKRNSKERSLFPGSLRYLVQQHLDLLHALQERVLKWPRQGVLGDLFLKLTNDENNFLDYYVAYLRDLPECISLVHVVVLKEGDEEIKSDIYTLFFHIVQRIPEYLIHLQNVLKFTEQEHPDYYLLLVCVQRLRVFISHYTLLFQCNEDLLIQKRKKLKKSSMAKLYKGLASQCANAGQDASPTAGPEAVRDTGIHSEELLQPYPSAPSSGPAITHLMPPVKKSQQQQSLMESMQPGKPSDWELEGRKHERPESLLAPTQFCAAEQDVKALAGPLQAIPEMDFESSPAEPLGNVERSLRAPAELLPDARGFVPAAYEEFEYGGEIFALPAPYDEEPFQAPALFENCSPASSESSLDICFLRPVSFAMEAERPEHPLQPLPKSATSPAGSSSAYKLEAAAQAHGKAKPLSRSLKEFPRAPPADGVAPRLYSTRSSSGGRAPIKAERAAQAHGPAAAAVAARGASRTFFPQQRSQSEKQTYLEVRREMHLEDTTRFCPKEERESEQTSFSDQNPRQDQKGGFRSSFRKLFKKKNGNATGEDFCGPWGWW

SEQ ID NO: 13465 - protein, 870 aa, Homo sapiens
MEKTKTKQGENEHMPVNNPSTQIYQLQALASELKTGFTEAMQELSRIQHGEYALEEKVKSCRCSMEEKVTEMKNSLNYFKEELSNAMSMIQAITSKQEEMQQKIEQLQQEKRRESRKVKAKKTQKEEHSSQAGPAQAQGSPFRSINIPEPVLPSEDFTNLLPSQAYEKAQESRSVHVGDSNVKGMMGPGVNPTTPEAEENLKSCLSADIQSKGHLPSGMWRQPKDGKEWGEEYVTKDHPDKLKEAGQGRHSSLENVLCETSLAAKRQTVALELLESERKYVINISLILKIKATFQGSDGKRNSKERSLFPGSLRYLVQQHLDLLHALQERVLKWPRQGVLGDLFLKLTNDENNFLDYYVAYLRDLPECISLVHVVVLKEGDEEIKSDIYTLFFHIVQRIPEYLIHLQNVLKFTEQEHPDYYLLLVCVQRLRVFISHYTLLFQCNEDLLIQKRKKLKKSSMAKLYKGLASQCANAGQDASPTAGPEAVRDTGIHSEELLQPYPSAPSSGPAITHLMPPVKKSQQQQSLMESMQPGKPSDWELEGRKHERPESLLAPTQFCAAEQDVKALAGPLQAIPEMDFESSPAEPLGNVERSLRAPAELLPDARGFVPAAYEEFEYGGEIFALPAPYDEEPFQAPALFENCSPASSESSLDICFLRPVSFAMEAERPEHPLQPLPKSATSPAGSSSAYKLEAAAQAHGKAKPLSRSLKEFPRAPPADGVAPRLYSTRSSSGGRAPIKAERAAQAHGPAAAAVAARGASRTFFPQQRSQSEKQTYLEVRREMHLEDTTRFCPKEERESEQTSFSDQNPRQDQKGGFRSSFRKLFKKKSSGSEYREKTNENPSMDPSPTKQDFFRNRLALANDLDQGTAV

SEQ ID NO: 13466 - protein, 1232 aa, Homo sapiens
MAEAASGAGGTSLEGERGKRPPPEGEPAAPASGVLDKLFGKRLLQAGRYLVSHKAWMKTVPTENCDVLMTFPDTTDDHTLLWLLNHIRVGIPELIVQVRHHRHTRAYAFFVTATYESLLRGADELGLRKAVKAEFGGGTRGFSCEEDFIYENVESELRFFTSQERQSIIRFWLQNLRAKQGEALHNVRFLEDQPIIPELAARGIIQQVFPVHEQRILNRLMKSWVQAVCENQPLDDICDYFGVKIAMYFAWLGFYTSAMVYPAVFGSVLYTFTEADQTSRDVSCVVFALFNVIWSTLFLEEWKRRGAELAYKWGTLDSPGEAVEEPRPQFRGVRRISPITRAEEFYYPPWKRLLFQLLVSLPLCLACLVCVFLLMLGCFQLQELVLSVKGLPRLARFLPKVMLALLVSVSAEGYKKLAIWLNDMENYRLESAYEKHLIIKVVLFQFVNSYLSLFYIGFYLKDMERLKEMLATLLITRQFLQNVREVLQPHLYRRLGRGELGLRAVWELARALLGLLSLRRPAPRRLEPQADEGGGGGSGGGGRRCLSGGCGAPEEEEEAALVERRRAGEGGEEGDGPPGGKEEDEDDEEEEDEEEEEDEEEGEEGGLLDCGLRLKKVSFAERGAGRRRPGPSPEALLEEGSPTMVEKGLEPGVFTLAEEDDEAEGAPGSPEREPPAILFRRAGGEGRDQGPDGGPDPEPGSNSDSTRRQRRQNRSSWIDPPEEEHSPQLTQAELESCMKKYEDTFQDYQEMFVQFGYVVLFSSAFPLAALCALVNNLIEIRSDAFKLCTGLQRPFGQRVESIGQWQKVMEAMGVLAIVVNCYLIGQCGQLQRLFPWLSPEAAIVSVVVLEHFALLLKYLIHVAIPDIPGWVAEEMAKLEYQRREAFKRHERQAQHRYQQQQRRRREEEERQRHAEHHARREHDSGGREEARAEGSGLDPATSSEKASAKAKGSTAGGHGPERPKRPGSLLAPNNVMKLKQIIPLQGKFLSSGATSSLAAAGAGATTRPPPAQSPTGSDTRLPAFLSFKFLKSPETRRDSERSHSPPKAFHAGKLFPFGGTRAEPGSNGAGGQARPDGTPSSGSSRVQRSGPVDEALAEELEAPRPEEEGSGTALAPVGAPALRTRRSRSPAPPPPMPLPRPPTPPAGCWQWDGPWGCGGEGAAPRQALAAAECPPCAMAGPPPAPQPLPGDASFYSLPPPPLPPTSDPLETPAPSPSPSPSPQAVCWPSGWH

SEQ ID NO: 13467 - protein, 1114 aa, Homo sapiens
MAEAASGAGGTSLEGERGKRPPPEGEPAAPASGVLDKLFGKRLLQAGRYLVSHKAWMKTVPTENCDVLMTFPDTTDDHTLLWLLNHIRVGIPELIVQVRHHRHTRAYAFFVTATYESLLRGADELGLRKAVKAEFGGGTRGFSCEEDFIYENVESELRFFTSQERQSIIRFWLQNLRAKQGEALHNVRFLEDQPIIPELAARGIIQQVFPVHEQRILNRLMKSWVQAVCENQPLDDICDYFGVKIAMYFAWLGFYTSAMVYPAVFGSVLYTFTEADQTSRDVSCVVFALFNVIWSTLFLEEWKRRGAELAYKWGTLDSPGEAVEEPRPQFRGVRRISPITRAEEFYYPPWKRLLFQLLVSLPLCLACLVCVFLLMLGCFQLQELVLSVKGLPRLARFLPKVMLALLVSVSAEGYKKLAIWLNDMENYRLESAYEKHLIIKVVLFQFVNSYLSLFYIGFYLKDMERLKEMLATLLITRQFLQNVREVLQPHLYRRLGRGELGLRAVWELARALLGLLSLRRPAPRRLEPQADEGGGGGSGGGGRRCLSGGCGAPEEEEEAALVERRRAGEGGEEGDGPPGGKEEDEDDEEEEDEEEEEDEEEGEEGGLLDCGLRLKKVSFAERGAGRRRPGPSPEALLEEGSPTMVEKGLEPGVFTLAEEDDEAEGAPGSPEREPPAILFRRAGGEGRDQGPDGGPDPEPGSNSDSTRRQRRQNRSSWIDPPEEEHSPQLTQAELESCMKKYEDTFQDYQEMFVQFGYVVLFSSAFPLAALCALVNNLIEIRSDAFKLCTGLQRPFGQRVESIGQWQKVMEAMGVLAIVVNCYLIGQCGQLQRLFPWLSPEAAIVSVVVLEHFALLLKYLIHVAIPDIPGWVAEEMAKLEYQRREAFKRHERQAQHRYQQQQRRRREEEERQRHAEHHARREHDSGGREEARAEGSGLDPATSSEKASAKAKGSTAGGHGPERPKRPGSLLAPNNVMKLKQIIPLQGKFLSSGATSSLAAAGAGATTRPPPAQSPTGSDTRLPAFLSFKFLKSPETRRDSERSHSPPKAFHAGKLFPFGGTRAEPGSNGAGGQARPDGTPSSGSSRVQRSGPVDEALAEELEAPRPEEEGSGHKL

SEQ ID NO: 13468 - protein, 1112 aa, Homo sapiens
MAEQEASGLQVLLHTLQSSSDKESILTILKVLGDLLSVGTDRRIHYMISKGGSEALLQTLVDTARTAPPDYDILLPLFRLLAKVGLRDKKIGRKALELEALDVTLILARKNLSHGQNLLHCLWALRVFASSVSMGAMLGINGAMELLFKVITPYTRKRTQAIRAATEVLAALLKSKSNGRRAVNRGYVTSLLGLHQDWHSHDTANAYVQIRRGLLLCLRHIAALRSGREAFLAAQGMEILFSTTQNCLDDKSMEPVISVVLQILRQCYPTSPLPLVTASSAYAFPVPGCITTEPPHDLPEEDFEDDGDDEVDKDSDTEDGKVEDDDLETDVNKLSSKPGLDRPEEELMQYEVMCLELSYSFEELQSKLGDDLNSEKTQYANHHHIPAAASSKQHCYSKDQSSCGQEREYAVQTSLLCRVKTGRSTVHLGSKKNPGVNLYQNVQSNSLRRDSSESEIPDIQASPKADAWDVDAIFCPRMSASFSNSTRTREVVKVIDKLLQTHLKRVPFHDPYLYMAKARRTSSVVDFKMMAFPDVWGHCPPPTTQPMLERKCGVQRIRIFEDIRRLIQPSDVINKVVFSLDEPWPLQDNASNCLRFFSKFESGNLRKAIQVREFEYDLLVNADVNSTQHQQWFYFKVSGMQAAIPYHFNIINCEKPNSQFNYGMQPTLYSVKEALLGKPTWIRTGHEICYYKNHYRQSTAVAGGASGKCYYTLTFAVTFPHSEDVCYLAYHYPYTYTALMTHLDILEKSVNLKEVYFRQDVLCQTLGGNPCPLVTITAMPESNSDEHLEQFRHRPYQVITARVHPGESNASWVMKGTLEFLVSSDPVARLLRENFIFKIIPMLNPDGVINGNHRCSLSGEDLNRQWLSPSAHLQPTIYHAKGLLYHLSSIGRSPVVFCDFHGHSQKKNVFLYGCSIKETLWQAACTVGTSTILEEVNYRTLPKILDKLAPAFTMSSCSFLVEKSRASTARVVVWREMGVSRSYTMESSYCGCNQGPYQCTQRLLERTKNERAHPVDGLQGLQFGTRELEEMGAMFCLGLLILELKSASCSHQLLAQAATLLSAEEDALDQHLQRLKSSNFLPKHIWFAYHFFAITNFFKMNLLLHVSPVCDT

SEQ ID NO: 13469 - protein, 97 aa, Homo sapiens
MKVSAALLWLLLIAAAFSPQGLAGPASVPTTCCFNLANRKIPLQRLESYRRITSGKCPQKAVIFKTKLAKDICADPKKKWVQDSMKYLDQKSPTPKP

SEQ ID NO: 13470 - protein, 557 aa, Homo sapiens
MDSDEGYNYEFDEDEECSEEDSGAEEEEDEDDDEPDDDTLDLGEVELVEPGLGVGGERDGLLCGETGGGGGSALGPGGGGGGGGGGGGGGPGHEQEEDYRYEVLTAEQILQHMVECIREVNEVIQNPATITRILLSHFNWDKEKLMERYFDGNLEKLFAECHVINPSKKSRTRQMNTRSSAQDMPCQICYLNYPNSYFTGLECGHKFCMQCWSEYLTTKIMEEGMGQTISCPAHGCDILVDDNTVMRLITDSKVKLKYQHLITNSFVECNRLLKWCPAPDCHHVVKVQYPDAKPVRCKCGRQFCFNCGENWHDPVKCKWLKKWIKKCDDDSETSNWIAANTKECPKCHVTIEKDGGCNHMVCRNQNCKAEFCWVCLGPWEPHGSAWYNCNRYNEDDAKAARDAQERSRAALQRYLFYCNRYMNHMQSLRFEHKLYAQVKQKMEEMQQHNMSWIEVQFLKKAVDVLCQCRATLMYTYVFAFYLKKNNQSIIFENNQADLENATEVLSGYLERDISQDSLQDIKQKVQDKYRYCESRRRVLLQHVHEGYEKDLWEYIED

SEQ ID NO: 13471 - protein, 1544 aa, Homo sapiens
MAAPQDLDIAVWLATVHLEQYADTFRRHGLATAGAARGLGHEELKQLGISATGHRKRILRLLQTGTEEGSLDPKSDSAMEPSPSPAPQAQPPKPVPKPRTVFGGLSGPATTQRPGLSPALGGPGVSRSPEPSPRPPPLPTSSSEQSSALNTVEMMPNSIYFGLDSRGRAQAAQDKAPDSSQISAPTPALRPTTGTVHIMDPGCLYYGVQPVGTPGAPDRRESRGVCQGRAEHRLSRQDLEAREDAGYASLELPGDSTLLSPTLETEETSDDLISPYASFSFTADRLTPLLSGWLDKLSPQGNYVFQRRFVQFNGRSLMYFGSDKDPFPKGVIPLTAIEMTRSSKDNKFQVITGQRVFVFRTESEAQRDMWCSTLQSCLKEQRLLGHPRPPQPPRPLRTGMLELRGHKAKVFAALSPGELALYKSEQAFSLGIGICFIELQGCSVRETKSRSFDLLTPHRCFSFTAESGGARQSWAAALQEAVTETLSDYEVAEKIWSNRANRQCADCGSSRPDWAAVNLGVVICKQCAGQHRALGSGISKVQSLKLDTSVWSNEIVQLFIVLGNDRANRFWAGTLPPGEGLHPDATPGPRGEFISRKYRLGLFRKPHPQYPDHSQLLQALCAAVARPNLLKNMTQLLCVEAFEGEEPWFPPAPDGSCPGLLPSDPSPGVYNEVVVRATYSGFLYCSPVSNKAGPSPPRRGRDAPPRLWCVLGAALEMFASENSPEPLSLIQPQDIVCLGVSPPPTDPGDRFPFSFELILAGGRIQHFGTDGADSLEAWTSAVGKWFSPLSCHQLLGPGLLRLGRLWLRSPSHTAPAPGLWLSGFGLLRGDHLFLCSAPGPGPPAPEDMVHLRRLQEISVVSAADTPDKKEHLVLVETGRTLYLQGEGRLDFTAWNAAIGGAAGGGGTGLQEQQMSRGDIPIIVDACISFVTQHGLRLEGVYRKGGARARSLRLLAEFRRDARSVKLRPGEHFVEDVTDTLKRFFRELDDPVTSARLLPRWREAAELPQKNQRLEKYKDVIGCLPRVNRRTLATLIGHLYRVQKCAALNQMCTRNLALLFAPSVFQTDGRGEHEVRVLQELIDGYISVFDIDSDQVAQIDLEVSLITTWKDVQLSQAGDLIMEVYIEQQLPDNCVTLKVSPTLTAEELTNQVLEMRGTAAGMDLWVTFEIREHGELERPLHPKEKVLEQALQWCQLPEPCSASLLLKKVPLAQAGCLFTGIRRESPRVGLLRCREEPPRLLGSRFQERFFLLRGRCLLLLKEKKSSKPEREWPLEGAKVYLGIRKKLKPPTPWGFTLILEKMHLYLSCTDEDEMWDWTTSILKAQHDDQQPVVLRRHSSSDLARQKFGTMPLLPIRGDDSGATLLSANQTLRRLHNRRTLSMFFPMKSSQGSVEEQEELEEPVYEEPVYEEVGAFPELIQDTSTSFSTTREWTVKPENPLTSQKSLDQPFLSKSSTLGQEERPPEPPPGPPSKSSPQARGSLEEQLLQELSSLILRKGETTAGLGSPSQPSSPQSPSPTGLPTQTPGFPTQPPCTSSPPSSQPLT

SEQ ID NO: 13472 - protein, 1193 aa, Homo sapiens
MTRSSKDNKFQVITGQRVFVFRTESEAQRDMWCSTLQSCLKEQRLLGHPRPPQPPRPLRTGMLELRGHKAKVFAALSPGELALYKSEQAFSLGIGICFIELQGCSVRETKSRSFDLLTPHRCFSFTAESGGARQSWAAALQEAVTETLSDYEVAEKIWSNRANRQCADCGSSRPDWAAVNLGVVICKQCAGQHRALGSGISKVQSLKLDTSVWSNEIVQLFIVLGNDRANRFWAGTLPPGEGLHPDATPGPRGEFISRKYRLGLFRKPHPQYPDHSQLLQALCAAVARPNLLKNMTQLLCVEAFEGEEPWFPPAPDGSCPGLLPSDPSPGVYNEVVVRATYSGFLYCSPVSNKAGPSPPRRGRDAPPRLWCVLGAALEMFASENSPEPLSLIQPQDIVCLGVSPPPTDPGDRFPFSFELILAGGRIQHFGTDGADSLEAWTSAVGKWFSPLSCHQLLGPGLLRLGRLWLRSPSHTAPAPGLWLSGFGLLRGDHLFLCSAPGPGPPAPEDMVHLRRLQEISVVSAADTPDKKEHLVLVETGRTLYLQGEGRLDFTAWNAAIGGAAGGGGTGLQEQQMSRGDIPIIVDACISFVTQHGLRLEGVYRKGGARARSLRLLAEFRRDARSVKLRPGEHFVEDVTDTLKRFFRELDDPVTSARLLPRWREAAELPQKNQRLEKYKDVIGCLPRVNRRTLATLIGHLYRVQKCAALNQMCTRNLALLFAPSVFQTDGRGEHEVRVLQELIDGYISVFDIDSDQVAQIDLEVSLITTWKDVQLSQAGDLIMEVYIEQQLPDNCVTLKVSPTLTAEELTNQVLEMRGTAAGMDLWVTFEIREHGELERPLHPKEKVLEQALQWCQLPEPCSASLLLKKVPLAQAGCLFTGIRRESPRVGLLRCREEPPRLLGSRFQERFFLLRGRCLLLLKEKKSSKPEREWPLEGAKVYLGIRKKLKPPTPWGFTLILEKMHLYLSCTDEDEMWDWTTSILKAQHDDQQPVVLRRHSSSDLARQKFGTMPLLPIRGDDSGATLLSANQTLPMKSSQGSVEEQEELEEPVYEEPVYEEVGAFPELIQDTSTSFSTTREWTVKPENPLTSQKSLDQPFLSKSSTLGQEERPPEPPPGPPSKSSPQARGSLEEQLLQELSSLILRKGETTAGLGSPSQPSSPQSPSPTGLPTQTPGFPTQPPCTSSPPSSQPLT

SEQ ID NO: 13473 - protein, 506 aa, Homo sapiens
MPSKTKYNLVDDGHDLRIPLHNEDAFQHGICFEAKYVGSLDVPRPNSRVEIVAAMRRIRYEFKAKNIKKKKVSIMVSVDGVKVILKKKKKLLLLQKKEWTWDESKMLVMQDPIYRIFYVSHDSQDLKIFSYIARDGASNIFRCNVFKSKKKSQAMRIVRTVGQAFEVCHKLSLQHTQQNADGQEDGESERNSNSSGDPGRQLTGAERASTATAEETDIDAVEVPLPGNDVLEFSRGVTDLDAVGKEGGSHTGSKVSHPQEPMLTASPRMLLPSSSSKPPGLGTETPLSTHHQMQLLQQLLQQQQQQTQVAVAQVHLLKDQLAAEAAARLEAQARVHQLLLQNKDMLQHISLLVKQVQELELKLSGQNAMGSQDSLLEITFRSGALPVLCDPTTPKPEDLHSPPLGAGLADFAHPAGSPLGRRDCLVKLECFRFLPPEDTPPPAQGEALLGGLELIKFRESGIASEYESNTDESEERDSWSQEELPRLLNVLQRQELGDGLDDEIAV

SEQ ID NO: 13474 - protein, 211 aa, Homo sapiens
MSLSSLCPVFSAAASSLQVHLLKDQLAAEAAARLEAQARVHQLLLQNKDMLQHISLLVKQVQELELKLSGQNAMGSQDSLLEITFRSGALPVLCDPTTPKPEDLHSPPLGAGLADFAHPAGSPLGRRDCLVKLECFRFLPPEDTPPPAQGEALLGGLELIKFRESGIASEYESNTDESEERDSWSQEELPRLLNVLQRQELGDGLDDEIAV

SEQ ID NO: 13475 - protein, 501 aa, Homo sapiens
MPSKTKYNLVDDGHDLRIPLHNEDAFQHGICFEAKYVGSLDVPRPNSRVEIVAAMRRIRYEFKAKNIKKKKVSIMVSVDGVKVILKKKKKKKEWTWDESKMLVMQDPIYRIFYVSHDSQDLKIFSYIARDGASNIFRCNVFKSKKKSQAMRIVRTVGQAFEVCHKLSLQHTQQNADGQEDGESERNSNSSGDPGRQLTGAERASTATAEETDIDAVEVPLPGNDVLEFSRGVTDLDAVGKEGGSHTGSKVSHPQEPMLTASPRMLLPSSSSKPPGLGTETPLSTHHQMQLLQQLLQQQQQQTQVAVAQVHLLKDQLAAEAAARLEAQARVHQLLLQNKDMLQHISLLVKQVQELELKLSGQNAMGSQDSLLEITFRSGALPVLCDPTTPKPEDLHSPPLGAGLADFAHPAGSPLGRRDCLVKLECFRFLPPEDTPPPAQGEALLGGLELIKFRESGIASEYESNTDESEERDSWSQEELPRLLNVLQRQELGDGLDDEIAV

SEQ ID NO: 13476 - protein, 98 aa, Homo sapiens
MKVSAVLLCLLLMTAAFNPQGLAQPDALNVPSTCCFTFSSKKISLQRLKSYVITTSRCPQKAVIFRTKLGKEICADPKEKWVQNYMKHLGRKAHTLKT

SEQ ID NO: 13477 - protein, 56 aa, Homo sapiens
MQAPDSVRSVKVEREAKTWIEKPRGAGLRVAQKTPVHATTSLTLGTVVHLAFIILP

SEQ ID NO: 13478 - protein, 808 aa, Homo sapiens
MLRFPTCFPSFRVVGEKQLPQEIIFLVWSPKRDLIALANTAGEVLLHRLASFHRVWSFPPNENTGKEVTCLAWRPDGKLLAFALADTKKIVLCDVEKPESLHSFSVEAPVSCMHWMEVTVESSVLTSFYNAEDESNLLLPKLPTLPKNYSNTSKIFSEENSDEIIKLLGDVRLNILVLGGSSGFIELYAYGMFKIARVTGIAGTCLALCLSSDLKSLSVVTEVSTNGASEVSYFQLETNLLYSFLPEVTRMARKFTHISALLQYINLSLTCMCEAWEEILMQMDSRLTKFVQEKNTTTSVQDEFMHLLLWGKASAELQTLLMNQLTVKGLKKLGQSIESSYSSIQKLVISHLQSGSESLLYHLSELKGMASWKQKYEPLGLDAAGIEEAITAVGSFILKANELLQVIDSSMKNFKAFFRWLYVAMLRMTEDHVLPELNKMTQKDITFVAEFLTEHFNEAPDLYNRKGKYFNVERVGQYLKDEDDDLVSPPNTEGNQWYDFLQNSSHLKESPLLFPYYPRKSLHFVKRRMENIIDQCLQKPADVIGKSMNQAICIPLYRDTRSEDSTRRLFKFPFLWNNKTSNLHYLLFTILEDSLYKMCILRRHTDISQSVSNGLIAIKFGSFTYATTEKVRRSIYSCLDAQFYDDETVTVVLKDTVGREGRDRLLVQLPLSLVYNSEDSAEYQFTGTYSTRLDEQCSAIPTRTMHFEKHWRLLESMKAQYVAGNGFRKVSCVLSSNLRHVRVFEMDIDDEWELDESSDEEEEASNKPVKIKEEVLSESEAENQQAGAAALAPEIVIKVEKLDPELDS

SEQ ID NO: 13479 - protein, 551 aa, Homo sapiens
MLRFPTCFPSFRVVGEKQLPQEIIFLVWSPKRDLIALANTAGEVLLHRLASFHRVWSFPPNENTGKEVTCLAWRPDGKLLAFALADTKKIVLCDVEKPESLHSFSVEAPVSCMHWMEVTVESSVLTSFYNAEDESNLLLPKLPTLPKNYSNTSKIFSEENSDEIIKLLGDVRLNILVLGGSSGFIELYAYGMFKIARVTGIAGTCLALCLSSDLKSLSVVTEVSTNGASEVSYFQLETNLLYSFLPEVTRMARKFTHISALLQYINLSLTCMCEAWEEILMQMDSRLTKFVQEKNTTTSVQDEFMHLLLWGKASAELQTLLMNQLTVKGLKKLGQSIESSYSSIQKLVISHLQSGSESLLYHLSELKGMASWKQKYEPLGLDAAGIEEAITAVGSFILKANELLQVIDSSMKNFKAFFRWLYVAMLRMTEDHVLPELNKMTQKDITFVAEFLTEHFNEAPDLYNRKGKYFNVERVGQYLKDEDDDLVSPPNTEGNQWYDFLQNSSHLKESPLLFPYYPRKSLHFVKRRMENIIDQCLQKPAVSLKEMHVFV

SEQ ID NO: 13480 - protein, 809 aa, Homo sapiens
MLRFPTCFPSFRVVGEKQLPQEIIFLVWSPKRDLIALANTAGEVLLHRLASFHRVWSFPPNENTGKEVTCLAWRPDGKLLAFALADTKKIVLCDVEKPESLHSFSVEAPVSCMHWMEVTVESSVLTSFYNAEDESNLLLPKLPTLPKNYSNTSKIFSEENSDEIIKLLGDVRLNILVLGGSSGFIELYAYGMFKIARVTGIAGTCLALCLSSDLKSLSVVTEVSTNGASEVSYFQLETNLLYSFLPEVTRMARKFTHISALLQYINLSLTCMCEAWEEILMQMDSRLTKFVQEKNTTTSVQDEFMHLLLWGKASAELQTLLMNQLTVKGLKKLGQSIESSYSSIQKLVISHLQSGSESLLYHLSELKGMASWKQKYEPLGLDAAGIEEAITAVGSFILKANELLQVIDSSMKNFKAFFRWLYVAMLRMTEDHVLPELNKVMTQKDITFVAEFLTEHFNEAPDLYNRKGKYFNVERVGQYLKDEDDDLVSPPNTEGNQWYDFLQNSSHLKESPLLFPYYPRKSLHFVKRRMENIIDQCLQKPADVIGKSMNQAICIPLYRDTRSEDSTRRLFKFPFLWNNKTSNLHYLLFTILEDSLYKMCILRRHTDISQSVSNGLIAIKFGSFTYATTEKVRRSIYSCLDAQFYDDETVTVVLKDTVGREGRDRLLVQLPLSLVYNSEDSAEYQFTGTYSTRLDEQCSAIPTRTMHFEKHWRLLESMKAQYVAGNGFRKVSCVLSSNLRHVRVFEMDIDDEWELDESSDEEEEASNKPVKIKEEVLSESEAENQQAGAAALAPEIVIKVEKLDPELDS

SEQ ID NO: 13481 - protein, 113 aa, Homo sapiens
MKVSVAALSCLMLVAVLGSQAQFINDAETELMMSKLPLENPVVLNSFHFAADCCTSYISQSIPCSLMKSYFETSSECSKPGVIFLTKKGRQVCAKPSGPGVQDCMKKLKPYSI

SEQ ID NO: 13482 - protein, 503 aa, Homo sapiens
MAEGSQSAPEAGNDMGNDDAIGGNVSKYIVLPTGYCGQPKKGHLIFDACFESGNLGRVDQVSEFEYDLFIRPDTCNPRFRVWFNFTVENVKESQRVIFNIVNFSKTKSLYRDGMAPMVKSTSRPKWQRLPPKNVYYYRCPDHRKNYVMSFAFCFDREEDIYQFAYCYPYTYTRFQHYLDSLQKRNMDYFFREQLGQSVQQRKLDLLTITSPDNLREGAEQKVVFITGRVHPGETPSSFVCQGIIDFLVSQHPIACVLREYLVFKIAPMLNPDGVYLGNYRCSLMGFDLNRHWLDPSPWVHPTLHGVKQLIVQMYNDPKTSLEFYIDIHAHSTMMNGFMYGNIFEDEERFQRQAIFPKLLCQNAEDFSYSSTSFNRDAVKAGTGRRFLGGLLDHTSYCYTLEVSFYSYIISGTTAAVPYTEEAYMKLGRNVARTFLDYYRLNPVVEKVAIPMPRLRNKEIEVQRRKEKSPPYKHPLLRGPASNYPNSKGDKKSSVNHKDPSTPF

SEQ ID NO: 13483 - protein, 506 aa, Homo sapiens
MAEGSQSAPEAGNDMGNDDAIGGNVSKYIVLPTGYCGQPKKGHLIFDACFESGNLGRVDQVSEFEYDLFIRPDTCNPRFRVWFNFTVENVKESQVREIVDTFRVVLRVIFNIVNFSKTKSLYRDGMAPMVKSTSRPKWQRLPPKNVYYYRCPDHRKNYVMSFAFCFDREEDIYQFAYCYPYTYTRFQHYLDSLQKRNMDYFFREQLGQSVQQRKLDLLTITSPDNLREGAEQKVVFITGRVHPGETPSSFVCQGIIDFLVSQHPIACVLREYLVFKIAPMLNPDGVYLGNYRCSLMGFDLNRHWLDPSPWVHPTLHGVKQLIVQMYNDPKTSLEFYIDIHAHSTMMNGFMYGNIFEDEERFQRQAIFPKLLCQNAEDFSYSSTSFNRDAVKAGTGRRFLGGLLDHTSYCYTLEVSFYSYIISGTTAAVPYTEEAYMKLGRNVARTFLDYYRLNPVVEKVAIPMPRLRKEKSPPYKHPLLRGPASNYPNSKGDKKSSVNHKDPSTPF

SEQ ID NO: 13484 - protein, 1061 aa, Homo sapiens
MPGPRRPAGSRLRLLLLLLLPPLLLLLRGSHAGNLTVAVVLPLANTSYPWSWARVGPAVELALAQVKARPDLLPGWTVRTVLGSSENALGVCSDTAAPLAAVDLKWEHNPAVFLGPGCVYAAAPVGRFTAHWRVPLLTAGAPALGFGVKDEYALTTRAGPSYAKLGDFVAALHRRLGWERQALMLYAYRPGDEEHCFFLVEGLFMRVRDRLNITVDHLEFAEDDLSHYTRLLRTMPRKGRVIYICSSPDAFRTLMLLALEAGLCGEDYVFFHLDIFGQSLQGGQGPAPRRPWERGDGQDVSARQAFQAAKIITYKDPDNPEYLEFLKQLKHLAYEQFNFTMEDGLVNTIPASFHDGLLLYIQAVTETLAHGGTVTDGENITQRMWNRSFQGVTGYLKIDSSGDRETDFSLWDMDPENGAFRVVLNYNGTSQELVAVSGRKLNWPLGYPPPDIPKCGFDNEDPACNQDHLSTLEVLALVGSLSLLGILIVSFFIYRKMQLEKELASELWRVRWEDVEPSSLERHLRSAGSRLTLSGRGSNYGSLLTTEGQFQVFAKTAYYKGNLVAVKRVNRKRIELTRKVLFELKHMRDVQNEHLTRFVGACTDPPNICILTEYCPRGSLQDILENESITLDWMFRYSLTNDIVKGMLFLHNGAICSHGNLKSSNCVVDGRFVLKITDYGLESFRDLDPEQGHTVYAKKLWTAPELLRMASPPVRGSQAGDVYSFGIILQEIALRSGVFHVEGLDLSPKEIIERVTRGEQPPFRPSLALQSHLEELGLLMQRCWAEDPQERPPFQQIRLTLRKFNRENSSNILDNLLSRMEQYANNLEELVEERTQAYLEEKRKAEALLYQILPHSVAEQLKRGETVQAEAFDSVTIYFSDIVGFTALSAESTPMQVVTLLNDLYTCFDAVIDNFDVYKVETIGDAYMVVSGLPVRNGRLHACEVARMALALLDAVRSFRIRHRPQEQLRLRIGIHTGPVCAGVVGLKMPRYCLFGDTVNTASRMESNGEALKIHLSSETKAVLEEFGGFELELRGDVEMKGKGKVRTYWLLGERGSSTRG

SEQ ID NO: 13485 - protein, 120 aa, Homo sapiens
MKVSEAALSLLVLILIITSASRSQPKVPEWVNTPSTCCLKYYEKVLPRRLVVGYRKALNCHLPAIIFVTKRNREVCTNPNDDWVQEYIKDPNLPLLPTRNLSTVKIITAKNGQPQLLNSQ

SEQ ID NO: 13486 - protein, 356 aa, Homo sapiens
MATAALLRGATPGRGGPVWRWRLRAAPRCRLAHSSCSPGGDPTAGAAWACFRLDGRTLLRVRGPDAAPFLLGLLTNELPLPSPAAAGAPPAARAGYAHFLNVQGRTLYDVILYGLQEHSEVSGFLLECDSSVQGALQKHLALYRIRRKVTVEPHPELRVWAVLPSSPEACGAASLQERAGAAAILIRDPRTARMGWRLLTQDEGPALVPGGRLGDLWDYHQHRYLQGVPEGVRDLPPGVALPLESNLAFMNGVSFTKGCYIGQELTARTHHMGVIRKRLFPVRFLDPLPTSGITPGATVLTASGQTVGKFRAGQGNVGLALLWSEKIKGPLHIRASEGAQVALAASVPDWWPTVSK

SEQ ID NO: 13487 - protein, 599 aa, Homo sapiens
MDPGDAAILESSLRILYRLFESVLPPLPAALQSRMNVIDHVRDMAAAGLHSNVRLLSSLLLTMSNNNPELFSPPQKYQLLVYHADSLFHDKEYRNAVSKYTMALQQKKALSKTSKVRPSTGNSASTPQSQCLPSEIEVKYKMAECYTMLKQDKDAIAILDGIPSRQRTPKINMMLANLYKKAGQERPSVTSYKEVLRQCPLALDAILGLLSLSVKGAEVASMTMNVIQTVPNLDWLSVWIKAYAFVHTGDNSRAISTICSLEKKSLLRDNVDLLGSLADLYFRAGDNKNSVLKFEQAQMLDPYLIKGMDVYGYLLAREGRLEDVENLGCRLFNISDQHAEPWVVSGCHSFYSKRYSRALYLGAKAIQLNSNSVQALLLKGAALRNMGRVQEAIIHFREAIRLAPCRLDCYEGLIECYLASNSIREAMVMANNVYKTLGANAQTLTLLATVCLEDPVTQEKAKTLLDKALTQRPDYIKAVVKKAELLSREQKYEDGIALLRNALANQSDCVLHRILGDFLVAVNEYQEAMDQYSIALSLDPNDQKSLEGMQKMEKEESPTDATQEEDVDDMEGSGEEGDLEGSDSEAAQWADQEQWFGMQ

SEQ ID NO: 13488 - protein, 537 aa, Homo sapiens
MDPGDAAILESSLRILYRLFESVLPPLPAALQSRMNVIDHVRDMAAAGLHSNVRLLSSLLLTMSNNNPELFSPPQKYQLLVYHADSLFHDKEYRNAVSKYTMALQQKKALSKTSKVRPSTGNSASTPQSQCLPSEIEVKYKMAECYTMLKQDKDAIAILDGIPSRQRTPKINMMLANLYKKAGQERPSVTSYKEVLRQCPLALDAILGLLSLSVKGAEVASMTMNVIQTVPNLDWLSVWIKAYAFVHTGDNSRAISTICSLEKKSLLRDNVDLLGSLADLYFRAGDNKNSVLKFEQAQMLDPYLIKGMDVYGYLLAREGRLEDVENLGCRLFNISDQHAEPWVVSGCHSFYSKRYSRALYLGAKAIQLNSNSVQALLLKGAALRNMGRVQEAIIHFREAIRLAPCRLDCYEGLIECYLASNSIREAMVMANNVYKTLGANAQTLTLLATVCLEDPVTQEKAKTLLDKALTQRPDYIKAVVKKAELLSREQKYEDGIALLRNALANQSDCVLHRILGDFLVAVNEYQEAMDQYSIALR

SEQ ID NO: 13489 - protein, 412 aa, Homo sapiens
MEALQKQQAARLAQGVGPLAPACPLLPPQPPLPDHRTLQAPEGALGNVGAEEEEDAEEDEEKREEAGAEEEAAEESRPGAQGPSSPSSQPPGLHPHEWTYEEQFKQLYELDADPKRKEFLDDLFSFMQKRGTPVNRVPIMAKQVLDLYALFRLVTAKGGLVEVINRKVWREVTRGLSLPTTITSAAFTLRTQYMKYLYPYECETRALSSPGELQAAIDSNRREGRRQAYTATPLFGLAGPPPRGAQDPALGPGPAPPATQSSPGPAQGSTSGLPAHACAQLSPSPIKKEESGIPNPCLALPVGLALGPTREKLAPEEPPEKRAVLMGPMDPPRPCMPPSFLPRGKVPLREERLDGPLNLAGSGISSINMALEINGVVYTGVLFARRQPVPASQGPTNPAPPPSTGPPSSILP

SEQ ID NO: 13490 - protein, 514 aa, Homo sapiens
MSWPRRLLLRYLFPALLLHGLGEGSALLHPDSRSHPRSLEKSAWRAFKESQCHHMLKHLHNGARITVQMPPTIEGHWVSTGCEVRSGPEFITRSYRFYHNNTFKAYQFYYGSNRCTNPTYTLIIRGKIRLRQASWIIRGGTEADYQLHNVQVICHTEAVAEKLGQQVNRTCPGFLADGGPWVQDVAYDLWREENGCECTKAVNFAMHELQLIRVEKQYLHHNLDHLVEELFLGDIHTDATQRMFYRPSSYQPPLQNAKNHDHACIACRIIYRSDEHHPPILPPKADLTIGLHGEWVSQRCEVRPEVLFLTRHFIFHDNNNTWEGHYYHYSDPVCKHPTFSIYARGRYSRGVLSSRVMGGTEFVFKVNHMKVTPMDAATASLLNVFNGNECGAEGSWQVGIQQDVTHTNGCVALGIKLPHTEYEIFKMEQDARGRYLLFNGQRPSDGSSPDRPEKRATSYQMPLVQCASSSPRAEDLAEDSGSSLYGRAPGRHTWSLLLAALACLVPLLHWNIRR

SEQ ID NO: 13491 - protein, 765 aa, Homo sapiens
MAADPTELRLGSLPVFTRDDFEGDWRLVASGGFSQVFQARHRRWRTEYAIKCAPCLPPDAASSDVNYLIEEAAKMKKIKFQHIVSIYGVCKQPLGIVMEFMANGSLEKVLSTHSLCWKLRFRIIHETSLAMNFLHSIKPPLLHLDLKPGNILLDSNMHVKISDFGLSKWMEQSTRMQYIERSALRGMLSYIPPEMFLESNKAPGPKYDVYSFAIVIWELLTQKKPYSGFNMMMIIIRVAAGMRPSLQPVSDQWPSEAQQMVDLMKRCWDQDPKKRPCFLDITIETDILLSLLQSRVAVPESKALARKVSCKLSLRQPGEVNEDISQELMDSDSGNYLKRALQLSDRKNLVPRDEELCIYENKVTPLHFLVAQGSVEQVRLLLAHEVDVDCQTASGYTPLLIAAQDQQPDLCALLLAHGADANRVDEDGWAPLHFAAQNGDDGTARLLLDHGACVDAQEREGWTPLHLAAQNNFENVARLLVSRQADPNLHEAEGKTPLHVAAYFGHVSLVKLLTSQGAELDAQQRNLRTPLHLAVERGKVRAIQHLLKSGAVPDALDQSGYGPLHTAAARGKYLICKMLLRYGASLELPTHQGWTPLHLAAYKGHLEIIHLLAESHANMGALGAVNWTPLHLAARHGEEAVVSALLQCGADPNAAEQSGWTPLHLAVQRSTFLSVINLLEHHANVHARNKVGWTPAHLAALKGNTAILKVLVEAGAQLDVQDGVSCTPLQLALRSRKQGIMSFLEGKEPSVATLGGSKPGAEMEI

SEQ ID NO: 13492 - protein, 275 aa, Homo sapiens
MTTEQARGQQGPNLAIGRQKPPAGVVTPKSDAEEPPLTRKRSKKERGLRGSRKRTGSSGEQTGPEAPGSSNNPPSTGEGPAGAPPASPGPASSRQSHRHRPDSLHDAAQRTYGPLLNRVFGKDRELGPEELDELQAAFEEFDTDRDGYISHRELGDCMRTLGYMPTEMELLEVSQHIKMRMGGRVDFEEFVELIGPKLREETAHMLGVRELRIAFREFDRDRDGRITVAELREAVPALLGEPLAGPELDEMLREVDLNGDGTVDFDEFVMMLSRH

SEQ ID NO: 13493 - protein, 170 aa, Homo sapiens
MTEPWLALGTSWTLPLQDRELGPEELDELQAAFEEFDTDRDGYISHRELGDCMRTLGYMPTEMELLEVSQHIKMRMGGRVDFEEFVELIGPKLREETAHMLGVRELRIAFREFDRDRDGRITVAELREAVPALLGEPLAGPELDEMLREVDLNGDGTVDFDEFVMMLSRH

SEQ ID NO: 13494 - protein, 197 aa, Homo sapiens
MRVAGGRALSRGAELRVPGGAKHGMCLLLGATGVGKTLLVKRLQEVSSRDGKGDLGEPPPTRPTVGTNLTDIVAQRKITIRELGGCMGPIWSSYYGNCRSLLFVMDASDPTQLSASCVQLLGLLSAEQLAEASVLILFNKIDLPCYMSTEEMKSLIRLPDIIACAKQNITTAEISAREGTGLAGVLAWLQATHRAND

SEQ ID NO: 13495 - protein, 100 aa, Homo sapiens
MHVCDLQKLVRIQLAFTTFPWMFSCHLLPTPELSSKRNQCLLYKTSGCLTQMPILYGHPATLLKDYILQAILQPGKKIQGGTEIQRGSFANQYQTDASHL

SEQ ID NO: 13496 - protein, 181 aa, Homo sapiens
MGGFFSSIFSSLFGTREMRILILGLDGAGKTTILYRLQVGEVVTTIPTIGFNVETVTYKNLKFQVWDLGGQTSIRPYWRCYYSNTDAVIYVVDSCDRDRIGISKSELVAMLEEEELRKAILVVFANKQDMEQAMTSSEMANSLGLPALKDRKWQIFKTSATKGTGLDEAMEWLVETLKSRQ

SEQ ID NO: 13497 - protein, 164 aa, Homo sapiens
MRILILGLDGAGKTTILYRLQVGEVVTTIPTIGFNVETVTYKNLKFQVWDLGGQTSIRPYWRCYYSNTDAVIYVVDSCDRDRIGISKSELVAMLEEEELRKAILVVFANKQDMEQAMTSSEMANSLGLPALKDRKWQIFKTSATKGTGLDEAMEWLVETLKSRQ

SEQ ID NO: 13498 - protein, 90 aa, Homo sapiens
MAYKMLQVVLCSTLLIGALGAPFLLEDPANQFLRLKRHVNLQDYWDPDHSSDVWVNTLAKQARETWIALKTTAQYYLDMNTFTFDMSTAQ

SEQ ID NO: 13499 - protein, 265 aa, Homo sapiens
MKKEVCSVAFLKAVFAEFLATLIFVFFGLGSALKWPSALPTILQIALAFGLAIGTLAQALGPVSGGHINPAITLALLVGNQISLLRAFFYVAAQLVGAIAGAGILYGVAPLNARGNLAVNALNNNTTQGQAMVVELILTFQLALCIFASTDSRRTSPVGSPALSIGLSVTLGHLVGIYFTGCSMNPARSFGPAVVMNRFSPAHWVFWVGPIVGAVLAAILYFYLLFPNSLSLSERVAIIKGTYEPDEDWEEQREERKKTMELTTR

SEQ ID NO: 13500 - protein, 186 aa, Homo sapiens
MIALFNKLLDWFKALFWKEEMELTLVGLQYSGKTTFVNVIASGQFNEDMIPTVGFNMRKITKGNVTIKLWDIGGQPRFRSMWERYCRGVSAIVYMVDAADQEKIEASKNELHNLLDKPQLQGIPVLVLGNKRDLPGALDEKELIEKMNLSAIQDREICCYSISCKEKDNIDITLQWLIQHSKSRRS

SEQ ID NO: 13501 - protein, 181 aa, Homo sapiens
MGNIFANLFKGLFGKKEMRILMVGLDAAGKTTILYKLKLGEIVTTIPTIGFNVETVEYKNISFTVWDVGGQDKIRPLWRHYFQNTQGLIFVVDSNDRERVNEAREELMRMLAEDELRDAVLLVFANKQDLPNAMNAAEITDKLGLHSLRHRNWYIQATCATSGDGLYEGLDWLSNQLRNQK

SEQ ID NO: 13502 - protein, 289 aa, Homo sapiens
MAGAGRGAAVSRVQAGPGSPRRARGRQQVQPLGKQRPAPWPGLRSKEKKKVNCKPKNQDEQEIPFRLREIMRSRQEMKNPISNKKRKKAAQVTFRKTLEKEAKGEEPDIAVPKFKQRKGESDGAYIHRMQQEAQHVLFLSKNQAIRQPEVQAAPKEKSEQKKAKKAFQKRRLDKVRRKKEEKAADRLEQELLRDTVKFGEVVLQPPELTARPQRSVSKDQPGRRSQMLRMLLSPGGVSQPLTASLARQRIVEEERERAVQAYRALKQRQQQLHGERPHLTSRKKPEPQL

SEQ ID NO: 13503 - protein, 233 aa, Homo sapiens
MATPPFRLIRKMFSFKVSRWMGLACFRSLAASSPSIRQKKLMHKLQEEKAFREEMKIFREKIEDFREEMWTFRGKIHAFRGQILGFWEEERPFWEEEKTFWKEEKSFWEMEKSFREEEKTFWKKYRTFWKEDKAFWKEDNALWERDRNLLQEDKALWEEEKALWVEERALLEGEKALWEDKTSLWEEENALWEEERAFWMENNGHIAGEQMLEDGPHNANRGQRLLAFSRGRA

SEQ ID NO: 13504 - protein, 1053 aa, Homo sapiens
MAFLKLRDQPSLVQAIFNGDPDEVRALIFKKEDVNFQDNEKRTPLHAAAYLGDAEIIELLILSGARVNAKDSKWLTPLHRAVASCSEEAVQVLLKHSADVNARDKNWQTPLHIAAANKAVKCAEALVPLLSNVNVSDRAGRTALHHAAFSGHGEMVKLLLSRGANINAFDKKDRRAIHWAAYMGHIEVVKLLVSHGAEVTCKDKKSYTPLHAAASSGMISVVKYLLDLGVDMNEPNAYGNTPLHVACYNGQDVVVNELIDCGAIVNQKNEKGFTPLHFAAASTHGALCLELLVGNGADVNMKSKDGKTPLHMTALHGRFSRSQTIIQSGAVIDCEDKNGNTPLHIAARYGHELLINTLITSGADTAKRGIHGMFPLHLAALSGFSDCCRKLLSSGFDIDTPDDFGRTCLHAAAAGGNLECLNLLLNTGADFNKKDKFGRSPLHYAAANCNYQCLFALVGSGASVNDLDERGCTPLHYAATSDTDGKCLEYLLRNDANPGIRDKQGYNAVHYSAAYGHRLCLQLIASETPLDVLMETSGTDMLSDSDNRATISPLHLAAYHGHHQALEVLVQSLLDLDVRNSSGRTPLDLAAFKGHVECVDVLINQGASILVKDYILKRTPIHAAATNGHSECLRLLIGNAEPQNAVDIQDGNGQTPLMLSVLNGHTDCVYSLLNKGANVDAKDKWGRTALHRGAVTGHEECVDALLQHGAKCLLRDSRGRTPIHLSAACGHIGVLGALLQSAASMDANPATADNHGYTALHWACYNGHETCVELLLEQEVFQKTEGNAFSPLHCAVINDNEGAAEMLIDTLGASIVNATDSKGRTPLHAAAFTDHVECLQLLLSHNAQVNSVDSTGKTPLMMAAENGQTNTVEMLVSSASAELTLQDNSKNTALHLACSKGHETSALLILEKITDRNLINATNAALQTPLHVAARNGLTMVVQELLGKGASVLAVDENGYTPALACAPNKDVADCLALILATMMPVSSSSPLSSLTFNAINRYTNTSKTVSFEALPIMRNEPSSYCSFNNIGGEQEYLYTDVDELNDSDSETY

SEQ ID NO: 13505 - protein, 899 aa, Homo sapiens
MVKLLLSRGANINAFDKKDRRAIHWAAYMGHIEVVKLLVSHGAEVTCKDKKSYTPLHAAASSGMISVVKYLLDLGVDMNEPNAYGNTPLHVACYNGQDVVVNELIDCGAIVNQKNEKGFTPLHFAAASTHGALCLELLVGNGADVNMKSKDGKTPLHMTALHGRFSRSQTIIQSGAVIDCEDKNGNTPLHIAARYGHELLINTLITSGADTAKRGIHGMFPLHLAALSGFSDCCRKLLSSGFDIDTPDDFGRTCLHAAAAGGNLECLNLLLNTGADFNKKDKFGRSPLHYAAANCNYQCLFALVGSGASVNDLDERGCTPLHYAATSDTDGKCLEYLLRNDANPGIRDKQGYNAVHYSAAYGHRLCLQLIASETPLDVLMETSGTDMLSDSDNRATISPLHLAAYHGHHQALEVLVQSLLDLDVRNSSGRTPLDLAAFKGHVECVDVLINQGASILVKDYILKRTPIHAAATNGHSECLRLLIGNAEPQNAVDIQDGNGQTPLMLSVLNGHTDCVYSLLNKGANVDAKDKWGRTALHRGAVTGHEECVDALLQHGAKCLLRDSRGRTPIHLSAACGHIGVLGALLQSAASMDANPATADNHGYTALHWACYNGHETCVELLLEQEVFQKTEGNAFSPLHCAVINDNEGAAEMLIDTLGASIVNATDSKGRTPLHAAAFTDHVECLQLLLSHNAQVNSVDSTGKTPLMMAAENGQTNTVEMLVSSASAELTLQDNSKNTALHLACSKGHETSALLILEKITDRNLINATNAALQTPLHVAARNGLTMVVQELLGKGASVLAVDENGYTPALACAPNKDVADCLALILATMMPVSSSSPLSSLTFNAINRYTNTSKTVSFEALPIMRNEPSSYCSFNNIGGEQEYLYTDVDELNDSDSETY

SEQ ID NO: 13506 - protein, 1086 aa, Homo sapiens
MSRVCIVVLEEVEDESPAFISKLPQENKSLHSPPSGNVLVRYPSLVQAIFNGDPDEVRALIFKKEDVNFQDNEKRTPLHAAAYLGDAEIIELLILSGARVNAKDSKWLTPLHRAVASCSEEAVQVLLKHSADVNARDKNWQTPLHIAAANKAVKCAEALVPLLSNVNVSDRAGRTALHHAAFSGHGEMVKLLLSRGANINAFDKKDRRAIHWAAYMGHIEVVKLLVSHGAEVTCKDKKSYTPLHAAASSGMISVVKYLLDLGVDMNEPNAYGNTPLHVACYNGQDVVVNELIDCGAIVNQKNEKGFTPLHFAAASTHGALCLELLVGNGADVNMKSKDGKTPLHMTALHGRFSRSQTIIQSGAVIDCEDKNGNTPLHIAARYGHELLINTLITSGADTAKRGIHGMFPLHLAALSGFSDCCRKLLSSGFDIDTPDDFGRTCLHAAAAGGNLECLNLLLNTGADFNKKDKFGRSPLHYAAANCNYQCLFALVGSGASVNDLDERGCTPLHYAATSDTDGKCLEYLLRNDANPGIRDKQGYNAVHYSAAYGHRLCLQLIASETPLDVLMETSGTDMLSDSDNRATISPLHLAAYHGHHQALEVLVQSLLDLDVRNSSGRTPLDLAAFKGHVECVDVLINQGASILVKDYILKRTPIHAAATNGHSECLRLLIGNAEPQNAVDIQDGNGQTPLMLSVLNGHTDCVYSLLNKGANVDAKDKWGRTALHRGAVTGHEECVDALLQHGAKCLLRDSRGRTPIHLSAACGHIGVLGALLQSAASMDANPATADNHGYTALHWACYNGHETCVELLLEQEVFQKTEGNAFSPLHCAVINDNEGAAEMLIDTLGASIVNATDSKGRTPLHAAAFTDHVECLQLLLSHNAQVNSVDSTGKTPLMMAAENGQTNTVEMLVSSASAELTLQDNSKNTALHLACSKGHETSALLILEKITDRNLINATNAALQTPLHVAARNGLTMVVQELLGKGASVLAVDENGYTPALACAPNKDVADCLALILATMMPVSSSSPLSSLTFNAINRYTNTSKTVSFEALPIMRNEPSSYCSFNNIGGEQEYLYTDVDELNDSDSETY

SEQ ID NO: 13507 - protein, 1083 aa, Homo sapiens
MSRVCIVVLEEVEDESPAFISKLPQENKSLHSPPSGNVLPSLVQAIFNGDPDEVRALIFKKEDVNFQDNEKRTPLHAAAYLGDAEIIELLILSGARVNAKDSKWLTPLHRAVASCSEEAVQVLLKHSADVNARDKNWQTPLHIAAANKAVKCAEALVPLLSNVNVSDRAGRTALHHAAFSGHGEMVKLLLSRGANINAFDKKDRRAIHWAAYMGHIEVVKLLVSHGAEVTCKDKKSYTPLHAAASSGMISVVKYLLDLGVDMNEPNAYGNTPLHVACYNGQDVVVNELIDCGAIVNQKNEKGFTPLHFAAASTHGALCLELLVGNGADVNMKSKDGKTPLHMTALHGRFSRSQTIIQSGAVIDCEDKNGNTPLHIAARYGHELLINTLITSGADTAKRGIHGMFPLHLAALSGFSDCCRKLLSSGFDIDTPDDFGRTCLHAAAAGGNLECLNLLLNTGADFNKKDKFGRSPLHYAAANCNYQCLFALVGSGASVNDLDERGCTPLHYAATSDTDGKCLEYLLRNDANPGIRDKQGYNAVHYSAAYGHRLCLQLIASETPLDVLMETSGTDMLSDSDNRATISPLHLAAYHGHHQALEVLVQSLLDLDVRNSSGRTPLDLAAFKGHVECVDVLINQGASILVKDYILKRTPIHAAATNGHSECLRLLIGNAEPQNAVDIQDGNGQTPLMLSVLNGHTDCVYSLLNKGANVDAKDKWGRTALHRGAVTGHEECVDALLQHGAKCLLRDSRGRTPIHLSAACGHIGVLGALLQSAASMDANPATADNHGYTALHWACYNGHETCVELLLEQEVFQKTEGNAFSPLHCAVINDNEGAAEMLIDTLGASIVNATDSKGRTPLHAAAFTDHVECLQLLLSHNAQVNSVDSTGKTPLMMAAENGQTNTVEMLVSSASAELTLQDNSKNTALHLACSKGHETSALLILEKITDRNLINATNAALQTPLHVAARNGLTMVVQELLGKGASVLAVDENGYTPALACAPNKDVADCLALILATMMPVSSSSPLSSLTFNAINRYTNTSKTVSFEALPIMRNEPSSYCSFNNIGGEQEYLYTDVDELNDSDSETY

SEQ ID NO: 13508 - protein, 301 aa, Homo sapiens
MCRMSFKKETPLANAAFWAARRGNLALLKLLLNSGRVDVDCRDSHGTTLLMVAAYAGHIDCVRELVLQGADINLQRESGTTALFFAAQQGHNDVVRFLFGFGASTEFRTKDGGTALLAASQYGHMQVVETLLKHGANIHDQLYDGATALFLAAQGGYLDVIRLLLASGAKVNQPRQDGTAPLWIASQMGHSEVVRVMLLRGADRDAARNDGTTALLKAANKGYNDVIKELLKFSPTLGILKNGTSALHAAVLSGNIKTVALLLEAGADPSLRNKANELPAELTKNERILRLLRSKEGPRKS

SEQ ID NO: 13509 - protein, 268 aa, Homo sapiens
MCRMSFKKETPLANAAFWAARRGNLALLKLLLNSGRVDVDCRDSHGTTLLMVAAYAGHIDCVRELVLQGADINLQRESGTTALFFAAQQGHNDVVRFLFGFGASTEFRTKDGGTALLAASQYGHMQVVETLLKHGANIHDQLYDGATALFLAAQGGYLDVIRLLLASGAKVNQPRQDGTAPLWIASQMGHSEVVRVMLLRGADRDAARNDGTTALLKAANKGYNDVIKELLKFSPTLGILKANELPAELTKNERILRLLRSKEGPRKS

SEQ ID NO: 13510 - protein, 511 aa, Homo sapiens; identical to SEQ ID NO: 11699

SEQ ID NO: 13511 - protein, 1873 aa, Homo sapiens
MEEGVQAPDWDSDETVIEGSVTESDLEEKELPWRRLLFDQDASLKSEFSLHPDTRGMCKGMPSPEIQLGFKLREDLQEQMNKNKMMPVLSEDTILQSQDETERNQALLQTRKNCSMFIGSFRQSGLSLNHQNIEGPEAESPEVLPHIEKELSEGRDSPEVSLLSGTAITVSDTVAVKETSLVEPEKILAAPNTFFEPRKEVTMTMTSEETKDEESSLETFVSALESLLTSPESTQEERLFELVSDFDRKELMNPLSDSLSSISIPLNSWSACHRDLLEDAKDDALPAELLEALNTLSEAKVETICHRKEGGSSLIARNECLEVEFNTSQTNEDCTQIAETLQDPNPSGLQTLAHQNITSCEPLSNKRNSNSVTNSSDQETACVLRRSSRLEKLKVSRDAKYSDHMYKMPEKILPKILGCEDLTNNNSSAQNFRMQDPALMIDGKEKNMHSARFKNGKQIRKNEQFSGKKEKMKVNKISLHSINRRNIFGENLVYKAALHDDADLVHHCIKKGGNVNQPSYAGWTALHEASVGGFYRTASELLKGGADVNIKGLYQITPLHDAVMNGHYKVAELLLLNGADPLFRNDDGKCALDEAKDLCMKRLLERYIPKHQKCLTSAQRSSIDPLDIEDVYQHKKPKFSSKSHIWHVYNENSNRQKLEHVKVNKGSKASLFINKEDVYEYYQKDPKNTKFGKSKHKQSTLDQIYSTGLRKGNLHNVKDPNTNVPKGIGRRKTQHKRTQVDDVDCNPRKILAVSPSRRINRLVTYQQHIPETHNDLPEELCEPSSLTLSSLRNGLDSSTEACSVSKEKHIQNLDLSDSQEVQCLELESVDQTEAVSFPGLLLHKEIKLPVVTTDKQPHTLQEQHHVLYKSHENSNLVPKDERFNKWENSFLSFVKENSDNDDDDDCSTSEKAITSKKVLCSTGGKKHYNFKENLTNKKEMGFQQFLLSEDHLSQENELKAVSLTTLPEQEAVNFSYSDNAVISEHVANYEQCIFGPSFDHSNGNPEQNSLACMRTLLTHEASKLTNHVELFKKPQDYIPRAPTFLMNQTDTHIVEKMAKNCDTERNYIDRDQKIIYSNEPLSIVAHSQVIETTKVEKRRQNHLESETIHNIDSHSTDNMSKELANISKLSQREKKEISHKPGMKAGRINKRNARGESQLHLAVRRGNLPLVKALIESGADVNLNDNAGWTPLHEASNEGSIDIIVELLKAGAKVNCENIDGILPLHDAVANNHLKAAEILLQNGANPNQKDQKQKSALDEADDEKMKELLRSYGAIETVNRDESDAIVNEKIPAVRSKRHKQCFCDDGKTIDSSSLSHQERSRESLSVHQTLSAILQDIEEKQEYLLEFEIRNPEDAEQYIEKMLKIKKIMDNVLAKQKAERDDLAKKYRVSIESFKHGALREQLANLAARQKSLLVVAKKQKKISLKIQNCRNVTSLPCLSLRKLPPRSEISSEKDSQELTSLENLEHPQSGSLSPVSGSMQETQLSLETWNYSQNTNICLNSEAVRRGEFSGNDMNSKQNGSDCTLDGFPKSRHSDGTEKNKLPSQPVAFIGQTEYSQKENDLTEATDKDHEFYVSSPVIGKLNISETASVLAENAAHPSNIICDQDLSNYDPKRGNRKTSSQQSPTGASESLAHQGIAVLGSDTVHQMKPYLKKSVSVVPCADDSQISSSSGSGQQDTIKKALNYSTAPKKKCIQIKDLILLGRINPGNNILEFKTQETTHKASILLNGKLKVESGQIYKNPVTWLKDLLGGNSYVTWNYAWSKVTYLGKELLRYVSEDAPILPEPNSVPQQYQPCLPEVACLDDPVQEPNKSMFEKTKFGQGTSRESMQSSPRYLQINEILLISDQEFLPCHIMDQHWKFCVECEELTP

SEQ ID NO: 13512 - protein, 750 aa, Homo sapiens
MAQASRSGSLPPLVIVPPLRAQPGGTGEEQWERSRTGGLRWEVHCWPSGTSGGTPWWPTPADVSEDYEADAAAWRRGPAGGGPIPPALQRLRAVLLRLHREREQLLQARDCAYHLQSAVRLMKTLSPGSPSGGPSPLPQWCRDLQLHPSQGAVLRIGPGETLEPLLLARPIGLAAQCLEAVIEMQLRALGREPASPGLSSQLAELLFALPAYHTLQRKALSHVPGAARPFPTSRVLRLLTGERGCQVASRLDEALQGSALRDQLRRRCQEEGDLLPGLLGLVGGVAGSASCGLGLGGAGALWSQYWTLLWAACAQSLDLNLGPWRDPRATAQQLSQALGQASLPQECEKELASLCHRLLHQSLIWSWDQGFCQALGSALGGQSSLPTSSGTAELLQQLFPPLLDALREPRLRRIFCQPADPAPVALGLCTLQTTLLWFLGRAQQYLAAWDPASFLLLIQKDLPPLLHEAEALYSLASEESLALEVEQQLGLEIQKLTAQIQLLPEESLSVFSQECHKQAMQGFKLYMPRGRYWRLRLCPEPPSAPSEYAGLVVRTVLEPVLQGLQGLPPQAQAPALGQALTAIVGAWLDHILTHGIRFSLQGALQLKQDFGVVRELLEEEQWSLSPDLRQTLLMLSIFQQLDGALLCLLQQPLPKSQVHRRPPCCCACQEVQTTKLPSSCLNSLESLEPPLQPGTSPAQTGQLQSTLGGRGPSPEGYLVGNQQAWLALRQHQRPRWHLPFFSCLGTSPES

SEQ ID NO: 13513 - protein, 743 aa, Homo sapiens
MAQASRSGSLPPLVIVPPLRAQPGGTGEEQWERSRTGGLRWEVHCWPSGTSGGTPWWPTPADVSEDYEADAAAWRRGPAGGGPIPPALQRLRAVLLRLHREREQLLQARDCAYHLQSAVRLMKTLSPGSPSGGPSPLPQWCRDLQLHPSQGAVLRIGPGETLEPLLLARPIGLAAQCLEAVIEMQLRALGREPASPGLSSQLAELLFALPAYHTLQRKALSHVPGAARPFPTSRVLRLLTGERGCQVASRLDEALQGSALRDQLRRRCQEEGDLLPGLLGLVGGVAGSASCGLGLGGAGALWSQYWTLLWAACAQSLDLNLGPWRDPRATAQQLSQALGQASLPQECEKELASLCHRLLHQSLIWSWDQGFCQALGSALGGQSSLPTSSGTAELLQQLFPPLLDALREPRLRRIFCQPAGLCTLQTTLLWFLGRAQQYLAAWDPASFLLLIQKDLPPLLHEAEALYSLASEESLALEVEQQLGLEIQKLTAQIQLLPEESLSVFSQECHKQAMQGFKLYMPRGRYWRLRLCPEPPSAPSEYAGLVVRTVLEPVLQGLQGLPPQAQAPALGQALTAIVGAWLDHILTHGIRFSLQGALQLKQDFGVVRELLEEEQWSLSPDLRQTLLMLSIFQQLDGALLCLLQQPLPKSQVHRRPPCCCACQEVQTTKLPSSCLNSLESLEPPLQPGTSPAQTGQLQSTLGGRGPSPEGYLVGNQQAWLALRQHQRPRWHLPFFSCLGTSPES

SEQ ID NO: 13514 - protein, 665 aa, Homo sapiens
MAQASRSGSLPPLVIVPPLRAQPGGTGEEQWERSRTGGLRWEVHCWPSGTSGGTPWWPTPADVSEDYEADAAAWRRGPAGGGPIPPALQRLRAVLLRLHREREQLLQARDCAYHLQSAVRLMKTLSPGSPSGGPSPLPQWCRDLQLHPSQGAVLRIGPGETLEPLLLARPIGLAAQCLEAVIEMQLRALGREPASPGLSSQLAELLFALPAYHTLQRKALSHVPGAARPFPTSRVLRLLTGERGCQVASRLDEALQGSALRDQLRRRCQEEGDLLPGLLGLVGGVAGSASCGLGLGGAGALWSQYWTLLWAACAQSLDLNLGPWRDPRATAQQLSQALGQASLPQECEKELASLCHRLLHQSLIWSWDQGFCQALGSALGGQSSLPTSSGTAELLQQLFPPLLDALREPRLRRIFCQPADPAPVALGLCTLQTTLLWFLGRAQQYLAAWDPASFLLLIQKDLPPLLHEAEALYSLASEESLALEVEQQLGLEIQKLTAQIQLLPEESLSVFSQECHKQAMQGFKLYMPRGRYWRLRLCPEPPSAPSEYAGLVVRTVLEPVLQGLQGLPPQAQAPALGQALTAIVGAWLDHILTHGIRFSLQGALQLKQDFGVVRELLEEEQWSLSPDLRQTLLMLSIFQQLDGALLCLLQQPLPKSQVHRRPPCC

SEQ ID NO: 13515 - protein, 1079 aa, Homo sapiens
MESNFNTESSSTFTLQSSSETLFSIQLLDFKTSLLEALEELRMRREAEIHYEEQIGKIIVETQELKWQKETLQNQKETLAEQHKEAMAVFKKQLQMKMCALEEEKGKYQLATEIKEKEIEGLKETLKALQVSKYSLQKKVSEMEQKVQLHLLAKEDYHKQLSEIEKYYATITGQFGLVKENHEKLEQNVREAIQSNKRLSALNKKQEAEICSLKKELKKAASDLIKSKVTCQYKMGEENINLTIKEQKFQELQERLNMELELNEKINEEITHIQEEKQDIIISFQHMQQLLRQQIQANTEMEAELKVLKENNQTLERDNELQREKVKENEEKFLNLQNEHEKALGTWKRHAEELNGEINKIKNELSSLKETHIKLQEHYNKLCNQKTFEEDKKFQNVPEVNNENSEMSTEKSENTIIQKYNTEQEIREENMENFCSDTEYREKEEKKEGSFIEEIIIDDLQLFEKSFKNEIDTVVSQDENQSEISLSKTLSLDKEVISQGQTSNVTDNRKSVTTEIKDKICLEKDNGCTEFKSPNNHFVVLDTAIETEKIHLERTRGLDVHHTDVNLEVENNKTSFNSILNETAHNTYHNNNKDVSENEPFKQFRLLPGTREHALEKEITNSDQTKADLDSSLDIKKNPVPCQKYSLRNSSNVMLDDKQCKIKQIQLLTKKSECSILLSKQTSDFLQVCNDTLEKSELTVPCDIVIDHHVSYAAFSANSKLLLKNSDKNVHSMSMLVKPNSSPGGKTMCKNMSDMQNSQFNNCLGYLENTNVNISHLHLNNENSHASQAKDVKTAVHMKTCTETEFSNKKNQIDENQVTEATKNDLFLFVSINERQHTLLNNTEKTESLNDIVSGKMFSEGQLEESHSFHIEPSGDLVNRSGRSTFDLSTSDKKTEKTPVYMNFSDPGPWSKVNHIESQTASSSTPCISLLLKERPLDPSENKKIISMALCKNIGVDDVGKDIGPDTTSINRVADTLNNWSIHPDPKGEPSEEKNAMAKTFYDSSFPTEHVKTKPLISTPLQSHLQAIKTTKNTSGDDDWQSLITNQLNKSENLLSLENDNQPKKRKAEETLEKNNRLK

SEQ ID NO: 13516 - protein, 469 aa, Homo sapiens
MESNFNTESSSTFTLQSSSETLFSIQLLDFKTSLLEALEELRMRREAEIHYEEQIGKIIVETQELKWQKETLQNQKETLAEQHKEAMAVFKKQLQMKMCALEEEKGKYQLATEIKEKEIEGLKETLKALQVSKYSLQKKVSEMEQKVQLHLLAKEDYHKQLSEIEKYYATITGQFGLVKENHEKLEQNVREAIQSNKRLSALNKKQEAEICSLKKELKKAASDLIKSKVTCQYKMGEENINLTIKEQKFQELQERLNMELELNEKINEEITHIQEEKQQLLRQQIQANTEMEAELKVLKENNQTLERDNELQREKVKENEEKFLNLQNEHEKALGTWKRHAEELNGEINKIKNELSSLKETHIKLQEHYNKLCNQKTFEEDKKFQNVPEVNNENSEMSTEKSENTIIQKYNTEQEIREENMENFCSDTEYREKEEKKEGSFIEEIIIDGNLKIILIFSNLYVDIYSKYF

SEQ ID NO: 13517 - protein, 181 aa, Homo sapiens
MGNIFGNLLKSLIGKKEMRILMVGLDAAGKTTILYKLKLGEIVTTIPTIGFNVETVEYKNISFTVWDVGGQDKIRPLWRHYFQNTQGLIFVVDSNDRERVNEAREELMRMLAEDELRDAVLLVFANKQDLPNAMNAAEITDKLGLHSLRHRNWYIQATCATSGDGLYEGLDWLANQLKNKK

SEQ ID NO: 13518 - protein, 144 aa, Homo sapiens
MGNIFGNLLKSLIGKKEMRILMVGLDAAGKTTILYKLKLGEIVTTIPTIGLIFVVDSNDRERVNEAREELMRMLAEDELRDAVLLVFANKQDLPNAMNAAEITDKLGLHSLRHRNWYIQATCATSGDGLYEGLDWLANQLKNKK

SEQ ID NO: 13519 - protein, 158 aa, Homo sapiens
MLLLDCNPEVDGLKHLLETGASVNAPPDPCKQSPVHLAAGSGLACFLLWQLQTGADLNQQDVLGEAPLHKAAKVGSLECLSLLVASDAQIDLCNKNGQTAEDLAWSCGFPDCAKFLTTIKCMQTIKASEHPDRNDCVAVLRQKRSLGSVENTSGKRKC

SEQ ID NO: 13520 - protein, 261 aa, Homo sapiens
MSGEIAMCEPEFGNDKAREPSVGGRWRVSWYERFVQPCLVELLGSALFIFIGCLSVIENGTDTGLLQPALAHGLALGLVIATLGNISGGHFNPAVSLAAMLIGGLNLVMLLPYWVSQLLGGMLGAALAKAVSPEERFWNASGAAFVTVQEQGQVAGALVAEIILTTLLALAVCMGAINEKTKGPLAPFSIGFAVTVDILAGGPVSGGCMNPARAFGPAVVANHWNFHWIYWLGPLLAGLLVGLLIRCFIGDGKTRLILKAR

SEQ ID NO: 13521 - protein, 183 aa, Homo sapiens
MATPRPCADGPCCSHPSAVLGVQQTLEEMDFERGIWSAALNGDLGRVKHLIQKAEDPSQPDSAGYTALHYASRNGHYAVCQFLLESGAKCDAQTHGGATALHRASYCGHTEIARLLLSHGSNPRVVDDDGMTSLHKAAERGHGDICSLLLQHSPALKAIRDRKARLACDLLPCNSDLRDLLSS

SEQ ID NO: 13522 - protein, 295 aa, Homo sapiens
MQPEGAEKGKSFKQRLVLKSSLAKETLSEFLGTFILIVLGCGCVAQAILSRGRFGGVITINVGFSMAVAMAIYVAGGVSGGHINPAVSLAMCLFGRMKWFKLPFYVGAQFLGAFVGAATVFGIYYDGLMSFAGGKLLIVGENATAHIFATYPAPYLSLANAFADQVVATMILLIIVFAIFDSRNLGAPRGLEPIAIGLLIIVIASSLGLNSGCAMNPARDLSPRLFTALAGWGFEVFRAGNNFWWIPVVGPLVGAVIGGLIYVLVIEIHHPEPDSVFKTEQSEDKPEKYELSVIM

SEQ ID NO: 13523 - protein, 254 aa, Homo sapiens
MDQSSEGCMKKISSVNLDKLINDFSQIEKKMVETNGKNNILDIQLEKSNCLLKVMQAKEVSIKEECATLHNIIKGLQQTIEYQQNLKGENEQLKISADLIKEKLKSHEQEYKNNIAKLVSEMKIKEEGYKKEISKLYQDMQRKVELNEEKHKELIEKKEMEISELNAKLRSQEKEKQNEIIKLQLEFDAKLARVQTKSKSYQDSTVLPQSIYRRKLQHFQEEKNKEIAILRNTIRDLEQRLSVGKDSHLKRRRF

SEQ ID NO: 13524 - protein, 198 aa, Homo sapiens
MDQSSEGCMKKISSVNLDKLINDFSQIEKKMVETNGKNNILDIQLEKSNCLLKVMQAKEVSIKEECATLHNIIKGLQQTIEYQQNLKVELNEEKHKELIEKKEMEISELNAKLRSQEKEKQNEIIKLQLEFDAKLARVQTKSKSYQDSTVLPQSIYRRKLQHFQEEKNKEIAILRNTIRDLEQRLSVGKDSHLKRRRF

SEQ ID NO: 13525 - protein, 265 aa, Homo sapiens
MGAAVFFGCTFVAFGPAFALFLITVAGDPLRVIILVAGAFFWLVSLLLASVVWFILVHVTDRSDARLQYGLLIFGAAVSVLLQEVFRFAYYKLLKKADEGLASLSEDGRSPISIRQMAYVSGLSFGIISGVFSVINILADALGPGVVGIHGDSPYYFLTSAFLTAAIILLHTFWGVVFFDACERRRYWALGLVVGSHLLTSGLTFLNPWYEASLLPIYAVTVSMGLWAFITAGGSLRSIQRSLLCRRQEDSRVMVYSALRIPPED

SEQ ID NO: 13526 - protein, 247 aa, Homo sapiens
MGAAVFFGCTFVAFGPAFALFLITVAGDPLRVIILVAGAFFWLVSLLLASVVWFILVHVTDRSDARLQYGLLIFGAAVSVLLQEVFRFAYYKLLKKADEGLASLSEDGRSPISIRQMAYVSGLSFGIISGVFSVINILADALGPGVVGIHGDSPYYFLTSAFLTAAIILLHTFWGVVFFDACERRRYWALGLVVGSHLLTSGLTFLNPWYEASLLPIYAVTVSMGLWAFITAGGSLRSIQRSLLCKD

SEQ ID NO: 13527 - protein, 195 aa, Homo sapiens
MGAAVFFGCTFVAFGPAFALFLITVAGDPLRVIILVAGRCSALPTTSCLISGLSFGIISGVFSVINILADALGPGVVGIHGDSPYYFLTSAFLTAAIILLHTFWGVVFFDACERRRYWALGLVVGSHLLTSGLTFLNPWYEASLLPIYAVTVSMGLWAFITAGGSLRSIQRSLLCRRQEDSRVMVYSALRIPPED

SEQ ID NO: 13528 - protein, 238 aa, Homo sapiens
MVLLLLVAIPLLVHSSRGPAHYEMLGRCRMVCDPHGPRGPGPDGAPASVPPFPPGAKGEVGRRGKAGLRGPPGPPGPRGPPGEPGRPGPPGPPGPGPGGVAPAAGYVPRIAFYAGLRRPHEGYEVLRFDDVVTNVGNAYEAASGKFTCPMPGVYFFAYHVLMRGGDGTSMWADLMKNGQVRASAIAQDADQNYDYASNSVILHLDVGDEVFIKLDGGKVHGGNTNKYSTFSGFIIYPD

SEQ ID NO: 13529 - protein, 356 aa, Homo sapiens
MSNVNLSVSDFWRVMMRVCWLVRQDSRHQRIRLPHLEAVVIGRGPETKITDKKCSRQQVQLKAECNKGYVKVKQVGVNPTSIDSVVIGKDQEVKLQPGQVLHMVNELYPYIVEFEEEAKNPGLETHRKRKRSGNSDSIERDAAQEAEAGTGLEPGSNSGQCSVPLKKGKDAPIKKESLGHWSQGLKISMQDPKMQVYKDEQVVVIKDKYPKARYHWLVLPWTSISSLKAVAREHLELLKHMHTVGEKVIVDFAGSSKLRFRLGYHAIPSMSHVHLHVISQDFDSPCLKNKKHWNSFNTEYFLESQAVIEMVQEAGRVTVRDGMPELLKLPLRCHECQQLLPSIPQLKEHLRKHWTQ

SEQ ID NO: 13530 - protein, 168 aa, Homo sapiens
MQDPKMQVYKDEQVVVIKDKYPKARYHWLVLPWTSISSLKAVAREHLELLKHMHTVGEKVIVDFAGSSKLRFRLGYHAIPSMSHVHLHVISQDFDSPCLKNKKHWNSFNTEYFLESQAVIEMVQEAGRVTVRDGMPELLKLPLRCHECQQLLPSIPQLKEHLRKHWTQ

SEQ ID NO: 13531 - protein, 284 aa, Homo sapiens
MSNVNLSVSDFWRVMMRVCWLVRQDSRHQRIRLPHLEAVVIGRGPETKITDKKCSRQQVQLKAECNKGYVKVKQVGVNPTSIDSVVIGKDQEVKLQPGQVLHMESLGHWSQGLKISMQDPKMQVYKDEQVVVIKDKYPKARYHWLVLPWTSISSLKAVAREHLELLKHMHTVGEKVIVDFAGSSKLRFRLGYHAIPSMSHVHLHVISQDFDSPCLKNKKHWNSFNTEYFLESQAVIEMVQEAGRVTVRDGMPELLKLPLRCHECQQLLPSIPQLKEHLRKHWTQ

SEQ ID NO: 13532 - protein, 254 aa, Homo sapiens
MVNELYPYIVEFEEEAKNPGLETHRKRKRSGNSDSIERDAAQEAEAGTGLEPGSNSGQCSVPLKKGKDAPIKKESLGHWSQGLKISMQDPKMQVYKDEQVVVIKDKYPKARYHWLVLPWTSISSLKAVAREHLELLKHMHTVGEKVIVDFAGSSKLRFRLGYHAIPSMSHVHLHVISQDFDSPCLKNKKHWNSFNTEYFLESQAVIEMVQEAGRVTVRDGMPELLKLPLRCHECQQLLPSIPQLKEHLRKHWTQ

SEQ ID NO: 13533 - protein, 288 aa, Homo sapiens
MMRVCWLVRQDSRHQRIRLPHLEAVVIGRGPETKITDKKCSRQQEFEEEAKNPGLETHRKRKRSGNSDSIERDAAQEAEAGTGLEPGSNSGQCSVPLKKGKDAPIKKESLGHWSQGLKISMQDPKMQVYKDEQVVVIKDKYPKARYHWLVLPWTSISSLKAVAREHLELLKHMHTVGEKVIVDFAGSSKLRFRLGYHAIPSMSHVHLHVISQDFDSPCLKNKKHWNSFNTEYFLESQAVIEMVQEAGRVTVRDGMPELLKLPLRCHECQQLLPSIPQLKEHLRKHWTQ

SEQ ID NO: 13534 - protein, 113 aa, Homo sapiens
MQVYKDEQVVVIKDKYPKARYHWLVLPWTSISSLKAVAREHLELLKHMHTVGEKVIVDFAGSSKLRFRLGYHAIPSMSHVHLHVISQDFDSPCLKNKKHWNSFNTEYFLESQE

SEQ ID NO: 13535 - protein, 342 aa, Homo sapiens
MMRVCWLVRQDSRHQRIRLPHLEAVVIGRGPETKITDKKCSRQQVQLKAECNKGYVKVKQVGVNPTSIDSVVIGKDQEVKLQPGQVLHMVNELYPYIVEFEEEAKNPGLETHRKRKRSGNSDSIERDAAQEAEAGTGLEPGSNSGQCSVPLKKGKDAPIKKESLGHWSQGLKISMQDPKMQVYKDEQVVVIKDKYPKARYHWLVLPWTSISSLKAVAREHLELLKHMHTVGEKVIVDFAGSSKLRFRLGYHAIPSMSHVHLHVISQDFDSPCLKNKKHWNSFNTEYFLESQAVIEMVQEAGRVTVRDGMPELLKLPLRCHECQQLLPSIPQLKEHLRKHWTQ

SEQ ID NO: 13536 - protein, 337 aa, Homo sapiens
MSNVNLSVSDFWRVMMRVCWLVRQDSRHQRIRLPHLEAVVIGRGPETKITDKKCSRQQVQLKAECNKGYVKVKQVGVNPTSIDSVVIGKDQEVKLQPGQVLHMVNELYPYIVEFEEEAKNPGLETHRKRKRSGNSDSIERDAAQEAEAGTGLEPGSNSGQCSVPLKKGKDAPIKMQVYKDEQVVVIKDKYPKARYHWLVLPWTSISSLKAVAREHLELLKHMHTVGEKVIVDFAGSSKLRFRLGYHAIPSMSHVHLHVISQDFDSPCLKNKKHWNSFNTEYFLESQAVIEMVQEAGRVTVRDGMPELLKLPLRCHECQQLLPSIPQLKEHLRKHWTQ

SEQ ID NO: 13537 - protein, 292 aa, Homo sapiens
MMRVCWLVRQDSRHQRIRLPHLEAVVIGRGPETKITDKKCSRQQVQLKAECNKGYVKVKQVGVNPTSIDSVVIGKDQEVKLQPGQVLHMVNELYPYIVEFEEEAKNPGLETHRKRKRSGNSDSIERDAAQEAEAGTGLEPGSNSGQCSVPLKKGKDAPIKKESLGHWSQGLKISMQDPKMQVYKDEQVVVIKDKYPKARYHWLVLPWTSISSLKAVAREHLELLKHMHTVGEKVIVDFAGSSKLRFRLGYHAIPSMSHVHLHVISQDFDSPCLKNKKHWNSFNTEYFLESQE

SEQ ID NO: 13538 - protein, 302 aa, Homo sapiens
MSNVNLSVSDFWRVMMRVCWLVRQDSRHQRIRLPHLEAVVIGRGPETKITDKKCSRQQEFEEEAKNPGLETHRKRKRSGNSDSIERDAAQEAEAGTGLEPGSNSGQCSVPLKKGKDAPIKKESLGHWSQGLKISMQDPKMQVYKDEQVVVIKDKYPKARYHWLVLPWTSISSLKAVAREHLELLKHMHTVGEKVIVDFAGSSKLRFRLGYHAIPSMSHVHLHVISQDFDSPCLKNKKHWNSFNTEYFLESQAVIEMVQEAGRVTVRDGMPELLKLPLRCHECQQLLPSIPQLKEHLRKHWTQ

SEQ ID NO: 13539 - protein, 306 aa, Homo sapiens
MSNVNLSVSDFWRVMMRVCWLVRQDSRHQRIRLPHLEAVVIGRGPETKITDKKCSRQQVQLKAECNKGYVKVKQVGVNPTSIDSVVIGKDQEVKLQPGQVLHMVNELYPYIVEFEEEAKNPGLETHRKRKRSGNSDSIERDAAQEAEAGTGLEPGSNSGQCSVPLKKGKDAPIKKESLGHWSQGLKISMQDPKMQVYKDEQVVVIKDKYPKARYHWLVLPWTSISSLKAVAREHLELLKHMHTVGEKVIVDFAGSSKLRFRLGYHAIPSMSHVHLHVISQDFDSPCLKNKKHWNSFNTEYFLESQE

SEQ ID NO: 13540 - protein, 49 aa, Homo sapiens
MMRVCWLVRQDSRHQRIRLPHLEAVVIGRGPETKITDKKCSRQQVESRV

SEQ ID NO: 13541 - protein, 192 aa, Homo sapiens
MMRVCWLVRQDSRHQRIRLPHLEAVVIGRGPETKITDKKCSRQQVQLKAECNKGYVKVKQVGVNPTSIDSVVIGKDQEVKLQPGQVLHMVNELYPYIVEFEEEAKNPGLETHRKRKRSGNSDSIERDAAQEAEAGTGLEPGSNSGQCSVPLKKGKDAPIKKESLGHWSQGLKISMQDPKMQPCTSSCDQPGF

SEQ ID NO: 13542 - protein, 692 aa, Homo sapiens
MKIFCSRANPTTGSVEWLEEDEHYDYHQEIARSSYADMLHDKDRNVKYYQGIRAAVSRVKDRGQKALVLDIGTGTGLLSMMAVTAGADFCYAIEVFKPMADAAVKIVEKNGFSDKIKVINKHSTEVTVGPEGDMPCRANILVTELFDTELIGEGALPSYEHAHRHLVEENCEAVPHRATVYAQLVESGRMWSWNKLFPIHVQTSLGEQVIVPPVDVESCPGAPSVCDIQLNQVSPADFTVLSDVLPMFSIDFSKQVSSSAACHSRRFEPLTSGRAQVVLSWWDIEMDPEGKIKCTMAPFWAHSDPEEMQWRDHWMQCVYFLPQEEPVVQGSALYLVAHHDDYCVWYSLQRTSPEKNERVRQMRPVCDCQAHLLWNRPRFGEINDQDRTDRYVQALRTVLKPDSVCLCVSDGSLLSVLAHHLGVEQVFTVESSAASHKLLRKIFKANHLEDKINIIEKRPELLTNEDLQGRKVSLLLGEPFFTTSLLPWHNLYFWYVRTAVDQHLGPGAMVMPQAASLHAVVVEFRDLWRIRSPCGDCEGFDVHIMDDMIKRALDFRESREAEPHPLWEYPCRSLSEPWQILTFDFQQPVPLQPLCAEGTVELRRPGQSHAAVLWMEYHLTPECTLSTGLLEPADPEGGCCWNPHCKQAVYFFSPAPDPRALLGGPRTVSYAVEFHPDTGDIIMEFRHADTPD

SEQ ID NO: 13543 - protein, 544 aa, Homo sapiens
MKIFCSRANPTTGSVEWLEEDEHYDYHQEIARSSYADMLHDKDRNVKYYQGIRAAVSRVKDRGQKALVLDIGTGTGLLSMMAVTAGADFCYAIEENCEAVPHRATVYAQLVESGRMWSWNKLFPIHVQTSLGEQVIVPPVDVESCPGAPSVCDIQLNQVSPADFTVLSDVLPMFSIDFSKQVSSSAACHSRRFEPLTSGRAQVVLSWWDIEMDPEGKIKCTMAPFWAHSDPEEMQWRDHWMQCVYFLPQEEPVVQGSALYLVAHHDDYCVWYSLQRTSPEKNERVRQMRPVCDCQAHLLWNRPRFGEINDQDRTDRYVQALRTVSLLLGEPFFTTSLLPWHNLYFWYVRTAVDQHLGPGAMVMPQAASLHAVVVEFRDLWRIRSPCGDCEGFDVHIMDDMIKRALDFRESREAEPHPLWEYPCRSLSEPWQILTFDFQQPVPLQPLCAEGTVELRRPGQSHAAVLWMEYHLTPECTLSTGLLEPADPEGGCCWNPHCKQAVYFFSPAPDPRALLGGPRTVSYAVEFHPDTGDIIMEFRHADTPD

SEQ ID NO: 13544 - protein, 642 aa, Homo sapiens
MKIFCSRANPTTGSVEWLEEDEHYDYHQEIARSSYADMLHDKDRVFKPMADAAVKIVEKNGFSDKIKVINKHSTEVTVGPEGDMPCRANILVTELFDTELIGEGALPSYEHAHRHLVEENCEAVPHRATVYAQLVESGRMWSWNKLFPIHVQTSLGEQVIVPPVDVESCPGAPSVCDIQLNQVSPADFTVLSDVLPMFSIDFSKQVSSSAACHSRRFEPLTSGRAQVVLSWWDIEMDPEGKIKCTMAPFWAHSDPEEMQWRDHWMQCVYFLPQEEPVVQGSALYLVAHHDDYCVWYSLQRTSPEKNERVRQMRPVCDCQAHLLWNRPRFGEINDQDRTDRYVQALRTVLKPDSVCLCVSDGSLLSVLAHHLGVEQVFTVESSAASHKLLRKIFKANHLEDKINIIEKRPELLTNEDLQGRKVSLLLGEPFFTTSLLPWHNLYFWYVRTAVDQHLGPGAMVMPQAASLHAVVVEFRDLWRIRSPCGDCEGFDVHIMDDMIKRALDFRESREAEPHPLWEYPCRSLSEPWQILTFDFQQPVPLQPLCAEGTVELRRPGQSHAAVLWMEYHLTPECTLSTGLLEPADPEGGCCWNPHCKQAVYFFSPAPDPRALLGGPRTVSYAVEFHPDTGDIIMEFRHADTPD

SEQ ID NO: 13545 - protein, 567 aa, Homo sapiens
MKIFCSRANPTTGSVEWLEEDEHYDYHQEIARSSYADMLHDKDRNVKYYQGIRAAVSRVKDRGQKALVLDIGTGTGLLSMMAVTAGADFCYAIEVFKPMADAAVKIVEKNGFSDKIKVINKHSTEVTVGPEGDMPCRANILVTELFDTELIGEGALPSYEHAHRHLVEENCEAVPHRATVYAQLVESGRMWSWNKLFPIHVQTSLGEQVIVPPVDVESCPGAPSVCDIQLNQVSPADFTVLSDVLPMFSIDFSKQVSSSAACHSRRFEPLTSGRAQVVLSWWDIEMDPEGKIKCTMAPFWAHSDPEEMQWRDHWMQCVYFLPQEEPVVQGSALYLVAHHDDYCVWYSLQRTSPEKNERVRQMRPVCDCQAHLLWNRPRFGEINDQDRTDRYVQALRTVLKPDSVCLCVSDGSLLSVLAHHLGVEQVFTVESSAASHKLLRKIFKANHLEDKINIIEKRPELLTNEDLQGRKVSLLLGEPFFTTSLLPWHNLYFWYVRTAVDQHLGPGAMVMPQAASLHAVVVEFRVCREQQDVPLVLAATLPCVLAGGCGWGCSFLTGPVADPEPLW

SEQ ID NO: 13546 - protein, 675 aa, Homo sapiens
MAKHGADEPSSRSGSPDREGRASEDRSLLHQRLAVRELIDTEVSYLHMLQLCASDIRSRLQQLPQGDLDVLFSNIDDIIKVNSRFLHDLQETASKEEEQVQLVGNIFLEFQEELEQVYKVYCASYDQALLLVDTYRKEPELQRHIQGIVEAVVPQAGSSGLSFLLVIPLQRITRYPLLLQKILENTVPDASAYPVLQRAVSALQDVNTNINEYKMRKEVASKYTKVEQLTLRERLARINTHTLSKKTTRLSQLLKQEAGLIPRTEDKEFDDLEERFQWVSLCVTELKNNVAAYLDNLQAFLYFRPHEYNLDIPEGPAVQYCNLARDLHLEAFLKFKQRLEGLVWQPLCSLAKALLGPQNLIKKRLDKLLDFERVEEKLLEVGSVTYQEEAARHTYQALNSLLVAELPQFNQLVMQWLGQIMCTFVTLQRDLAKQVLQRAEGSMAQLPHHHVPEPAFRKLVEDALGRTSNQLRSFQETFEKVQPPPTTQPLLPGSERQVQALLSRYGPGKLYQVTSNISGTGTLDLTLPRGQIVAILQNKDTKGNSGRWLVDTGGHRGYVPAGKLQLYHVVPSAEELRRQAGLNKDPRCLTPEPSPALVPSIPTMNQVIAAYPFVARSSHEVSLQAGQPVTILEAQDKKGNPEWSLVEVNGQRGYVPSGFLARARSPVLWGWSLPS

SEQ ID NO: 13547 - protein, 399 aa, Homo sapiens
MAATAAAVVAEEDTELRDLLVQTLENSGVLNRIKAELRAAVFLALEEQEKVENKTPLVNESLKKFLNTKDGRLVASLVAEFLQFFNLDFTLAVFQPETSTLQGLEGRENLARDLGIIEAEGTVGGPLLLEVIRRCQQKEKGPTTGEGALDLSDVHSPPKSPEGKTSAQTTPSKIPRYKGQGKKKTSGQKAGDKKANDEANQSDTSVSLSEPKSKSSLHLLSHETKIGSFLSNRTLDGKDKAGLCPDEDDMEGDSFFDDPIPKPEKTYGLRKEPRKQAGSLASLSDAPPLKSGLSSLAGAPSLKDSESKRGNTVLKDLKLISDKIGSLGLGTGEDDDYVDDFNSTSHRSEKSEISIGEEIEEDLSVEIDDINTSDKLDDLTQDLTVSQLSDVADYLEDVA

SEQ ID NO: 13548 - protein, 379 aa, Homo sapiens
MAATAAAVVAEEDTELRDLLVQTLENSGVLNRIKAELRAAVFLALEEQEKVENKTPLVNESLKKFLNTKDGRLVASLVAEFLQFFNLDFTLAVFQPETSTLQGLEGRENLARDLGIIEAEGTVGGPLLLEVIRRCQQKEKGPTTGEGALDLSDVHSPPKSPEGKTSAQTTPSKKANDEANQSDTSVSLSEPKSKSSLHLLSHETKIGSFLSNRTLDGKDKAGLCPDEDDMEGDSFFDDPIPKPEKTYGLRKEPRKQAGSLASLSDAPPLKSGLSSLAGAPSLKDSESKRGNTVLKDLKLISDKIGSLGLGTGEDDDYVDDFNSTSHRSEKSEISIGEEIEEDLSVEIDDINTSDKLDDLTQDLTVSQLSDVADYLEDVA

SEQ ID NO: 13549 - protein, 149 aa, Homo sapiens
MEGDSFFDDPIPKPEKTYGLRKEPRKQAGSLASLSDAPPLKSGLSSLAGAPSLKDSESKRGNTVLKDLKLISDKIGSLGLGTGEDDDYVDDFNSTSHRSEKSEISIGEEIEEDLSVEIDDINTSDKTITQLECLLSIGALHFKNTADIF

SEQ ID NO: 13550 - protein, 163 aa, Homo sapiens
MDALEGESFALSFSSASDAEFDAVVGYLEDIIMDDEFQLLQRNFMDKYYLEFEDTEENKLIYTPIFNEYISLVEKYIEEQLLQRIPEFNMAAFTTTLQHHKDEVAGDIFDMLLTFTDFLAFKEMFLDYRAEKEGRGLDLSSGLVVTSLCKSSSLPASQNNLRH

SEQ ID NO: 13551 - protein, 152 aa, Homo sapiens
MRSSASDAEFDAVVGYLEDIIMDDEFQLLQRNFMDKYYLEFEDTEENKLIYTPIFNEYISLVEKYIEEQLLQRIPEFNMAAFTTTLQHHKDEVAGDIFDMLLTFTDFLAFKEMFLDYRAEKEGRGLDLSSGLVVTSLCKSSSLPASQNNLRH

SEQ ID NO: 13552 - protein, 450 aa, Homo sapiens
MLWKITDNVKYEEDCEDRHDGSSNGNPRVPHLSSAGQHLYSPAPPLSHTGVAEYQPPPYFPPPYQQLAYSQSADPYSHLGEAYAAAINPLHQPAPTGSQQQAWPGRQSQEGAGLPSHHGRPAGLLPHLSGLEAGAVSARRDAYRRSDLLLPHAHALDAAGLAENLGLHDMPHQMDEVQNVDDQHLLLHDQTVIRKGPISMTKNPLNLPCQKELVGAVMNPTEVFCSVPGRLSLLSSTSKYKVTVAEVQRRLSPPECLNASLLGGVLRRAKSKNGGRSLREKLDKIGLNLPAGRRKAAHVTLLTSLVEGEAVHLARDFAYVCEAEFPSKPVAEYLTRPHLGGRNEMAARKNMLLAAQQLCKEFTELLSQDRTPHGTSRLAPVLETNIQNCLSHFSLITHGFGSQAICAAVSALQNYIKEALIVIDKSYMNPGDQSPADSNKTLEKMEKHRK

SEQ ID NO: 13553 - protein, 281 aa, Homo sapiens
MPHQMDEVQNVDDQHLLLHDQTVIRKGPISMTKNPLNLPCQKELVGAVMNPTEVFCSVPGRLSLLSSTSKYKVTVAEVQRRLSPPECLNASLLGGVLRRAKSKNGGRSLREKLDKIGLNLPAGRRKAAHVTLLTSLVEGEAVHLARDFAYVCEAEFPSKPVAEYLTRPHLGGRNEMAARKNMLLAAQQLCKEFTELLSQDRTPHGTSRLAPVLETNIQNCLSHFSLITHGFGSQAICAAVSALQNYIKEALIVIDKSYMNPGDQSPADSNKTLEKMEKHRK

SEQ ID NO: 13554 - protein, 751 aa, Homo sapiens
MPALGWAVAAILMLQTAMAEPSPGTLPRKAGVFSDLSNQELKAVHSFLWSKKELRLQPSSTTTMAKNTVFLIEMLLPKKYHVLRFLDKGERHPVREARAVIFFGDQEHPNVTEFAVGPLPGPCYMRALSPRPGYQSSWASRPISTAEYALLYHTLQEATKPLHQFFLNTTGFSFQDCHDRCLAFTDVAPRGVASGQRRSWLIIQRYVEGYFLHPTGLELLVDHGSTDAGHWAVEQVWYNGKFYGSPEELARKYADGEVDVVVLEDPLPGGKGHDSTEEPPLFSSHKPRGDFPSPIHVSGPRLVQPHGPRFRLEGNAVLYGGWSFAFRLRSSSGLQVLNVHFGGERIAYEVSVQEAVALYGGHTPAGMQTKYLDVGWGLGSVTHELAPGIDCPETATFLDTFHYYDADDPVHYPRALCLFEMPTGVPLRRHFNSNFKGGFNFYAGLKGQVLVLRTTSTVYNYDYIWDFIFYPNGVMEAKMHATGYVHATFYTPEGLRHGTRLHTHLIGNIHTHLVHYRVDLDVAGTKNSFQTLQMKLENITNPWSPRHRVVQPTLEQTQYSWERQAAFRFKRKLPKYLLFTSPQENPWGHKRTYRLQIHSMADQVLPPGWQEEQAITWARYPLAVTKYRESELCSSSIYHQNDPWHPPVVFEQFLHNNENIENEDLVAWVTVGFLHIPHSEDIPNTATPGNSVGFLLRPFNFFPEDPSLASRDTVIVWPRDNGPNYVQRWIPEDRDCSMPPPFSYNGTYRPV

SEQ ID NO: 13555 - protein, 770 aa, Homo sapiens
MPALGWAVAAILMLQTAMAEPSPGTLPRKAGVFSDLSNQELKAVHSFLWSKKELRLQPSSTTTMAKNTVFLIEMLLPKKYHVLRFLDKGERHPVREARAVIFFGDQEHPNVTEFAVGPLPGPCYMRALSPRPGYQSSWASRPISTAEYALLYHTLQEATKPLHQFFLNTTGFSFQDCHDRCLAFTDVAPRGVASGQRRSWLIIQRYVEGYFLHPTGLELLVDHGSTDAGHWAVEQVWYNGKFYGSPEELARKYADGEVDVVVLEDPLPGGKGHDSTEEPPLFSSHKPRGDFPSPIHVSGPRLVQPHGPRFRLEGNAVLYGGWSFAFRLRSSSGLQVLNVHFGGERIAYEVSVQEAVALYGGHTPAGMQTKYLDVGWGLGSVTHELAPGIDCPETATFLDTFHYYDADDPVHYPRALCLFEMPTGVPLRRHFNSNFKGGFNFYAGLKGQVLVLRTTSTVYNYDYIWDFIFYPNGVMEAKMHATGYVHATFYTPEGLRHGTRLHTHLIGNIHTHLVHYRVDLDVAGTKNSFQTLQMKLENITNPWSPRHRVVQPTLEQTQYSWERQAAFRFKRKLPKYLLFTSPQENPWGHKRTYRLQIHSMADQVLPPGWQEEQAITWARTEGGQPRALSQAASPVPGRYPLAVTKYRESELCSSSIYHQNDPWHPPVVFEQFLHNNENIENEDLVAWVTVGFLHIPHSEDIPNTATPGNSVGFLLRPFNFFPEDPSLASRDTVIVWPRDNGPNYVQRWIPEDRDCSMPPPFSYNGTYRPV

SEQ ID NO: 13556 - protein, 511 aa, Homo sapiens
MKFFLLLFTIGFCWAQYSPNTQQGRTSIVHLFEWRWVDIALECERYLAPKGFGGVQVSPPNENVAIYNPFRPWWERYQPVSYKLCTRSGNEDEFRNMVTRCNNVGVRIYVDAVINHMCGNAVSAGTSSTCGSYFNPGSRDFPAVPYSGWDFNDGKCKTGSGDIENYNDATQVRDCRLTGLLDLALEKDYVRSKIAEYMNHLIDIGVAGFRLDASKHMWPGDIKAILDKLHNLNSNWFPAGSKPFIYQEVIDLGGEPIKSSDYFGNGRVTEFKYGAKLGTVIRKWNGEKMSYLKNWGEGWGFVPSDRALVFVDNHDNQRGHGAGGASILTFWDARLYKMAVGFMLAHPYGFTRVMSSYRWPRQFQNGNDVNDWVGPPNNNGVIKEVTINPDTTCGNDWVCEHRWRQIRNMVIFRNVVDGQPFTNWYDNGSNQVAFGRGNRGFIVFNNDDWSFSLTLQTGLPAGTYCDVISGDKINGNCTGIKIYVSDDGKAHFSISNSAEDPFIAIHAESKL

SEQ ID NO: 13557 - protein, 265 aa, Homo sapiens
MKFFLLLFTIGFCWAQYSPNTQQGRTSIVHLFEWRWVDIALECERYLAPKGFGGVQVSPPNENVAIYNPFRPWWERYQPVSYKLCTRSGNEDEFRNMVTRCNNVGVRIYVDAVINHMCGNAVSAGTSSTCGSYFNPGSRDFPAVPYSGWDFNDGKCKTGSGDIENYNDATQVRDCRLTGLLDLALEKDYVRSKIAEYMNHLIDIGVAGFRLDASKHMWPGDIKAILDKLHNLNSNWFPAGSKPFIYQEVHQYLYAYKISSYSLEN

SEQ ID NO: 13558 - protein, 384 aa, Homo sapiens
MAGILAWFWNERFWLPHNVTWADLKNTEEATFPQAEDLYLAFPLAFCIFMVRLIFERFVAKPCAIALNIQANGPQIAPPNAILEKVFTAITKHPDEKRLEGLSKQLDWDVRSIQRWFRQRRNQEKPSTLTRFCESMWRFSFYLYVFTYGVRFLKKTPWLWNTRHCWYNYPYQPLTTDLHYYYILELSFYWSLMFSQFTDIKRKDFGIMFLHHLVSIFLITFSYVNNMARVGTLVLCLHDSADALLEAAKMANYAKFQKMCDLLFVMFAVVFITTRLGIFPLWVLNTTLFESWEIVGPYPSWWVFNLLLLLVQGLNCFWSYLIVKIACKAVSRGKVSKDDRSDIESSSDEEDSEPPGKNPHTATTTNGTSGTNGYLLTGSCSMDD

SEQ ID NO: 13559 - protein, 392 aa, Homo sapiens
MAGILAWFWNERFWLPHNVTWADLKNTEEATFPQAEDLYLAFPLAFCIFMVRLIFERFVAKPCAIALNIQANGPQIAPPNAILEKVFTAITKHPDEKRLEGLSKQLDWDVRSIQRWFRQRRNQEKPSTLTRFCESMWRFSFYLYVFTYGVRFLKKTPWLWNTRHCWYNYPYQPLTTDLHYYYILELSFYWSLMFSQFTDIKRKDFGIMFLHHLVSIFLITFSYVNNMARVGTLVLCLHDSADALLEAAKMANYAKFQKMCDLLFVMFAVVFITTRLGIFPLWVLNTTLFESWEIVGPYPSWWVFNLLLLLVQGLNCFWSYLIVKIACKAVSRGKAGKWNPLHVSKDDRSDIESSSDEEDSEPPGKNPHTATTTNGTSGTNGYLLTGSCSMDD

SEQ ID NO: 13560 - protein, 418 aa, Homo sapiens
MIHSLFLINSSGDIFLEKHWKSVVSRSVCDYFFEAQERATEAENVPPVIPTPHHYLLSVYRHKIFFVAVIQTEVPPLFVIEFLHRVVDTFQDYFGVCSEPVIKDNVVVVYEVLEEMLDNGFPLATESNILKELIKPPTILRTVVNTITGSTNVGDQLPTGQLSVVPWRRTGVKYTNNEAYFDVIEEIDAIIDKSGSTITAEIQGVIDACVKLTGMPDLTLSFMNPRLLDDVSFHPCVRFKRWESERILSFIPPDGNFRLLSYHVSAQNLVAIPVYVKHNISFRDSSSLGRFEITVGPKQTMGKTIEGVTVTSQMPKGVLNMSLTPSQGTHTFDPVTKMLSWDVGKINPQKLPSLKGTMSLQAGASKPDENPTINLQFKIQQLAISGLKVNRLDMYGEKYKPFKGIKYMTKAGKFQVRT

SEQ ID NO: 13561 - protein, 273 aa, Homo sapiens
MIHSLFLINSSGDIFLEKHWKSVVSRSVCDYFFEAQERATEAENVPPVIPTPHHYLLSVYRHKIFFVAVIQTEVPPLFVIEFLHRVVDTFQDYFGVCSEPVIKDNVVVVYEVLEEMLDNGFPLATESNILKELIKPPTILRTVVNTITGSTNVGDQLPTGQLSVVPWRRTGVKYTNNEAYFDVIEEIDAIIDKSGSTITAEIQGVIDACVKLTGMPDLTLSFMNPRLLDDVSFHPCVRFKRWESERILSFIPPDGNFRLLSYHVSAQKCCLGM

SEQ ID NO: 13562 - protein, 525 aa, Homo sapiens
MAAAPPLRDRLSFLHRLPILLKGTSDDDVPCPGYLFEEIAKISHESPGSSQCLLEYLLSRLHSSSGHGKLKVLKILLYLCSHGSSFFLLILKRNSAFIQEAAAFAGPPDPLHGNSLYQKVRAAAQDLGSTLFSDTVLPLAPSQPLGTPPATGMGSQARPHSTLQGFGYSKEHGRTAVRHQPGQAGGGWDELDSGPSSQNSSQNSDLSRVSDSGSHSGSDSHSGASREPGDLAERVEVVALSDCQQELSLVRTVTRGPRAFLSREEAQHFIKACGLLNCEAVLQLLTCHLRGTSECTQLRALCAIASLGSSDLLPQEHILLRTRPWLQELSMGSPGPVTNKATKILRHFEASCGQLSPARGTSAEPGPTAALPGPSDLLTDAVPLPGSQVFLQPLSSTPVSSRSPAPSSGMPSSPVPTPPPDASPIPAPGDPSEAEARLAESRRWRPERIPGGTDSPKRGPSSCAWSRDSLFAGMELVACPRLVGAGAAAGESCPDAPRAPQTSSQRTAAKEPPGSEPSAFAFLNA

SEQ ID NO: 13563 - protein, 441 aa, Homo sapiens
MGSQARPHSTLQGFGYSKEHGRTGSAGEAFLSTIQKAAEVVASAMRPGPESPSTRRLLPRGDTYQPAMMPSASHGPPTLGNLLPGAIPGPRAVRHQPGQAGGGWDELDSGPSSQNSSQNSDLSRVSDSGSHSGSDSHSGASREPGDLAERVEVVALSDCQQELSLVRTVTRGPRAFLSREEAQHFIKACGLLNCEAVLQLLTCHLRGTSECTQLRALCAIASLGSSDLLPQEHILLRTRPWLQELSMGSPGPVTNKATKILRHFEASCGQLSPARGTSAEPGPTAALPGPSDLLTDAVPLPGSQVFLQPLSSTPVSSRSPAPSSGMPSSPVPTPPPDASPIPAPGDPSEAEARLAESRRWRPERIPGGTDSPKRGPSSCAWSRDSLFAGMELVACPRLVGAGAAAGESCPDAPRAPQTSSQRTAAKEPPGSEPSAFAFLNA

SEQ ID NO: 13564 - protein, 541 aa, Homo sapiens
MTGEKIRSLRRDHKPSKEEGDLLEPGDEEAAAALGGTFTRSRIGKGGKACHKIFSNHHHRLQLKAAPASSNPPGAPALPLHNSSVTANSQSPALLAGTNPVAVVADGGSCPAHYPVHECVFKGDVRRLSSLIRTHNIGQKDNHGNTPLHLAVMLGNKECAHLLLAHNAPVKVKNAQGWSPLAEAISYGDRQMITALLRKLKQQSRESVEEKRPRLLKALKELGDFYLELHWDFQSWVPLLSRILPSDACKIYKQGINIRLDTTLIDFTDMKCQRGDLSFIFNGDAAPSESFVVLDNEQKVYQRIHHEESEMETEEEVDILMSSDIYSATLSTKSISFTRAQTGWLFREDKTERVGNFLADFYLVNGLVLESRKRREHLSEEDILRNKAIMESLSKGGNIMEQNFEPIRRQSLTPPPQNTITWEEYISAENGKAPHLGRELVCKESKKTFKATIAMSQEFPLGIELLLNVLEVVAPFKHFNKLREFVQMKLPPGFPVKLDIPVFPTITATVTFQEFRYDEFDGSIFTIPDDYKEDPSRFPDL

SEQ ID NO: 13565 - protein, 506 aa, Homo sapiens
MTGEKIRSLRRDHKPSKEEGDLLEPGDEEAAAALGGTFTRSRIGKGGKACHKIFSNHHHRLQLKAAPASSNPPGAPALPLHNSSVTANSQSPALLAGTNPVAVVADGGSCPAHYPVHECVFKGDVRRLSSLIRTHNIGQKDNHGNTPLHLAVMLGNKVTALLRKLKQQSRESVEEKRPRLLKALKELGDFYLELHWDFQSWVPLLSRILPSDACKIYKQGINIRLDTTLIDFTDMKCQRGDLSFIFNGDAAPSESFVVLDNEQKVYQRIHHEESEMETEEEVDILMSSDIYSATLSTKSISFTRAQTGWLFREDKTERVGNFLADFYLVNGLVLESRKRREHLSEEDILRNKAIMESLSKGGNIMEQNFEPIRRQSLTPPPQNTITWEEYISAENGKAPHLGRELVCKESKKTFKATIAMSQEFPLGIELLLNVLEVVAPFKHFNKLREFVQMKLPPGFPVKLDIPVFPTITATVTFQEFRYDEFDGSIFTIPDDYKEDPSRFPDL

SEQ ID NO: 13566 - protein, 147 aa, Homo sapiens
MTGEKIRSLRRDHKPSKEEGDLLEPGDEEAAAALGGTFTRSRIGKGGKACHKIFSNHHHRLQLKAAPASSNPPGAPALPLHNSSVTANSQSPALLAGTNPVAVVADGGSCPAHYPVHECVFKGDVRRLSSLIRTHNIGQKDNHGEEC

SEQ ID NO: 13567 - protein, 807 aa, Homo sapiens
MFSAGAESLLHQAREIQDEELKKFCSRICKLLQAEDLGPDTLDSLQRLFLIISATKYSRRLEKTCVDLLQATLGLPACPEQLQVLCAAILREMSPSDSLSLAWDHTQNSRQLSLVASVLLAQGDRNEEVRAVGQGVLRALESRQPEGPSLRHLLPVMAKVVVLSPGTLQEDQATLLSKRLVDWLRYASLQQGLPHSGGFFSTPRARQPGPVTEVDGAVATDFFTVLSSGHRFTDDQWLNVQAFSMLRAWLLHSGPEGPGTLDTDDRSEQEGSTLSVISATSSAGRLLPPRERLREVAFEYCQRLIEQSNRRALRKGDSDLQKACLVEAVLVLDVLCRQDPSFLYRSLSCLKALHGRVRGDPASVRVLLPLAHFFLSHGEAAAVDSEAVYQHLFTRIPVEQFHSPMLAFEFIQFCRDNLHLFSGHLSTLRLSFPNLFKFLAWNSPPLTSEFVALLPALVDAGTALEMLHALLDLPCLTAVLDLQLRSAPAASERPLWDTSLRAPSCLEAFRDPQFQGLFQYLLRPKASGATERLAPLHQLLQPMAGCARVAQCAQAVPTLLQAFFSAVTQVADGSLINQLALLLLGRSDSLYPAPGYAAGVHSVLSSQFLALCTLKPSLVVELARDLLEFLGSVNGLCSRASLVTSVVWAIGEYLSVTYDRRCTVEQINKFFEALEALLFEVTQCRPSAALPRCPPQVVTVLMTTLTKLASRSQDLIPRASLLLSKMRTLAHSPATSSTHSEEGAEAIRTRATELLTLLKMPSVAQFVLTPSTEVCSPRYHRDANTALPLALRTVSRLVEREAGLMPG

SEQ ID NO: 13568 - protein, 613 aa, Homo sapiens
MFSAGAESLLHQAREIQDEELKKFCSRICKLLQAEDLGPDTLDSLQRLFLIISATKYSRRLEKTCVDLLQATLGLPACPEQLQVLCAAILREMSPSDSLSLAWDHTQNSRQLSLVASVLLAQGDRNEEVRAVGQGVLRALESRQPEGPSLRHLLPVMAKVVVLSPGTLQEDQATLLSKRLVDWLRYASLQQGLPHSGGFFSTPRARQPGPVTEVDGAVATDFFTVLSSGHRFTDDQWLNVQAFSMLRAWLLHSGPEGPGTLDTDDRSEQEGSTLSVISATSSAGRLLPPRERLREVAFEYCQRLIEQSNRRALRKGDSDLQKACLVEAVLVLDVLCRQDPSFLYRSLSCLKALHGRVRGDPASVRVLLPLAHFFLSHGEAAAVDSEAVYQHLFTRIPVEQFHSPMLAFEFIQFCRDNLHLFSGHLSTLRLSFPNLFKFLAWNSPPLTSEFVALLPALVDAGTALEMLHALLDLPCLTAVLDLQLRSAPAASERPLWDTSLRAPSCLEAFRDPQFQGLFQYLLRPKASGATERLAPLHQLLQPMAGCARVAQCAQAVPTLLQAFFSAVTQVADGSLINQLALLLLGRSDSLYPAPGYAAGVHRPDACRPILVPL

SEQ ID NO: 13569 - protein, 446 aa, Homo sapiens
MAKVVVLSPGTLQEDQATLLSKRLVDWLRYASLQQGLPHSGGFFSTPRARQPGPVTEVDGAVATDFFTVLSSGHRFTDDQWLNVQAFSMLRAWLLHSGPEGPGTLDTDDRSEQEGSTLSVISATSSAGRLLPPRERLREVAFEYCQRLIEQSNRRALRKGDSDLQKACLVEAVLVLDVLCRQDPSFLYRSLSCLKALHGRVRGDPASVRVLLPLAHFFLSHGEAAAVDSEAVYQHLFTRIPVEQFHSPMLAFEFIQFCRDNLHLFSGHLSTLRLSFPNLFKFLAWNSPPLTSEFVALLPALVDAGTALEMLHALLDLPCLTAVLDLQLRSAPAASERPLWDTSLRAPSCLEAFRDPQFQGLFQYLLRPKASGATERLAPLHQLLQPMAGCARVAQCAQAVPTLLQAFFSAVTQVADGSLINQLALLLLGRSDSLYPAPGYAAGVHR

SEQ ID NO: 13570 - protein, 1954 aa, Homo sapiens
MRGPVGTEEELPRLFAEEMENEDEMSEEEDGGLEAFDDFFPVEPVSLPKKKKPKKLKENKCKGKRKKKEGSNDELSENEEDLEEKSESEGSDYSPNKKKKKKLKDKKEKKAKRKKKDEDEDDNDDGCLKEPKSSGQLMAEWGLDDVDYLFSEEDYHTLTNYKAFSQFLRPLIAKKNPKIPMSKMMTVLGAKWREFSANNPFKGSSAAAAAAAVAAAVETVTISPPLAVSPPQVPQPVPIRKAKTKEGKGPGVRKKIKGSKDGKKKGKGKKTAGLKFRFGGISNKRKKGSSSEEDEREESDFDSASIHSASVRSECSAALGKKSKRRRKKKRIDDGDGYETDHQDYCEVCQQGGEIILCDTCPRAYHLVCLDPELEKAPEGKWSCPHCEKEGIQWEPKDDDDEEEEGGCEEEEDDHMEFCRVCKDGGELLCCDACPSSYHLHCLNPPLPEIPNGEWLCPRCTCPPLKGKVQRILHWRWTEPPAPFMVGLPGPDVEPSLPPPKPLEGIPEREFFVKWAGLSYWHCSWVKELQLELYHTVMYRNYQRKNDMDEPPPFDYGSGDEDGKSEKRKNKDPLYAKMEERFYRYGIKPEWMMIHRILNHSFDKKGDVHYLIKWKDLPYDQCTWEIDDIDIPYYDNLKQAYWGHRELMLGEDTRLPKRLLKKGKKLRDDKQEKPPDTPIVDPTVKFDKQPWYIDSTGGTLHPYQLEGLNWLRFSWAQGTDTILADEMGLGKTVQTIVFLYSLYKEGHSKGPYLVSAPLSTIINWEREFEMWAPDFYVVTYTGDKESRSVIRENEFSFEDNAIRSGKKVFRMKKEVQIKFHVLLTSYELITIDQAILGSIEWACLVVDEAHRLKNNQSKFFRVLNSYKIDYKLLLTGTPLQNNLEELFHLLNFLTPERFNNLEGFLEEFADISKEDQIKKLHDLLGPHMLRRLKADVFKNMPAKTELIVRVELSQMQKKYYKFILTRNFEALNSKGGGNQVSLLNIMMDLKKCCNHPYLFPVAAVEAPVLPNGSYDGSSLVKSSGKLMLLQKMLKKLRDEGHRVLIFSQMTKMLDLLEDFLEYEGYKYERIDGGITGGLRQEAIDRFNAPGAQQFCFLLSTRAGGLGINLATADTVIIYDSDWNPHNDIQAFSRAHRIGQNKKVMIYRFVTRASVEERITQVAKRKMMLTHLVVRPGLGSKSGSMTKQELDDILKFGTEELFKDDVEGMMSQGQRPVTPIPDVQSSKGGNLAASAKKKHGSTPPGDNKDVEDSSVIHYDDAAISKLLDRNQDATDDTELQNMNEYLSSFKVAQYVVREEDGVEEVEREIIKQEENVDPDYWEKLLRHHYEQQQEDLARNLGKGKRIRKQVNYNDASQEDQEWQDELSDNQSEYSIGSEDEDEDFEERPEGQSGRRQSRRQLKSDRDKPLPPLLARVGGNIEVLGFNARQRKAFLNAIMRWGMPPQDAFNSHWLVRDLRGKSEKEFRAYVSLFMRHLCEPGADGAETFADGVPREGLSRQHVLTRIGVMSLVRKKVQEFEHVNGKYSTPDLIPEGPEGKKSGEVISSDPNTPVPASPAHLLPAPLGLPDKMEAQLGYMDEKDPGAQKPRQPLEVQALPAALDRVESEDKHESPASKERAREERPEETEKAPPSPEQLPREEVLPEKEKILDKLELSLIHSRGDSSELRPDDTKAEEKEPIETQQNGDKEEDDEGKKEDKKGKFKFMFNIADGGFTELHTLWQNEERAAVSSGKIYDIWHRRHDYWLLAGIVTHGYARWQDIQNDPRYMILNEPFKSEVHKGNYLEMKNKFLARRFKLLEQALVIEEQLRRAAYLNMTQDPNHPAMALNARLAEVECLAESHQHLSKESLAGNKPANAVLHKVLNQLEELLSDMKADVTRLPSMLSRIPPVAARLQMSERSILSRLTNRAGDPTIQQGAFGSSQMYSNNFGPNFRGPGPGGIVNYNQMPLGPYVTDI

SEQ ID NO: 13571 - protein, 494 aa, Homo sapiens
MVLLAGTGPEGGGARCMTPPPPSPPRGAQVEEDPADYEEFEDFSSLPDTRSIASDDSFYPFEDEEEHGVESAESVPEGVPESVPETATLLRAACANNVGLLRTLVRRGVSVEEAQETDRNGRTGLIVACYHGFVDTVVALAECPHVDVNWQDSEGNTALITAAQAGHAIITNYLLNYFPGLDLERRNAFGFTALMKAAMQGRTDCIRALMLAGADVHARDPRRGMSPQEWATYTGRVDAVRLMQRLLERPCPEQFWEKYRPELPPPPEAARKPAGSKNCLQRLTDCVLSVLTPRSVRGPEDGGVLDHMVRMTTSLYSPAVAIVCQTVCPESPPSVGKRRLAVQEILAARAARGPQAQEEDEVGGAGQRGRTGQEDADSREGSPRAGLPPALGSRGPAAPAPRKASLLPLQRLRRRSVRPGVVVPRVRVSKAPAPTFQPERPARKGSTKDSGHLQIPKWRYKEAKEEKRKAEEAEKKRQAEAQKERRTAPWKKRT

SEQ ID NO: 13572 - protein, 423 aa, Homo sapiens; identical to SEQ ID NO: 223

SEQ ID NO: 13573 - protein, 425 aa, Homo sapiens; identical to SEQ ID NO: 224

SEQ ID NO: 13574 - protein, 150 aa, Homo sapiens
MSKISQQNSTPGVNGISVIHTQAHASGLQQVPQLVPAGPGGGGKAVAPSKQSKKSSPMDRNSDEYRQRRERNNMAVKKSRLKSKQKAQDTLQRVNQLKEENERLEAKIKLLTKELSVLKDLFLEHAHNLADNVQSISTENTTADGDNAGQ

SEQ ID NO: 13575 - protein, 1298 aa, Homo sapiens
MKVVPEKNAVRILWGRERGARAMGAQRLLQELVEDKTRWMKWEGKRVELPDSPRSTFLLAFSPDRTLLASTHVNHNIYITEVKTGKCVHSLIGHRRTPWCVTFHPTISGLIASGCLDGEVRIWDLHGGSESWFTDSNNAIASLAFHPTAQLLLIATANEIHFWDWSRREPFAVVKTASEMERVRLVRFDPLGHYLLTAIVNPSNQQGDDEPEIPIDGTELSHYRQRALLQSQPVRRTPLLHNFLHMLSSRSSGIQVGEQSTVQDSATPSPPPPPPQPSTERPRTSAYIRLRQRVSYPTAECCQHLGILCLCSRCSGTRVPSLLPHQDSVPPASARATTPSFSFVQTEPFHPPEQASSTQQDQGLLNRPSAFSTVQSSTAGNTLRNLSLGPTRRSLGGPLSSHPSRYHREIAPGLTGSEWTRTVLSLNSRSEAESMPPPRTSASSVSLLSVLRQQEGGSQASVYTSATEGRGFPASGLATESDGGNGSSQNNSGSIRHELQCDLRRFFLEYDRLQELDQSLSGEAPQTQQAQEMLNNNIESERPGPSHQPTPHSSENNSNLSRGHLNRCRACHNLLTFNNDTLRWERTTPNYSSGEASSSWQVPSSFESVPSSGSQLPPLERTEGQTPSSSRLELSSSASPQEERTVGVAFNQETGHWERIYTQSSRSGTVSQEALHQDMPEESSEEDSLRRRLLESSLISLSRYDGAGSREHPIYPDPARLSPAAYYAQRMIQYLSRRDSIRQRSMRYQQNRLRSSTSSSSSDNQGPSVEGTDLEFEDFEDNGDRSRHRAPRNARMSAPSLGRFVPRRFLLPEYLPYAGIFHERGQPGLATHSSVNRVLAGAVIGDGQSAVASNIANTTYRLQWWDFTKFDLPEISNASVNVLVQNCKIYNDASCDISADGQLLAAFIPSSQRGFPDEGILAVYSLAPHNLGEMLYTKRFGPNAISVSLSPMGRYVMVGLASRRILLHPSTEHMVAQVFRLQQAHGGETSMRRVFNVLYPMPADQRRHVSINSARWLPEPGLGLAYGTNKGDLVICRPEALNSGVEYYWDQLNETVFTVHSNSRSSERPGTSRATWRTDRDMGLMNAIGLQPRNPATSVTSQGTQTLALQLQNAETQTEREVPEPGTAASGPGEGEGSEYGASGEDALSRIQRLMAEGGMTAVVQREQSTTMASMGGFGNNIIVSHRIHRSSQTGTEPGAAHTSSPQPSTSRGLLPEAGQLAERGLSPRTASWDQPGTPGREPTQPTLPSSSPVPIPVSLPSAEGPTLHCELTNNNHLLDGGSSRGDAAGPRGEPRNR

SEQ ID NO: 13576 - protein, 1238 aa, Homo sapiens
MKVVPEKNAVRILWGRERGARAMGAQRLLQELVEDKTRWMKWEGKRVELPDSPRSTFLLAFSPDRTLLASTHVNHNIYITEVKTGKCVHSLIGHRRTPWCVTFHPTISGLIASGCLDGEVRIWDLHGGSESWFTDSNNAIASLAFHPTAQLLLIATANEIHFWDWSRREPFAVVKTASEMERVRLVRFDPLGHYLLTAIVNPSNQQGDDEPEIPIDGTELSHYRQRALLQSQPVRRTPLLHNFLHMLSSRSSGIQVGEQSTVQDSATPSPPPPPPQPSTERPRTSAYIRLRQRVSYPTAECCQHLGILCLCSRCSGTRVPSLLPHQDSVPPASARATTPSFSFVQTEPFHPPEQASSTQQDQGLLNRPSAFSTVQSSTAGNTLRNLSLGPTRRSLGGPLSSHPSRYHREIAPGLTGSEWTRTVLSLNSRSEAESMPPPRTSASSVSLLSVLRQQEGGSQASVYTSATEGRGFPASGLATESDGGNGSSQNNSGSIRHELQCDLRRFFLEYDRLQELDQSLSGEAPQTQQAQEMLNNNIESERPGPSHQPTPHSSENNSNLSRGHLNRCRACHNLLTFNNDTLRWERTTPNYSSGEASSSWQVPSSFESVPSSGSQLPPLERTEGQTPSSSRLELSSSASPQEERTVGVAFNQETGHWERIYTQSSRSGTVSQEALHQDMPEESSEEDSLRRRLLESSLISLSRYDGAGSREHPIYPDPARDNGDRSRHRAPRNARMSAPSLGRFVPRRFLLPEYLPYAGIFHERGQPGLATHSSVNRVLAGAVIGDGQSAVASNIANTTYRLQWWDFTKFDLPEISNASVNVLVQNCKIYNDASCDISADGQLLAAFIPSSQRGFPDEGILAVYSLAPHNLGEMLYTKRFGPNAISVSLSPMGRYVMVGLASRRILLHPSTEHMVAQVFRLQQAHGGETSMRRVFNVLYPMPADQRRHVSINSARWLPEPGLGLAYGTNKGDLVICRPEALNSGVEYYWDQLNETVFTVHSNSRSSERPGTSRATWRTDRDMGLMNAIGLQPRNPATSVTSQGTQTLALQLQNAETQTEREVPEPGTAASGPGEGEGSEYGASGEDALSRIQRLMAEGGMTAVVQREQSTTMASMGGFGNNIIVSHRIHRSSQTGTEPGAAHTSSPQPSTSRGLLPEAGQLAERGLSPRTASWDQPGTPGREPTQPTLPSSSPVPIPVSLPSAEGPTLHCELTNNNHLLDGGSSRGDAAGPRGEPRNR

SEQ ID NO: 13577 - protein, 1269 aa, Homo sapiens
MKVVPEKNAVRILWGRERGARAMGAQRLLQELVEDKTRWMKWEGKRVELPDSPRSTFLLAFSPDRTLLASTHVNHNIYITEVKTGKCVHSLIGHRRTPWCVTFHPTISGLIASGCLDGEVRIWDLHGGSESWFTDSNNAIASLAFHPTAQLLLIATANEIHFWDWSRREPFAVVKTASEMERVRLVRFDPLGHYLLTAIVNPSNQQGDDEPEIPIDGTELSHYRQRALLQSQPVRRTPLLHNFLHMLSSRSSGIQVGEQSTVQDSATPSPPPPPPQPSTERPRTSAYIRLRQRVSYPTAECCQHLGILCLCSRCSGTRVPSLLPHQDSVPPASARATTPSFSFVQTEPFHPPEQASSTQQDQGLLNRPSAFSTVQSSTAGNTLRNLSLGPTRRSLGGPLSSHPSRYHREIAPGLTGSEWTRTVLSLNSRSEAESMPPPRTSASSVSLLSVLRQQEGGSQASVYTSATEGRGFPASGLATESDGGNGSSQNNSGSIRHELQCDLRRFFLEYDRLQELDQSLSGEAPQTQQAQEMLNNNIESERPGPSHQPTPHSSENNSNLSRGHLNRCRACHNLLTFNNDTLRWERTTPNYSSGEASSSWQVPSSFESVPSSGSQLPPLERTEGQTPSSSRLELSSSASPQEERTVGVAFNQETGHWERIYTQSSRSGTVSQEALHQDMPEESSEEDSLRRLSPAAYYAQRMIQYLSRRDSIRQRSMRYQQNRLRSSTSSSSSDNQGPSVEGTDLEFEDFEDNGDRSRHRAPRNARMSAPSLGRFVPRRFLLPEYLPYAGIFHERGQPGLATHSSVNRVLAGAVIGDGQSAVASNIANTTYRLQWWDFTKFDLPEISNASVNVLVQNCKIYNDASCDISADGQLLAAFIPSSQRGFPDEGILAVYSLAPHNLGEMLYTKRFGPNAISVSLSPMGRYVMVGLASRRILLHPSTEHMVAQVFRLQQAHGGETSMRRVFNVLYPMPADQRRHVSINSARWLPEPGLGLAYGTNKGDLVICRPEALNSGVEYYWDQLNETVFTVHSNSRSSERPGTSRATWRTDRDMGLMNAIGLQPRNPATSVTSQGTQTLALQLQNAETQTEREVPEPGTAASGPGEGEGSEYGASGEDALSRIQRLMAEGGMTAVVQREQSTTMASMGGFGNNIIVSHRIHRSSQTGTEPGAAHTSSPQPSTSRGLLPEAGQLAERGLSPRTASWDQPGTPGREPTQPTLPSSSPVPIPVSLPSAEGPTLHCELTNNNHLLDGGSSRGDAAGPRGEPRNR

SEQ ID NO: 13578 - protein, 1208 aa, Homo sapiens
MKVVPEKNAVRILWGRERGARAMGAQRLLQELVEDKTRWMKWEGKRVELPDSPRSTFLLAFSPDRTLLASTHVNHNIYITEVKTGKCVHSLIGHRRTPWCVTFHPTISGLIASGCLDGEVRIWDLHGGSESWFTDSNNAIASLAFHPTAQLLLIATANEIHFWDWSRREPFAVVKTASEMERVRLVRFDPLGHYLLTAIVNPSNQQGDDEPEIPIDGTELSHYRQRALLQSQPVRRTPLLHNFLHMLSSRSSGIQTEPFHPPEQASSTQQDQGLLNRPSAFSTVQSSTAGNTLRNLSLGPTRRSLGGPLSSHPSRYHREIAPGLTGSEWTRTVLSLNSRSEAESMPPPRTSASSVSLLSVLRQQEGGSQASVYTSATEGRGFPASGLATESDGGNGSSQNNSGSIRHELQCDLRRFFLEYDRLQELDQSLSGEAPQTQQAQEMLNNNIESERPGPSHQPTPHSSENNSNLSRGHLNRCRACHNLLTFNNDTLRWERTTPNYSSGEASSSWQVPSSFESVPSSGSQLPPLERTEGQTPSSSRLELSSSASPQEERTVGVAFNQETGHWERIYTQSSRSGTVSQEALHQDMPEESSEEDSLRRRLLESSLISLSRYDGAGSREHPIYPDPARLSPAAYYAQRMIQYLSRRDSIRQRSMRYQQNRLRSSTSSSSSDNQGPSVEGTDLEFEDFEDNGDRSRHRAPRNARMSAPSLGRFVPRRFLLPEYLPYAGIFHERGQPGLATHSSVNRVLAGAVIGDGQSAVASNIANTTYRLQWWDFTKFDLPEISNASVNVLVQNCKIYNDASCDISADGQLLAAFIPSSQRGFPDEGILAVYSLAPHNLGEMLYTKRFGPNAISVSLSPMGRYVMVGLASRRILLHPSTEHMVAQVFRLQQAHGGETSMRRVFNVLYPMPADQRRHVSINSARWLPEPGLGLAYGTNKGDLVICRPEALNSGVEYYWDQLNETVFTVHSNSRSSERPGTSRATWRTDRDMGLMNAIGLQPRNPATSVTSQGTQTLALQLQNAETQTEREVPEPGTAASGPGEGEGSEYGASGEDALSRIQRLMAEGGMTAVVQREQSTTMASMGGFGNNIIVSHRIHRSSQTGTEPGAAHTSSPQPSTSRGLLPEAGQLAERGLSPRTASWDQPGTPGREPTQPTLPSSSPVPIPVSLPSAEGPTLHCELTNNNHLLDGGSSRGDAAGPRGEPRNR

SEQ ID NO: 13579 - protein, 1301 aa, Homo sapiens
MKVVPEKNAVRILWGRERGARAMGAQRLLQELVEDKTRWMKWEGKRVELPDSPRSTFLLAFSPDRTLLASTHVNHNIYITEVKTGKCVHSLIGHRRTPWCVTFHPTISGLIASGCLDGEVRIWDLHGGSESWFTDSNNAIASLAFHPTAQLLLIATANEIHFWDWSRREPFAVVKTASEMERVRLVRFDPLGHYLLTAIVNPSNQQGDDEPEIPIDGTELSHYRQRALLQSQPVRRTPLLHNFLHMLSSRSSGIQTEPFHPPEQASSTQQDQGLLNRPSAFSTVQSSTAGNTLRNLSLGPTRRSLGGPLSSHPSRYHREIAPGLTGSEWTRTVLSLNSRSEAESMPPPRTSASSVSLLSVLRQQEGGSQASVYTSATEGRGFPASGLATESDGGNGSSQNNSGSIRHELQCDLRRFFLEYDRLQELDQSLSGEAPQTQQAQEMLNNNIESERPGPSHQPTPHSSENNSNLSRGHLNRCRACHNLLTFNNDTLRWERTTPNYSSGEASSSWQVPSSFESVPSSGSQLPPLERTEGQTPSSSRLELSSSASPQEERTVGVAFNQETGHWERIYTQSSRSGTVSQEALHQDMPEESSEEDSLRRRSLALSPRLEYSGAILAHCKLRLPGSCHSPASASQVAGTTGAHHHARLIFAFLVEMEFHHVSQAGLELLTSGDLPTSASQSAGITGVSHRAWPRLLESSLISLSRYDGAGSREHPIYPDPARLSPAAYYAQRMIQYLSRRDSIRQRSMRYQQNRLRSSTSSSSSDNQGPSVEGTDLEFEDFEDNGDRSRHRAPRNARMSAPSLGRFVPRRFLLPEYLPYAGIFHERGQPGLATHSSVNRVLAGAVIGDGQSAVASNIANTTYRLQWWDFTKFDLPEISNASVNVLVQNCKIYNDASCDISADGQLLAAFIPSSQRGFPDEGILAVYSLAPHNLGEMLYTKRFGPNAISVSLSPMGRYVMVGLASRRILLHPSTEHMVAQVFRLQQAHGGETSMRRVFNVLYPMPADQRRHVSINSARWLPEPGLGLAYGTNKGDLVICRPEALNSGVEYYWDQLNETVFTVHSNSRSSERPGTSRATWRTDRDMGLMNAIGLQPRNPATSVTSQGTQTLALQLQNAETQTEREVPEPGTAASGPGEGEGSEYGASGEDALSRIQRLMAEGGMTAVVQREQSTTMASMGGFGNNIIVSHRIHRSSQTGTEPGAAHTSSPQPSTSRGLLPEAGQLAERGLSPRTASWDQPGTPGREPTQPTLPSSSPVPIPVSLPSAEGPTLHCELTNNNHLLDGGSSRGDAAGPRGEPRNR

SEQ ID NO: 13580 - protein, 761 aa, Homo sapiens
MKVVPEKNAVRILWGRERGARAMGAQRLLQELVEDKTRWMKWEGKRVELPDSPRSTFLLAFSPDRTLLASTHVNHNIYITEVKTGKCVHSLIGHRRTPWCVTFHPTISGLIASGCLDGEVRIWDLHGGSESWFTDSNNAIASLAFHPTAQLLLIATANEIHFWDWSRREPFAVVKTASEMERVRLVRFDPLGHYLLTAIVNPSNQQGDDEPEIPIDGTELSHYRQRALLQSQPVRRTPLLHNFLHMLSSRSSGIQTEPFHPPEQASSTQQDQGLLNRPSAFSTVQSSTAGNTLRNLSLGPTRRSLGGPLSSHPSRYHREIAPGLTGSEWTRTVLSLNSRSEAESMPPPRTSASSVSLLSVLRQQEGGSQASVYTSATEGRGFPASGLATESDGGNGSSQNNSGSIRHELQCDLRRFFLEYDRLQELDQSLSGEAPQTQQAQEMLNNNIESERPGPSHQPTPHSSENNSNLSRGHLNRCRACHNLLTFNNDTLRWERTTPNYSSGEASSSWQVPSSFESVPSSGSQLPPLERTEGQTPSSSRLELSSSASPQEERTVGVAFNQETGHWERIYTQSSRSGTVSQEALHQDMPEESSEEDSLRRLSPAAYYAQRMIQYLSRRDSIRQRSMRYQQNRLRSSTSSSSSDNQGPSVEGTDLEFEDFEDNGDRSRHRAPRNARMSAPSLGRFVPRRFLLPEYLPYAGIFHERGQPGLATHSSVNRVLAGAVIGDGQSAVASNIANTTYRLQGGGTSLSLTSLKSVMLP

SEQ ID NO: 13581 - protein, 158 aa, Homo sapiens; identical to SEQ ID NO: 209

SEQ ID NO: 13582 - protein, 133 aa, Homo sapiens; identical to SEQ ID NO: 210

SEQ ID NO: 13583 - protein, 189 aa, Homo sapiens
MVMLLLLLSALAGLFGAAEGQAFHLGKCPNPPVQENFDVNKYLGRWYEIEKIPTTFENGRCIQANYSLMENGKIKVLNQELRADGTVNQIEGEATPVNLTEPAKLEVKFSWFMPSAPYWILATDYENYALVYSCTCIIQLFHVDFAWILARNPNLPPETVDSLKNILTSNNIDVKKMTVTDQVNCPKLS

SEQ ID NO: 13584 - protein, 1392 aa, Homo sapiens
MKRLLAAAGKGVRGPEPPNPFSERVYTEKDYGTIYFGDLGKIHTAASRGQVQKLEKMTVGKKPVNLNKRDMKKRTALHWACVNGHAEVVTFLVDRKCQLNVLDGEGRTPLMKALQCEREACANILIDAGADLNYVDVYGNTALHYAVYSENLLMVATLLSYGAVIEVQNKASLTPLLLAIQKRSKQTVEFLLTKNANANAFNESKCTALMLAICEGSSEIVGMLLQQNVDVFAEDIHGITAERYAAACGVNYIHQQLLEHIRKLPKNPQNTNPEGTSTGTPDEAAPLAERTPDTAESLLEKTPDEAARLVEGTSAKIQCLGKATSGKFEQSTEETPRKILRPTKETSEKFSWPAKERSRKITWEEKETSVKTECVAGVTPNKTEVLEKGTSNMIACPTKETSTKASTNVDVSSVEPIFSLFGTRTIENSQCTKVEEDFNLATKIISKSAAQNYTCLPDATYQKDIKTINHKIEDQMFPSESKREEDEEYSWDSGSLFESSAKTQVCIPESMYQKVMEINREVEELPEKPSAFKPAVEMQKTVPNKAFELKNEQTLRAAQMFPSESKQKDDEENSWDSESPCETVSQKDVYLPKATHQKEFDTLSGKLEESPVKDGLLKPTCGRKVSLPNKALELKDRETFKAESPDKDGLLKPTCGRKVSLPNKALELKDRETLKAESPDNDGLLKPTCGRKVSLPNKALELKDRETFKAAQMFPSESKQKDDEENSWDFESFLETLLQNDVCLPKATHQKEFDTLSGKLEESPDKDGLLKPTCGMKISLPNKALELKDRETFKAEDVSSVESTFSLFGKPTTENSQSTKVEEDFNLTTKEGATKTVTGQQERDIGIIERAPQDQTNKMPTSELGRKEDTKSTSDSEIISVSDTQNYECLPEATYQKEIKTTNGKIEESPEKPSHFEPATEMQNSVPNKGLEWKNKQTLRADSTTLSKILDALPSCERGRELKKDNCEQITAKMEQTKNKFCVLQKELSEAKEIKSQLENQKAKWEQELCSVRLTLNQEEEKRRNVDILKEKIRPEEQLRKKLEVKQQLEQTLRIQDIELKSVTSNLNQVSHTHESENDLFHENCMLKKEIAMLKLEVATLKHQHQVKENKYFEDIKILQEKNAELQMTLKLKQKTVTKRASQYREQLKVLTAENTMLTSKLKEKQDKEILETEIESHHPRLASALQDHDQSVTSRKNQELAFHSAGDAPLQGIMNVDVSNTIYNNEVLHQPLYEAQRKSKSPKINLNYAGDDLRENALVSEHAQRDRCETQCQMKKAEHMYQNEQDNVDKHTEQQESLEQKLFQLESKNRWLRQQLVYAHKKVNKSKVTINIQFPEMKMQRHLNEKNEEVFNYGNHLKERIDQYEKEKAEREVSIKKYKYFSNFLKESGLG

SEQ ID NO: 13585 - protein, 619 aa, Homo sapiens
MKRLLAAAGKGVRGPEPPNPFSERVYTEKDYGTIYFGDLGKIHTAASRGQVQKLEKMTVGKKPVNLNKRDMKKRTALHWACVNGHAEVVTFLVDRKCQLNVLDGEGRTPLMKALQCEREACANILIDAGADLNYVDVYGNTALHYAVYSENLLMVATLLSYGAVIEVQNKASLTPLLLAIQKRSKQTVEFLLTKNANANAFNESKCTALMLAICEGSSEIVGMLLQQNVDVFAEDIHGITAERYAAACGVNYIHQQLLEHIRKLPKNPQNTNPEGTSTGTPDEAAPLAERTPDTAESLLEKTPDEAARLVEGTSAKIQCLGKATSGKFEQSTEETPRKILRPTKETSEKFSWPAKERSRKITWEEKETSVKTECVAGVTPNKTEVLEKGTSNMIACPTKETSTKASTNVDVSSVEPIFSLFGTRTIENSQCTKVEEDFNLATKIISKSAAQNYTCLPDATYQKDIKTINHKIEDQMFPSESKREEDEEYSWDSGSLFESSAKTQVCIPESMYQKVMEINREVEELPEKPSAFKPAVEMQKTVPNKAFELKNEQTLRAAQMFPSESKQKDDEENSWDSESPCETVSQKDVYLPKATHQKEFDTLSGKLEAYLWKESFSSK

SEQ ID NO: 13586 - protein, 739 aa, Homo sapiens
MPYLGSEDVVKELKKALCNPHIQADRLRYRNVIQRVIRYMTQGLDMSGVFMEMVKASATVDIVQKKLVYLYMCTYAPLKPDLALLAINTLCKDCSDPNPMVRGLALRSMCSLRMPGVQEYIQQPILNGLRDKASYVRRVAVLGCAKMHNLHGDSEVDGALVNELYSLLRDQDPIVVVNCLRSLEEILKQEGGVVINKPIAHHLLNRMSKLDQWGQAEVLNFLLRYQPRSEEELFDILNLLDSFLKSSSPGVVMGATKLFLILAKMFPHVQTDVLVRVKGPLLAACSSESRELCFVALCHVRQILHSLPGHFSSHYKKFFCSYSEPHYIKLQKVEVLCELVNDENVQQVLEELRGYCTDVSADFAQAAIFAIGGIARTYTDQCVQILTELLGLRQEHITTVVVQTFRDLVWLCPQCTEAVCQALPGCEENIQDSEGKQALIWLLGVHGERIPNAPYVLEDFVENVKSETFPAVKMELLTALLRLFLSRPAECQDMLGRLLYYCIEEEKDMAVRDRGLFYYRLLLVGIDEVKRILCSPKSDPTLGLLEDPAERPVNSWASDFNTLVPVYGKAHWATISKCQGAERCDPELPKTSSFAASGPLIPEENKERVQELPDSGALMLVPNRQLTADYFEKTWLSLKVAHQQVLPWRGEFHPDTLQMALQVVNIQTIAMSRAGSRPWKAYLSAQDDTGCLFLTELLLEPGNSEMQISVKQNEARTETLNSFISVLETVIGTIEEIKS

SEQ ID NO: 13587 - protein, 302 aa, Homo sapiens
MPYLGSEDVVKELKKALCNPHIQADRLRYRNVIQRVIRYMTQGLDMSGVFMEMVKASATVDIVQKKLVYLYMCTYAPLKPDLALLAINTLCKDCSDPNPMVRGLALRSMCSLRMSKLDQWGQAEVLNFLLRYQPRSEEELFDILNLLDSFLKSSSPGVVMGATKLFLILAKMFPHVQTDVLVRVKGPLLAACSSESRELCFVALCHVRQILHSLPGHFSSHYKKFFCSYSEPHYIKLQKVEVLCELVNDENVQQVLEELRGYCTDVSADFAQAAIFAIGRCLLLFLLENLDQPARKLWLEEP

SEQ ID NO: 13588 - protein, 416 aa, Homo sapiens
MSEADGLRQRRPLRPQVVTDDDGQAPEAKDGSSFSGRVFRVTFLMLAVSLTVPLLGAMMLLESPIDPQPLSFKEPPLLLGVLHPNTKLRQAERLFENQLVGPESIAHIGDVMFTGTADGRVVKLENGEIETIARFGSGPCKTRDDEPVCGRPLGIRAGPNGTLFVADAYKGLFEVNPWKREVKLLLSSETPIEGKNMSFVNDLTVTQDGRKIYFTDSSSKWQRRDYLLLVMEGTDDGRLLEYDTVTREVKVLLDQLRFPNGVQLSPAEDFVLVAETTMARIRRVYVSGLMKGGADLFVENMPGFPDNIRPSSSGGYWVGMSTIRPNPGFSMLDFLSERPWIKRMIFKLFSQETVMKFVPRYSLVLELSDSGAFRRSLHDPDGLVATYISEVHEHDGHLYLGSFRSPFLCRLSLQAV

SEQ ID NO: 13589 - protein, 289 aa, Homo sapiens
MSEADGLRQRRPLRPQVVTDDDGQAPEAKDGSSFSGRVFRVTFLMLAVSLTVPLLGAMMLLESPIDPQPLSFKEPPLLLGVLHPNTKLRQAERLFENQLVGPESIAHIGDVMFTGTADGRVVKLENGEIETIARFGSGPCKTRDDEPVCGRPLGIRAGPNGTLFVADAYKGLFEVNPWKREVKLLLSSETPIEGKNMSFVNDLTVTQDGRKIYFTDSSSKWQRRDYLLLVMEGTDDGRLLEYDTVTREVKVLLDQLRFPNGVQLSPAEDFVLVAETTMARIRSSLVKRR

SEQ ID NO: 13590 - protein, 251 aa, Homo sapiens
MDTTLRMVRTACQHRAPQISHKTGCSHISMHSPGGLTTTKMAGPLPRVSDSLFSAMELAKMSDMTKLHQAVAAGDYSLVKKILKKGLCDPNYKDVDWNDRTPLHWAAIKGQMEVIRLLIEYGARPCLVTSVGWTPAHFAAEAGHLNILKTLHALHAAIDAPDFFGDTPKRIAQIYGQKACVAFLEKAEPECQDHRCAAQQKGLPLDERDEDWDAKKRELELSLPSLNQNMNKKNKKSRGPTRPSNTKGRRV

SEQ ID NO: 13591 - protein, 345 aa, Homo sapiens
MISPVLILFSSFLCHVAIAGRTCPKPDDLPFSTVVPLKTFYEPGEEITYSCKPGYVSRGGMRKFICPLTGLWPINTLKCTPRVCPFAGILENGAVRYTTFEYPNTISFSCNTGFYLNGADSAKCTEEGKWSPELPVCAPIICPPPSIPTFATLRVYKPSAGNNSLYRDTAVFECLPQHAMFGNDTITCTTHGNWTKLPECREVKCPFPSRPDNGFVNYPAKPTLYYKDKATFGCHDGYSLDGPEEIECTKLGNWSAMPSCKASCKVPVKKATVVYQGERVKIQEKFKNGMLHGDKVSFFCKNKEKKCSYTEDAQCIDGTIEVPKCFKEHSSLAFWKTDASDVKPC

SEQ ID NO: 13592 - protein, 357 aa, Homo sapiens
MQSVQSTSFCLRKQCLCLTFLLLHLLGQVAATQRCPPQCPGRCPATPPTCAPGVRAVLDGCSCCLVCARQRGESCSDLEPCDESSGLYCDRSADPSNQTGICTAVEGDNCVFDGVIYRSGEKFQPSCKFQCTCRDGQIGCVPRCQLDVLLPEPNCPAPRKVEVPGECCEKWICGPDEEDSLGGLTLAAYRPEATLGVEVSDSSVNCIEQTTEWTACSKSCGMGFSTRVTNRNRQCEMLKQTRLCMVRPCEQEPEQPTDKKGKKCLRTKKSLKAIHLQFKNCTSLHTYKPRFCGVCSDGRCCTPHNTKTIQAEFQCSPGQIVKKPVMVIGTCTCHTNCPKNNEAFLQELELKTTRGKM

SEQ ID NO: 13593 - protein, 316 aa, Homo sapiens
MGNRHAKASSPQGFDVDRDAKKLNKACKGMGTNEAAIIEILSGRTSDERQQIKQKYKATYGKELEEVLKSELSGNFEKTALALLDRPSEYAARQLQKAMKGLGTDESVLIEVLCTRTNKEIIAIKEAYQRLFDRSLESDVKGDTSGNLKKILVSLLQANRNEGDDVDKDLAGQDAKDLYDAGEGRWGTDELAFNEVLAKRSYKQLRATFQAYQILIGKDIEEAIEEETSGDLQKAYLTLVRCAQDCEDYFAERLYKSMKGAGTDEETLIRIVVTRAEVDLQGIKAKFQEKYQKSLSDMVRSDTSGDFRKLLVALLH

SEQ ID NO: 13594 - protein, 357 aa, Homo sapiens
MGNRHSQSYTLSEGSQQLPKGDSQPSTVVQPLSHPSRNGEPEAPQPAKASSPQGFDVDRDAKKLNKACKGMGTNEAAIIEILSGRTSDERQQIKQKYKATYGKELEEVLKSELSGNFEKTALALLDRPSEYAARQLQKAMKGLGTDESVLIEVLCTRTNKEIIAIKEAYQRLFDRSLESDVKGDTSGNLKKILVSLLQANRNEGDDVDKDLAGQDAKDLYDAGEGRWGTDELAFNEVLAKRSYKQLRATFQAYQILIGKDIEEAIEEETSGDLQKAYLTLVRCAQDCEDYFAERLYKSMKGAGTDEETLIRIVVTRAEVDLQGIKAKFQEKYQKSLSDMVRSDTSGDFRKLLVALLH

SEQ ID NO: 13595 - protein, 489 aa, Homo sapiens
MVAERSPARSPGSWLFPGLWLLVLSGPGGLLRAQEQPSCRRAFDLYFVLDKSGSVANNWIEIYNFVQQLAERFVSPEMRLSFIVFSSQATIILPLTGDRGKISKGLEDLKRVSPVGETYIHEGLKLANEQIQKAGGLKTSSIIIALTDGKLDGLVPSYAEKEAKISRSLGASVYCVGVLDFEQAQLERIADSKEQVFPVKGGFQALKGIINSILAQSCTEILELQPSSVCVGEEFQIVLSGRGFMLGSRNGSVLCTYTVNETYTTSVKPVSVQLNSMLCPAPILNKAGETLDVSVSFNGGKSVISGSLIVTATECSNGIAAIIVILVLLLLLGIGLMWWFWPLCCKVVIKDPPPPPAPAPKEEEEEPLPTKKWPTVDASYYGGRGVGGIKRMEVRWGDKGSTEEGARLEKAKNAVVKIPEETEEPIRPRPPRPKPTHQPPQTKWYTPIKGRLDALWALLRRQYDRVSLMRPQEGDEVCIWECIEKELTA

SEQ ID NO: 13596 - protein, 386 aa, Homo sapiens
MVAERSPARSPGSWLFPGLWLLVLSGPGGLLRAQEQPSCRRAFDLYFVLDKSGSVANNWIEIYNFVQQLAERFVSPEMRLSFIVFSSQATIILPLTGDRGKISKGLEDLKRVSPVGETYIHEGLKLANEQIQKAGGLKTSSIIIALTDGKLDGLVPSYAEKEAKISRSLGASVYCVGVLDFEQAQLERIADSKEQVFPVKGGFQALKGIINSSNGIAAIIVILVLLLLLGIGLMWWFWPLCCKVVIKDPPPPPAPAPKEEEEEPLPTKKWPTVDASYYGGRGVGGIKRMEVRWGDKGSTEEGARLEKAKNAVVKIPEETEEPIRPRPPRPKPTHQPPQTKWYTPIKGRLDALWALLRRQYDRVSLMRPQEGDEVCIWECIEKELTA

SEQ ID NO: 13597 - protein, 322 aa, Homo sapiens
MVAERSPARSPGSWLFPGLWLLVLSGPGGLLRAQEQPSCRRAFDLYFVLDKSGSVANNWIEIYNFVQQLAERFVSPEMRLSFIVFSSQATIILPLTGDRGKISKGLEDLKRVSPVGETYIHEGLKLANEQIQKAGGLKTSSIIIALTDGKLDGLVPSYAEKEAKISRSLGASVYCVGVLDFEQAQLERIADSKEQVFPVKGGFQALKGIINSILAQSCTEILELQPSSVCVGEEFQIVLSGRGFMLGSRNGSVLCTYTVNETYTTSVKPVSVQLNSMLCPAPILNKAGEWGLTVTQAGVKWHDLTHCTFGLSGSGDPPTSAS

SEQ ID NO: 13598 - protein, 488 aa, Homo sapiens
MVAERSPARSPGSWLFPGLWLLVLSGPGGLLRAQEQPSCRRAFDLYFVLDKSGSVANNWIEIYNFVQQLAERFVSPEMRLSFIVFSSQATIILPLTGDRGKISKGLEDLKRVSPVGETYIHEGLKLANEQIQKAGGLKTSSIIIALTDGKLDGLVPSYAEKEAKISRSLGASVYCVGVLDFEQAQLERIADSKEQVFPVKGGFQALKGIINSILAQSCTEILELQPSSVCVGEEFQIVLSGRGFMLGSRNGSVLCTYTVNETYTTSVKPVSVQLNSMLCPAPILNKAGETLDVSVSFNGGKSVISGSLIVTATECSNGIAAIIVILVLLLLLGIGLMWWFWPLCCKVVIKDPPPPPAPAPKEEEEEPLPTKKWPTVDASYYGGRGVGGIKRMEVRWGDKGSTEEGARLEKAKNAVVKIPEETEEPIRPRPPRPKPTHQPPQTKWYTPIKGRLDALWALLRRQYDRVSLMRPQEGDEGRCINFSRVPSQ

SEQ ID NO: 13599 - protein, 488 aa, Homo sapiens
MSYPGYPPTGYPPFPGYPPAGQESSFPPSGQYPYPSGFPPMGGGAYPQVPSSGYPGAGGYPAPGGYPAPGGYPGAPQPGGAPSYPGVPPGQGFGVPPGGAGFSGYPQPPSQSYGGGPAQVPLPGGFPGGQMPSQYPGGQPTYPSQINTDSFSSYPVFSPVSLDYSSEPATVTQVTQGTIRPAANFDAIRDAEILRKAMKGFGTDEQAIVDVVANRSNDQRQKIKAAFKTSYGKDLIKDLKSELSGNMEELILALFMPPTYYDAWSLRKAMQGAGTQERVLIEILCTRTNQEIREIVRCYQSEFGRDLEKDIRSDTSGHFERLLVSMCQGNRDENQSINHQMAQEDAQRLYQAGEGRLGTDESCFNMILATRSFPQLRATMEAYSRMANRDLLSSVSREFSGYVESGLKTILQCALNRPAFFAERLYYAMKGAGTDDSTLVRIVVTRSEIDLVQIKQMFAQMYQKTLGTMIAGDTSGDYRRLLLAIVGQ

SEQ ID NO: 13600 - protein, 466 aa, Homo sapiens
MSYPGYPPTGYPPFPGYPPAGQESSFPPSGQYPYPSGFPPMGGGAYPQVPSSGYPGAGGYPAPGGYPAPGGYPGAPQPGGAPSYPGVPPGQGFGVPPGGAGFSGYPQPPSQSYGGGPAQVPLPGGFPGGQMPSQYPGGQPTYPSQPATVTQVTQGTIRPAANFDAIRDAEILRKAMKGFGTDEQAIVDVVANRSNDQRQKIKAAFKTSYGKDLIKDLKSELSGNMEELILALFMPPTYYDAWSLRKAMQGAGTQERVLIEILCTRTNQEIREIVRCYQSEFGRDLEKDIRSDTSGHFERLLVSMCQGNRDENQSINHQMAQEDAQRLYQAGEGRLGTDESCFNMILATRSFPQLRATMEAYSRMANRDLLSSVSREFSGYVESGLKTILQCALNRPAFFAERLYYAMKGAGTDDSTLVRIVVTRSEIDLVQIKQMFAQMYQKTLGTMIAGDTSGDYRRLLLAIVGQ

SEQ ID NO: 13601 - protein, 134 aa, Homo sapiens
MDPQTAPSRALLLLLFLHLAFLGGRSHPLGSPGSASDLETSGLQEQRNHLQGKLSELQVEQTSLEPLQESPRPTGVWKSREVATEGIRGHRKMVLYTLRAPRSPKMVQGSGCFGRKMDRISSSSGLGCKVLRRH

SEQ ID NO: 13602 - protein, 1434 aa, Homo sapiens
MLRLPKKGLPRFEQVQDEDTYLENLAIQRNASAFFEKYDRSEIQELLTTALVSWLSAKEDVRSQVDLPCGIMSQMNNVGFSTAILLTPVDPTALLDYREVHQMIRELAIGIYCLNQIPSISLEANYDQSSSCQLPPAYYDTRIGQILINIDYMLKALWHGIYMPKEKRARFSELWRAIMDIDPDGKPQTNKDIFSEFSSAGLTDITKDPDFNEIYDEDVNEDPTYDPNSPEETAVFMKYAENIMLKLTFSTTQIQQYENVFIFETGYWLTNAIKYNQDYLDICTYQRLQQRLYLQKKIIQKHFEKKKDIRRGIGYLKLICFLIPFLLSLKKKMKVPYLSSLLQPFSDDKVKTERELPPFIYGRDFKCQNFHYKENQYFHVHGGIEFDISTPSIENALEDFQKNLEKIRDCAANTFIEDSGYKEYYSIPVMEFHGKSYYVIYFELETFYQQLYKTQWWGAINEIVNNLRLKRLPLTDAQLHEQFKKKLGFKRAMKCKSIPFGMKSAVERGLSAVFHTFSRKTSSSTINVSDEAGYTIFHHAALHNRVSIICQLCNANFKVNQRRFVTFSQGPTPLHLAAQACSLETTVCLLCSKADYTLSEKRGWMPIHFAAFYDNVCIIIALCRKDPSLLEAEATAENQCTPLLLAATSGALDTIQYLFSIGANWRKTDIKGNNIIHLSVLTFHTEVLKYIIKLNIPELPVWKTLVEMLQCESYKRRMMAVMSLEVICLANDQYWRCILDAGTIPALINLLKSSKIKLQCKTVGLLSNISTHKSAVHALVEAGGIPSLINLLVCDEPEVHSRCAVILYDIAQCENKDVIAKYNGIPSLINLLNLNIENVLVNVMNCIRVLCIGNENNQRAVREHKGLPYLIRFLSSDSDVLKAVSSAAIAEVGRDNKEIQDAIAMEGAIPPLVALFKGKQISVQMKGAMAVESLASHNALIQKAFLEKSLTKYLLKLLKAFQIDVKEQGAVALWALAGQTLKQQKYMAEQIGYSFIINMLLSPSAKMQYVGGEAVIALSKDSRMHQNQICEGNGIAPLVRLLRISTIAEGTLLSVIRAVGSICIGVAHTSNPVSQQLVVDENAFPVLIQLLRNHPSPNIKVEVAFSLACIVLGNDVLQKDLHENEGFEYADVLYLLHSTEKDICLRAGYALTLFAFNNRFQQYLILESGIMTISIFERFLESTVETEKAMAAFQIVVLAKVIRDMDHITLSARGVTILVDSLYSVQTSTIVLTGNLIASLAHSRAGIPEAFTTLGTIQRLCYHLYSGIEEVRAACSSALGYLTYNANAFRILLKECRNKPNQFIRIKNNISRDASINPAFLKEFQMQQTLVGLPSLSLEKNGGPSIIPIFKRGKEHRRKLKPKIQPKDSLTLLPPVTNFMGLFKATKKTKDSHNIFSFSSTITSDITNVSRPRIVCLNQLGKHVQKANPEPAEG

SEQ ID NO: 13603 - protein, 1080 aa, Homo sapiens
MLRLPKKGLPRFEQVQDEDTYLENLAIQRNASAFFEKYDRSEIQELLTTALVSWLSAKEDVRSQVDLPCGIMSQMNNVGFSTAILLTPVDPTALLDYREVHQMIRELAIGIYCLNQIPSISLEANYDQSSSCQLPPAYYDTRIGQILINIDYMLKALWHGIYMPKEKRARFSELWRAIMDIDPDGKPQTNKDIFSEFSSAGLTDITKDPDFNEIYDEDVNEDPTYDPNSPEETAVFMKYAENIMLKLTFSTTQIQQYENVFIFETGYWLTNAIKYNQDYLDICTYQRLQQRLYLQKKIIQKHFEKKKDIRRGIGYLKLICFLIPFLLSLKKKMKVPYLSSLLQPFSDDKVKTERELPPFIYGRDFKCQNFHYKENQYFHVHGGIEFDISTPSIENALEDFQKNLEKIRDCAANTFIEDSGYKEYYSIPVMEFHGKSYYVIYFELETFYQQLYKTQWWGAINEIVNNLRLKRLPLTDAQLHEQFKKKLGFKRAMKCKSIPFGMKSAVERGLSAVFHTFSRKTSSSTINVSDEAGYTIFHHAALHNRVSIICQLCNANFKVNQRRFVTFSQGPTPLHLAAQACSLETTVCLLCSKADYTLSEKRGWMPIHFAAFYDNVCIIIALCRKDPSLLEAEATAENQCTPLLLAATSGALDTIQYLFSIGANWRKTDIKGNNIIHLSVLTFHTEVLKYIIKLNIPELPVWKTLVEMLQCESYKRRMMAVMSLEVICLANDQYWRCILDAGTIPALINLLKSSKIKLQCKTVGLLSNISTHKSAVHALVEAGGIPSLINLLVCDEPEVHSRCAVILYDIAQCENKDVIAKYNGIPSLINLLNLNIENVLVNVMNCIRVLCIGNENNQRAVREHKGLPYLIRFLSSDSDVLKAVSSAAIAEVGRDNKEIQDAIAMEGAIPPLVALFKGKQISVQMKGAMAVESLASHNALIQKAFLEKSLTKYLLKLLKAFQIDVKEQGAVALWALAGQTLKQQKYMAEQIGYSFIINMLLSPSAKMQYVGGEAVIALSKDSRMHQNQICEGNGIAPLVRLLRISTIAEGTLLSVIRAVGSICIGYLLKSRLCINTFCLQ

SEQ ID NO: 13604 - protein, 801 aa, Homo sapiens
MKYAENIMLKLTFSTTQIQQYENVFIFETGYWLTNAIKYNQDYLDICTYQRLQQRLYLQKKIIQKHFEKKKDIRRGIGYLKLICFLIPFLLSLKKKMKVPYLSSLLQPFSDDKVKTERELPPFIYGRDFKCQNFHYKENQYFHVHGGIEFDISTPSIENALEDFQKNLEKIRDCAANTFIEDSGYKEYYSIPVMEFHGKSYYVIYFELETFYQQLYKTQWWGAINEIVNNLRLKRLPLTDAQLHEQFKKKLGFKRAMKCKSIPFGMKSAVERGLSAVFHTFSRKTSSSTINVSDEAGYTIFHHAALHNRVSIICQLCNANFKVNQRRFVTFSQGPTPLHLAAQACSLETTVCLLCSKADYTLSEKRGWMPIHFAAFYDNVCIIIALCRKDPSLLEAEATAENQCTPLLLAATSGALDTIQYLFSIGANWRKTDIKGNNIIHLSVLTFHTEVLKYIIKLNIPELPVWKTLVEMLQCESYKRRMMAVMSLEVICLANDQYWRCILDAGTIPALINLLKSSKIKLQCKTVGLLSNISTHKSAVHALVEAGGIPSLINLLVCDEPEVHSRCAVILYDIAQCENKDVIAKYNGIPSLINLLNLNIENVLVNVMNCIRVLCIGNENNQRAVREHKGLPYLIRFLSSDSGLFNLFLNSFEDVLKAVSSAAIAEVGRDNKEIQDAIAMEGAIPPLVALFKGKQISVQMKGAMAVESLASHNALIQKAFLEKSLTKYLLKLLKAFQIDVKEQGAVALWALAGQTLKQQKYMAEQIGYSFIINMLLSPSAKMQYVGYLLKSRLCINTFCLQ

SEQ ID NO: 13605 - protein, 384 aa, Homo sapiens
MKVPYLSSLLQPFSDDKVKTERELPPFIYGRDFKCQNFHYKENQYFHVHGGIEFDISTPSIENALEDFQKNLEKIRDCAANTFIEDSGYKEYYSIPVMEFHGKSYYVIYFELETFYQQLYKTQWWGAINEIVNNLRLKRLPLTDAQLHEQFKKKLGFKRAMKCKSIPFGMKSAVERGLSAVFHTFSRKTSSSTINVSDEAGYTIFHHAALHNRVSIICQLCNANFKVNQRRFVTFSQGPTPLHLAAQACSLETTVCLLCSKADYTLSEKRGWMPIHFAAFYDNVCIIIALCRKDPSLLEAEATAENQCTPLLLAATSGALDTIQYLFSIGANWRKTDIKGNNIIHLSVLTFHTEVLKYIIKLNIPELPVWKTLKCYSVKAINEG

SEQ ID NO: 13606 - protein, 432 aa, Homo sapiens
MLGNSAPGPATREAGSALLALQQTALQEDQENINPEKAAPVQQPRTRAALAVLKSGNPRGLAQQQRPKTRRVAPLKDLPVNDEHVTVPPWKANSKQPAFTIHVDEAEKEAQKKPAESQKIEREDALAFNSAISLPGPRKPLVPLDYPMDGSFESPHTMDMSIILEDEKPVSVNEVPDYHEDIHTYLREMEVKCKPKVGYMKKQPDITNSMRAILVDWLVEVGEEYKLQNETLHLAVNYIDRFLSSMSVLRGKLQLVGTAAMLLASKFEEIYPPEVAEFVYITDDTYTKKQVLRMEHLVLKVLTFDLAAPTVNQFLTQYFLHQQPANCKVESLAMFLGELSLIDADPYLKYLPSVIAGAAFHLALYTVTGQSWPESLIRKTGYTLESLKPCLMDLHQTYLKAPQHAQQSIREKYKNSKYHGVSLLNPPETLNL

SEQ ID NO: 13607 - protein, 561 aa, Homo sapiens
MCGIWALFGSDDCLSVQCLSAMKIAHRGPDAFRFENVNGYTNCCFGFHRLAVVDPLFGMQPIRVKKYPYLWLCYNGEIYNHKKMQQHFEFEYQTKVDGEIILHLYDKGGIEQTICMLDGVFAFVLLDTANKKVFLGRDTYGVRPLFKAMTEDGFLAVCSEAKGLVTLKHSATPFLKVEPFLPGHYEVLDLKPNGKVASVEMVKYHHCRDVPLHALYDNVEKLFPGFEIETVKNNLRILFNNAVKKRLMTDRRIGCLLSGGLDSSLVAATLLKQLKEAQVQYPLQTFAIGMEDSPDLLAARKVADHIGSEHYEVLFNSEEGIQALDEVIFSLETYDITTVRASVGMYLISKYIRKNTDSVVIFSGEGSDELTQGYIYFHKAPSPEKAEEESERLLRELYLFDVLRADRTTAAHGLELRVPFLDHRFSSYYLSLPPEMRIPKNGIEKHLLRETFEDSNLIPKEILWRPKEAFSDGITSVKNSWFKILQEYVEHQVDDAMMANAAQKFPFNTPKTKEGYYYRQVFERHYPGRADWLSHYWMPKWINATDPSARTLTHYKSAVKA

SEQ ID NO: 13608 - protein, 540 aa, Homo sapiens
MKIAHRGPDAFRFENVNGYTNCCFGFHRLAVVDPLFGMQPIRVKKYPYLWLCYNGEIYNHKKMQQHFEFEYQTKVDGEIILHLYDKGGIEQTICMLDGVFAFVLLDTANKKVFLGRDTYGVRPLFKAMTEDGFLAVCSEAKGLVTLKHSATPFLKVEPFLPGHYEVLDLKPNGKVASVEMVKYHHCRDVPLHALYDNVEKLFPGFEIETVKNNLRILFNNAVKKRLMTDRRIGCLLSGGLDSSLVAATLLKQLKEAQVQYPLQTFAIGMEDSPDLLAARKVADHIGSEHYEVLFNSEEGIQALDEVIFSLETYDITTVRASVGMYLISKYIRKNTDSVVIFSGEGSDELTQGYIYFHKAPSPEKAEEESERLLRELYLFDVLRADRTTAAHGLELRVPFLDHRFSSYYLSLPPEMRIPKNGIEKHLLRETFEDSNLIPKEILWRPKEAFSDGITSVKNSWFKILQEYVEHQVDDAMMANAAQKFPFNTPKTKEGYYYRQVFERHYPGRADWLSHYWMPKWINATDPSARTLTHYKSAVKA

SEQ ID NO: 13609 - protein, 478 aa, Homo sapiens
MQQHFEFEYQTKVDGEIILHLYDKGGIEQTICMLDGVFAFVLLDTANKKVFLGRDTYGVRPLFKAMTEDGFLAVCSEAKGLVTLKHSATPFLKVEPFLPGHYEVLDLKPNGKVASVEMVKYHHCRDVPLHALYDNVEKLFPGFEIETVKNNLRILFNNAVKKRLMTDRRIGCLLSGGLDSSLVAATLLKQLKEAQVQYPLQTFAIGMEDSPDLLAARKVADHIGSEHYEVLFNSEEGIQALDEVIFSLETYDITTVRASVGMYLISKYIRKNTDSVVIFSGEGSDELTQGYIYFHKAPSPEKAEEESERLLRELYLFDVLRADRTTAAHGLELRVPFLDHRFSSYYLSLPPEMRIPKNGIEKHLLRETFEDSNLIPKEILWRPKEAFSDGITSVKNSWFKILQEYVEHQVDDAMMANAAQKFPFNTPKTKEGYYYRQVFERHYPGRADWLSHYWMPKWINATDPSARTLTHYKSAVKA

SEQ ID NO: 13610 - protein, 518 aa, Homo sapiens
MAFWAGGSPSVVDYFPSEDFYRCGYCKNESGSRSNGMWAHSMTVQDYQDLIDRGWRRSGKYVYKPVMNQTCCPQYTIRCRPLQFQPSKSHKKVLKKMLKFLAKGEVPKGSCEDEPMDSTMDDAVAGDFALINKLDIQCDLKTLSDDIKESLESEGKNSKKEEPQELLQSQDFVGEKLGSGEPSHSVKVHTVPKPGKGADLSKPPCRKAKEIRKERKRLKLMQQNPAGELEGFQAQGHPPSLFPPKAKSNQPKSLEDLIFESLPENASHKLEVRVVRSSPPSSQFKATLLESYQVYKRYQMVIHKNPPDTPTESQFTRFLCSSPLEAETPPNGPDCGYGSFHQQYWLDGKIIAVGVIDILPNCVSSVYLYYDPDYSFLSLGVYSALREIAFTRQLHEKTSQLSYYYMGFYIHSCPKMKYKGQYRPSDLLCPETYVWVPIEQCLPSLENSKYCRFNQDPEAVDEDRSTEPDRLQVFHKRAIMPYGVYKKQQKDPSEEAAVLQYASLVGQKCSERMLLFRN

SEQ ID NO: 13611 - protein, 518 aa, Homo sapiens
MAFWAGGSPSVVDYFPSEDFYRCGYCKNESGSRSNGMWAHSMTVQDYQDLIDRGWRRSGKYVYKPVMNQTCCPQYTIRCRPLQFQPSKSHKKVLKKMLKFLAKGEVPKGSCEDEPMDSTMDDAVAGDFALINKLDIQCDLKTLSDDIKESLESEGKNSKKEEPQELLQSQDFVGEKLGSGEPSHSVKVHTVPKPGKGADLSKPPCRKAKEIRKERKRLKLMQQNPAGELEGFQAQGHPPSLFPPKAKSNQPKSLEDLIFESLPENASHKLEVRLVPVSFEDPEFKSSFSQSFSLYVKYQVAIHQDPPDECGKTEFTRFLCSSPLEAETPPNGPDCGYGSFHQQYWLDGKIIAVGVIDILPNCVSSVYLYYDPDYSFLSLGVYSALREIAFTRQLHEKTSQLSYYYMGFYIHSCPKMKYKGQYRPSDLLCPETYVWVPIEQCLPSLENSKYCRFNQDPEAVDEDRSTEPDRLQVFHKRAIMPYGVYKKQQKDPSEEAAVLQYASLVGQKCSERMLLFRN

SEQ ID NO: 13612 - protein, 136 aa, Homo sapiens
MQTAGALFISPALIRCCTRGLIRPVSASFLNSPVNSSKQPSYSNFPLQVARREFQTSVVSRDIDTAAKFIGAGAATVGVAGSGAGIGTVFGSLIIGYARNPSLKQQLFSYAILGFALSEAMGLFCLMVAFLILFAM

SEQ ID NO: 13613 - protein, 553 aa, Homo sapiens
MAAPAGGGGSAVSVLAPNGRRHTVKVTPSTVLLQVLEDTCRRQDFNPCEYDLKFQRSVLDLSLQWRFANLPNNAKLEMVPASRSREGPENMVRIALQLDDGSRLQDSFCSGQTLWELLSHFPQIRECLQHPGGATPVCVYTRDEVTGEAALRGTTLQSLGLTGGSATIRFVMKCYDPVGKTPGSLGSSASAGQAAASAPLPLESGELSRGDLSRPEDADTSGPCCEHTQEKQSTRAPAAAPFVPFSGGGQRLGGPPGPTRPLTSSSAKLPKSLSSPGGPSKPKKSKSGQDPQQEQEQERERDPQQEQERERPVDREPVDREPVVCHPDLEERLQAWPAELPDEFFELTVDDVRRRLAQLKSERKRLEEAPLVTKAFREAQIKEKLERYPKVALRVLFPDRYVLQGFFRPSETVGDLRDFVRSHLGNPELSFYLFITPPKTVLDDHTQTLFQANLFPAALVHLGAEEPAGVYLEPGLLEHAISPSAADVLVARYMSRAAGSPSPLPAPDPAPKSEPAAEEGALVPPEPIPGTAQPVKRSLGKVPKWLKLPASKR

SEQ ID NO: 13614 - protein, 647 aa, Homo sapiens
MAAPAGGGGSAVSVLAPNGRRHTVKVTPSTVLLQVLEDTCRRQDFNPCEYDLKFQRSVLDLSLQWRFANLPNNAKLEMVPASRSREGPENMVRIALQLDDGSRLQDSFCSGQTLWELLSHFPQIRECLQHPGGATPVCVYTRDEVTGEAALRGTTLQSLGLTGGSATIRFVMKCYDPVGKTPGSLGSSASAGQAAASAPLPLESGELSRGDLSRPEDADTSGPCCEHTQEKQSTRAPAAAPFVPFSGGGQRLGGPPGPTRPLTSSSAKLPKSLSSPGGPSKPKKSKSGQDPQQEQEQERERDPQQEQERERPVDREPVDREPVVCHPDLEERLQAWPAELPDEFFELTVDDVRRRLAQLKSERKRLEEAPLVTKAFREAQIKEKLERYPKVALRVLFPDRYVLQGFFRPSETVGDLRDFVRSHLGNPELSFYLFITPPKTVLDDHTQTLFQPQLGDRVAPFTLGPSLKRCLGPEQRTRLPVVGDGGDVDSGRLLFWGPSRGRASPSTGQPPCHPVCRPSSPPSPRPSSGDPSRVKAGHKHVGTGRANLFPAALVHLGAEEPAGVYLEPGLLEHAISPSAADVLVARYMSRAAGSPSPLPAPDPAPKSEPAAEEGALVPPEPIPGTAQPVKRSLGKVPKWLKLPASKR

SEQ ID NO: 13615 - protein, 501 aa, Homo sapiens
MVPASRSREGPENMVRIALQLDDGSRLQDSFCSGQTLWELLSHFPQIRECLQHPGGATPVCVYTRDEVTGEAALRGTTLQSLGLTGGSATIRFVMKCYDPVGKTPGSLGSSASAGQAAASAPLPLESGELSRGDLSRPEDADTSGPCCEHTQEKQSTRAPAAAPFVPFSGGGQRLGGPPGPTRPLTSSSAKLPKSLSSPGGPSKPKKSKSGQDPQQEQEQERERDPQQEQERERPVDREPVDREPVVCHPDLEERLQAWPAELPDEFFELTVDDVRRRLAQLKSERKRLEEAPLVTKAFREAQIKEKLERYPKVALRVLFPDRYVLQGFFRPSETVGDLRDFVRSHLGNPELSFYLCLSSFGRMDGRGPRCFLTRRCLLSSVITPPKTVLDDHTQTLFQANLFPAALVHLGAEEPAGVYLEPGLLEHAISPSAADVLVARYMSRAAGSPSPLPAPDPAPKSEPAAEEGALVPPEPIPGTAQPVKRSLGKVPKWLKLPASKR

SEQ ID NO: 13616 - protein, 348 aa, Homo sapiens
MVPASRSREGPENMVRIALQLDDGSRLQDSFCSGQTLWELLSHFPQIRECLQHPGGATPVCVYTRDEVTGEAALRGTTLQSLGLTGGSATIRFVMKCYDPVGKTPGSLGSSASAGQAAASAPLPLESGELSRGDLSRPEDADTSGPCCEHTQEKQSTRAPAAAPFVPFSGGGQRLGGPPGPTRPLTSSSAKLPKSLSSPGGPSKPKKSKSGQDPQQEQEQERERDPQQEQERERPVDREPVDREPVVCHPDLEERLQAWPAELPDEFFELTVDDVRRRLAQLKSERKRLEEAPLVTKAFREAQIKEKLERYPRRSLSLSPRLESVVPSQLTASSASRVQVVLLPQPPK

SEQ ID NO: 13617 - protein, 51 aa, Homo sapiens
MVAYWRQAGLSYIRYSQICAKVVRDALKTEFKANAKKTSGNSVKIVKVKKE

SEQ ID NO: 13618 - protein, 426 aa, Homo sapiens
MDGTTAPVTKSGAAKLVKRNFLEALKSNDFGKLKAILIQRQIDVDTVFEVEDENMVLASYKQGYWLPSYKLKSSWATGLHLSVLFGHVECLLVLLDHNATINCRPNGKTPLHVACEMANVDCVKILCDRGAKLNCYSLSGHTALHFCTTPSSILCAKQLVWRGANVNMKTNNQDEETPLHTAAHFGLSELVAFYVEHGAIVDSVNAHMETPLAIAAYWALRFKEQEYSTEHHLVCRMLLDYKAEVNARDDDFKSPLHKAAWNCDHVLMHMMLEAGAEANLMDINGCAAIQYVLKVTSVRPAAQPEICYQLLLNHGAARIYPPQFHKVIQACHSCPKAIEVVVNAYEHIRWNTKWRRAIPDDDLEKYWDFYHSLFTVCCNSPRTLMHLSRCAIRRTLHNRCHRAIPLLSLPLSLKKYLLLEPEGIIY

SEQ ID NO: 13619 - protein, 349 aa, Homo sapiens
MDGTTAPVTKSGAAKLVKRNFLEALKSNDFGKLKAILIQRQIDVDTVFEVEDENMVLASYKQGYWLPSYKLKSSWATGLHLSVLFGHVECLLVLLDHNATINCRPNGKTPLHVACEMANVDCVKILCDRGAKLNCYSLSGHTALHFCTTPSSILCAKQLVWRGANVNMKTNNQDEETPLHTAAHFGLSELVAFYVEHGAIVDSVNAHMETPLAIAAYWALRFKEQEYSTEHHLVCRMLLDYKAEVNARDDDFKSPLHKAAWNCDHVLMHMMLEAGAEANLMDINGCAAIQYVLKVTSVRPAAQPEICYQLLLNHGAARIYPPQFHKVRLCPVVSRLRKIQMAALSEISK

SEQ ID NO: 13620 - protein, 631 aa, Homo sapiens
MPRYGASLRQSCPRSGREQGQDGTAGAPGLLWMGLVLALALALALALALSDSRVLWAPAEAHPLSPQGHPARLHRIVPRLRDVFGWGNLTCPICKGLFTAINLGLKKEPNVARVGSVAIKLCNLLKIAPPAVCQSIVHLFEDDMVEVWRRSVLSPSEACGLLLGSTCGHWDIFSSWNISLPTVPKPPPKPPSPPAPGAPVSRILFLTDLHWDHDYLEGTDPDCADPLCCRRGSGLPPASRPGAGYWGEYSKCDLPLRTLESLLSGLGPAGPFDMVYWTGDIPAHDVWHQTRQDQLRALTTVTALVRKFLGPVPVYPAVGNHESTPVNSFPPPFIEGNHSSRWLYEAMAKAWEPWLPAEALRTLRIGGFYALSPYPGLRLISLNMNFCSRENFWLLINSTDPAGQLQWLVGELQAAEDRGDKVHIIGHIPPGHCLKSWSWNYYRIVARYENTLAAQFFGHTHVDEFEVFYDEETLSRPLAVAFLAPSATTYIGLNPGYRVYQIDGNYSGSSHVVLDHETYILNLTQANIPGAIPHWQLLYRARETYGLPNTLPTAWHNLVYRMRGDMQLFQTFWFLYHKGHPPSEPCGTPCRLATLCAQLSARADSPALCRHLMPDGSLPEAQSLWPRPLFC

SEQ ID NO: 13621 - protein, 587 aa, Homo sapiens
MPRYGASLRQSCPRSGREQGQDGTAGAPGLLWMGLVLALALALALALALSDSRVLWAPAEAHPLSPQGHPARLHRIVPRLRDVFGWGNLTCPICKGLFTAINLGLKKEPNVARVGSVAIKLCNLLKIAPPAVCQSIVHLFEDDMVEVWRRSVLSPSEACGLLLGSTCGHWDIFSSWNISLPTVPKPPPKPPSPPAPGAPVSRILFLTDLHWDHDYLEGTDPDCADPLCCRRGSGLPPASRPGAGYWGEYSKCDLPLRTLESLLSGLGPAGPFDMVYWTGDIPAHDVWHQTRQDQLRALTTVTALVRKFLGPVPVYPAVGNHESTPVNSFPPPFIEGNHSSRWLYEAMAKAWEPWLPAEALRTLRYLSSVETQEGKRKVHIIGHIPPGHCLKSWSWNYYRIVARYENTLAAQFFGHTHVDEFEVFYDEETLSRPLAVAFLAPSATTYIGLNPGYRVYQIDGNYSGSSHVVLDHETYILNLTQANIPGAIPHWQLLYRARETYGLPNTLPTAWHNLVYRMRGDMQLFQTFWFLYHKGHPPSEPCGTPCRLATLCAQLSARADSPALCRHLMPDGSLPEAQSLWPRPLFC

SEQ ID NO: 13622 - protein, 575 aa, Homo sapiens
MPRYGASLRQSCPRSGREQGQDGTAGAPGLLWMGLVLALALALALALALSDSRVLWAPAEAHPLSPQGHPARLHRIVPRLRDVFGWGNLTCPICKGLFTAINLGLKKEPNVARVGSVAIKLCNLLKIAPPAVCQSIVHLFEDDMVEVWRRSVLSPSEACGLLLGSTCGHWDIFSSWNISLPTVPKPPPKPPSPPAPGAPVSRILFLTDLHWDHDYLEGTDPDCADPLCCRRGSGLPPASRPGAGYWGEYSKCDLPLRTLESLLSGLGPAGPFDMVYWTGDIPAHDVWHQTRQDQLRALTTVTALVRKFLGPVPVYPAVGNHESTPVNSFPPPFIEGNHSSRWLYEAMAKAWEPWLPAEALRTLRKVHIIGHIPPGHCLKSWSWNYYRIVARYENTLAAQFFGHTHVDEFEVFYDEETLSRPLAVAFLAPSATTYIGLNPGYRVYQIDGNYSGSSHVVLDHETYILNLTQANIPGAIPHWQLLYRARETYGLPNTLPTAWHNLVYRMRGDMQLFQTFWFLYHKGHPPSEPCGTPCRLATLCAQLSARADSPALCRHLMPDGSLPEAQSLWPRPLFC

SEQ ID NO: 13623 - protein, 630 aa, Homo sapiens
MPRYGASLRQSCPRSGREQGQDGTAGAPGLLWMGLVLALALALALALALSDSRVLWAPAEAHPLSPQGHPARLHRIVPRLRDVFGWGNLTCPICKGLFTAINLGLKEPNVARVGSVAIKLCNLLKIAPPAVCQSIVHLFEDDMVEVWRRSVLSPSEACGLLLGSTCGHWDIFSSWNISLPTVPKPPPKPPSPPAPGAPVSRILFLTDLHWDHDYLEGTDPDCADPLCCRRGSGLPPASRPGAGYWGEYSKCDLPLRTLESLLSGLGPAGPFDMVYWTGDIPAHDVWHQTRQDQLRALTTVTALVRKFLGPVPVYPAVGNHESTPVNSFPPPFIEGNHSSRWLYEAMAKAWEPWLPAEALRTLRIGGFYALSPYPGLRLISLNMNFCSRENFWLLINSTDPAGQLQWLVGELQAAEDRGDKVHIIGHIPPGHCLKSWSWNYYRIVARYENTLAAQFFGHTHVDEFEVFYDEETLSRPLAVAFLAPSATTYIGLNPGYRVYQIDGNYSGSSHVVLDHETYILNLTQANIPGAIPHWQLLYRARETYGLPNTLPTAWHNLVYRMRGDMQLFQTFWFLYHKGHPPSEPCGTPCRLATLCAQLSARADSPALCRHLMPDGSLPEAQSLWPRPLFC

SEQ ID NO: 13624 - protein, 345 aa, Homo sapiens
MGSSEDQAYRLLNDYANGFMVSQVLFAACELGVFDLLAEAPGPLDVAAVAAGVRASAHGTELLLDICVSLKLLKVETRGGKAFYRNTELSSDYLTTVSPTSQCSMLKYMGRTSYRCWGHLADAVREGRNQYLETFGVPAEELFTAIYRSEGERLQFMQALQEVWSVNGRSVLTAFDLSVFPLMCDLGGGAGALAKECMSLYPGCKITVFDIPEVVWTAKQHFSFQEEEQIDFQEGDFFKDPLPEADLYILARVLHDWADGKCSHLLERIYHTCKPGGGILVIESLLDEDRRGPLLTQLYSLNMLVQTEGQERTPTHYHMLLSSAGFRDFQFKKTGAIYDAILARK

SEQ ID NO: 13625 - protein, 298 aa, Homo sapiens
MGSSEDQAYRLLNDYANGFMVSQVLFAACELGVFDLLAEAPGPLDVAAVAAGVRASAHGTELLLDICVSLKLLKVETRGGKAFYRNTELSSDYLTTVSPTSQCSMLKYMGRTSYRCWGHLADAVREGRNQYLETFGVPAEELFTAIYRSEGERLQFMQALQEVWSVNGRSVLTAFDLSVFPLMCDLGGDFFKDPLPEADLYILARVLHDWADGKCSHLLERIYHTCKPGGGILVIESLLDEDRRGPLLTQLYSLNMLVQTEGQERTPTHYHMLLSSAGFRDFQFKKTGAIYDAILARK

SEQ ID NO: 13626 - protein, 373 aa, Homo sapiens
MGSSEDQAYRLLNDYANGFMVSQVLFAACELGVFDLLAEAPGPLDVAAVAAGVRASAHGTELLLDICVSLKLLKVETRGGKAFYRNTELSSDYLTTVSPTSQCSMLKYMGRTSYRCWGHLADAVREGRNQYLETFGVPAEELFTAIYRSEGERLQFMQALQEVWSVNGRSVLTAFDLSVFPLMCDLGGTWIKLETIILSKLSQGQKTKHRVFSLIGGAGALAKECMSLYPGCKITVFDIPEVVWTAKQHFSFQEEEQIDFQEGDFFKDPLPEADLYILARVLHDWADGKCSHLLERIYHTCKPGGGILVIESLLDEDRRGPLLTQLYSLNMLVQTEGQERTPTHYHMLLSSAGFRDFQFKKTGAIYDAILARK

SEQ ID NO: 13627 - protein, 278 aa, Homo sapiens
MPMGAAERGAGPQSSAAPWAGSEKAAKRGPSKSWYPRAAASDVTCPTGGDGADPKPGPFGGGLALGPAPRGTMNNNFCRALVDRRPLGPPSCMQLGVMPPPRQAPLPPAEPLGNVPFLLYPGPAEPPYYDAYAGVFPYVPFPGAFGVYEYPFEPAFIQKRNERERQRVKCVNEGYARLRGHLPGALAEKRLSKVETLRAAIRYIKYLQELLSSAPDGSTPPASRGLPGTGPCPAPPATPRPDRPGDGEARAPSSLVPESSESSCFSPSPFLESEESWH

SEQ ID NO: 13628 - protein, 369 aa, Homo sapiens
MVWAPLGPPRTDCLTLLHTPSKDSPKMSLEWLVAWSWSLDGLRDCIATGIQSVRDCDTTAVITVACLLVLFVWYCYHVGREQPRPYVSVNSLMQAADANGLQNGYVYCQSPECVRCTHNEGLNQKLYHNLQEYAKRYSWSGMGRIHKGIREQGRYLNSRPSIQKPEVFFLPDLPTTPYFSRDAQKHDVEVLERNFQTILCEFETLYKAFSNCSLPQGWKMNSTPSGEWFTFYLVNQGVCVPRNCRKCPRTYRLLGSLRTCIGNNVFGNACISVLSPGTVITEHYGPTNIRIRCHLGLKTPNGCELVVGGEPQCWAEGRCLLFDDSFLHAAFHEGSAEDGPRVVFMVDLWHPNVAAAERQALDFIFAPGR

SEQ ID NO: 13629 - protein, 602 aa, Homo sapiens
MPSAKQRGSKGGHGAASPSEKGAHPSGGADDVAKKPPPAPQQPPPPPAPHPQQHPQQHPQNQAHGKGGHRGGGGGGGKSSSSSSASAAAAAAAASSSASCSRRLGRALNFLFYLALVAAAAFSGWCVHHVLEEVQQVRRSHQDFSRQREELGQGLQGVEQKVQSLQATFGTFESILRSSQHKQDLTEKAVKQGESEVSRISEVLQKLQNEILKDLSDGIHVVKDARERDFTSLENTVEERLTELTKSINDNIAIFTEVQKRSQKEINDMKAKVASLEESEGNKQDLKALKEAVKEIQTSAKSREWDMEALRSTLQTMESDIYTEVRELVSLKQEQQAFKEAADTERLALQALTEKLLRSEESVSRLPEEIRRLEEELRQLKSDSHGPKEDGGFRHSEAFEALQQKSQGLDSRLQHVEDGVLSMQVASARQTESLESLLSKSQEHEQRLAALQGRLEGLGSSEADQDGLASTVRSLGETQLVLYGDVEELKRSVGELPSTVESLQKVQEQVHTLLSQDQAQAARLPPQDFLDRLSSLDNLKASVSQVEADLKMLRTAVDSLVAYSVKIETNENNLESAKGLLDDLRNDLDRLFVKVEKIHEKV

SEQ ID NO: 13630 - protein, 178 aa, Homo sapiens [sequence omitted]

SEQ ID NO: 13631 - protein, 168 aa, Homo sapiens
MTATLRPYLSAVRATLQAALCLENFSSQVVERHNKPEVEVRSSKELLLQPVTISRNEKEKVLIEGSINSVRVSIAVKQADEIEKILCHKFMRFMMMRAENFFILRRKPVEGYDISFLITNFHTEQMYKHKLVDFVIHFMEEIDKEISEMKLSVNARARIVAEEFLKNF

SEQ ID NO: 13632 - protein, 625 aa, Homo sapiens
MTATLRPYLSAVRATLQAALCLENFSSQVVERHNKPEVEVRSSKELLLQPVTISRNEKEKVLIEGSINSVRVSIAVKQADEIEKILCHKFMRFMMMRAENFFILRRKPVEQKKIFTIQGCYPVIRCLLRRRGWVEKKMVHRSGPTLLPPQKDLDSSAMGDSDTTEDEDEDEDEEFQPSQLFDFDDLLKFDDLDGTHALMVGLCLNLRNLPWFDEVDANSFFPRCYCLGAEDDKKAFIGDKQPKKQEKNPVLVSPEFVDEALCACEEYLSNLAHMDIDKDLEAPLYLTPEGWSLFLQRYYQVVHEGAELRHLDTQVQRCEDILQQLQAVVPQIDMEGDRNIWIVKPGAKSRGRGIMCMDHLEEMLKLVNGNPVVMKDGKWVVQKYIERPLLIFGTKFDLRQWFLVTDWNPLTVWFYRDSYIRFSTQPFSLKNLDNSVHLCNNSIQKHLENSCHRHPLLPPDNMWSSQRFQAHLQEMGAPNAWSTIIVPGMKDAVIHALQTSQDTVQCRKASFELYGADFVFGEDFQPWLIEINASPTMAPSTAVTARLCAGVQADTLRVVIDRMLDRNCDTGAFELIYKQPVTTSPASTPRPSCLLPMYSDTRARSSDDSTASWWALRPCRPQARP

SEQ ID NO: 13633 - protein, 187 aa, Homo sapiens
MVREPGPRPGTPGCSASGQWTATLRPYLSAVRATLQAALCLENFSSQVVERHNKPEVEVRSSKELLLQPVTISRNEKEKVLIEGSINSVRVSIAVKQADEIEKILCHKFMRFMMMRAENFFILRRKPVEGYDISFLITNFHTEQMYKHKLVDFVIHFMEEIDKEISEMKLSVNARARIVAEEFLKNF

SEQ ID NO: 13634 - protein, 78 aa, Homo sapiens
MRFMMMRAENFFILRRKPVEGYDISFLITNFHTEQMYKHKLVDFVIHFMEEIDKEISEMKLSVNARARIVAEEFLKNF

SEQ ID NO: 13635 - protein, 226 aa, Homo sapiens
MSRIYHDGALRNKAVQSVRLPGAWDPAAHQGGNGVLLEGELIDVSRHSILDTHGRKERYYVLYIRPSHIHRRKFDAKGNEIEPNFSATRKVNTGFLMSSYKVEAKGDTDRLTPEALKGLVNKPELLALTESLTPDHTVAFWMPESEMEVMELELGAGVRLKTRGDGPFLDSLAKLEAGTVTKCNFTGDGKTGASWTDNIMAQKCSKGAAAEIREQGDGAEDEEWDD

SEQ ID NO: 13636 - protein, 394 aa, Homo sapiens
MSRIYHDGALRNKAVQSVRLPGAWDPAAHQGGNGVLLEGELIDVSRHSILDTHGRKERYYVLYIRPSHIHRRKFDAKGNEIEPNFSATRKVNTGFLMSSYKVEAKGDTDRLTPEALKGLVNKPELLALTESLTPDHTVAFWMPESEMEVMELELGAGVRLKTRGDGPFLDSLAKLEAGTVTKCNFTGDGKTGASWTDNIMAQKCSKGAAAEIREQGDGAEDEEWPEEIQQQIVRETFHLVLKRDDNICNFLEGGSLIGGSDYKLIYRHYATLYFVFCVDSSESELGILDLIQVFVETLDKCFENVCELDLIFHMDKVHYILQEVVMGGMVLETNMNEIVAQIEAQNRLEKSEGGLSAAPARAVSAVKNINLPEIPRNINIGDLNIKVPNLSQFV

SEQ ID NO: 13637 - protein, 178 aa, Homo sapiens
MNKRTSVDASKEDLHPADPQSGEGVPPNRKNTKTSPRGEGTAPPFSARPCVWTLCEMLSILALVGVLHPFYRSNNQVYQKLKTHLRCQSSRVDGLMLKPTLLTPSQLKSPEGHLILPTFNHLVIRHILDPKQIFCVADVCTDCKFNCGSIERHQKRHLMRVSQDWEHLIRYRNQICLS

SEQ ID NO: 13638 - protein, 165 aa, Homo sapiens
MNKRTSVDASKEDLHPADPQSGEGVPPNRKNTKTSPRGEGTAPPFSARPCVWTLCEMLSILALVGVLHPFYRSNNQVYQKLKTHLRCQSSRVDGLMLKPTLLTPSQLKSPEGHLILPTFNHLVIRHILDPKQIFCVADVCTDCKFNCGSIERHQKRHLMRVSQDW

SEQ ID NO: 13639 - protein, 407 aa, Homo sapiens
MLFDKVKAFSVQLDGATAGVEPVFSGGQAVAGRVLLELSSAARVGALRLRARGRAHVHWTESRSAGSSTAYTQSYSERVEVVSHRATLLAPDTGETTTLPPGRHEFLFSFQLPPTLVTSFEGKHGSVRYCIKATLHRPWVPARRARKVFTVIEPVDINTPALLAPQAGAREKVARSWYCNRGLVSLSAKIDRKGYTPGEVIPVFAEIDNGSTRPVLPRAAVVQTQTFMARGARKQKRAVVASLAGEPVGPGQRALWQGRALRIPPVGPSILHCRVLHVDYALKVCVDIPGTSKLLLELPLVIGTIPLHPFGSRSSSVGSHASFLLDWRLGALPERPEAPPEYSEVVADTEEAALGQSPFPLPQDPDMSLEGPFFAYIQEFRYRPPPLYSEEDPNPLLGDMRPRCMTC

SEQ ID NO: 13640 - protein, 402 aa, Homo sapiens
MRSGGVRSFALELARGPGGAYRGGERLCGRVLLEAAAPLRVRALEVKARGGAATHWLEGRSVGVNAVSSDYAAAETYLRRRQLLLRDTGETTTLPPGRHEFLFSFQLPPTLVTSFEGKHGSVRYCIKATLHRPWVPARRARKVFTVIEPVDINTPALLAPQAGAREKVARSWYCNRGLVSLSAKIDRKGYTPGEVIPVFAEIDNGSTRPVLPRAAVVQTQTFMARGARKQKRAVVASLAGEPVGPGQRALWQGRALRIPPVGPSILHCRVLHVDYALKVCVDIPGTSKLLLELPLVIGTIPLHPFGSRSSSVGSHASFLLDWRLGALPERPEAPPEYSEVVADTEEAALGQSPFPLPQDPDMSLEGPFFAYIQEFRYRPPPLYSEEDPNPLLGDMRPRCMTC

SEQ ID NO: 13641 - protein, 230 aa, Homo sapiens
MANSRFSCTQIWVKMYGYFAGLCRRLQKFWRVTVKGFFVKKKEKKIPSAETYFHEEKIVVLGQVLMNESLPIEKRAQAAQKIGLLAFTGGPPAGNFAAEYMEEVAHLLQDEELAPKIKILLLQSVACWCYLNPVSQKRAKSLQFIPILISFFEGRFESTIKSETNSYLLLKFWTCYVLSVMTCNNLSCVKELKDHSALKYHLQMLAAENWSGWTENFAEVLYFLIGFHRN

SEQ ID NO: 13642 - protein, 533 aa, Homo sapiens
MGPRGAASLPRGPGPRRLLLPVVLPLLLLLLLAPPGSGAGASRPPHLVFLLADDLGWNDVGFHGSRIRTPHLDALAAGGVLLDNYYTQPLCTPSRSQLLTGRYQIRTGLQHQIIWPCQPSCVPLDEKLLPQLLKEAGYTTHMVGKWHLGMYRKECLPTRRGFDTYFGYLLGSEDYYSHERCTLIDALNVTRCALDFRDGEEVATGYKNMYSTNIFTKRAIALITNHPPEKPLFLYLALQSVHEPLQVPEEYLKPYDFIQDKNRHHYAGMVSLMDEAVGNVTAALKSSGLWNNTVFIFSTDNGGQTLAGGNNWPLRGRKWSLWEGGVRGVGFVASPLLKQKGVKNRELIHISDWLPTLVKLARGHTNGTKPLDGFDVWKTISEGSPSPRIELLHNIDPNFVDSSPCPRNSMAPAKDDSSLPEYSAFNTSVHAAIRHGNWKLLTGYPGCGYWFPPPSQYNVSEIPSSDPPTKTLWLFDIDRDPEERHDLSREYPHIVTKLLSRLQFYHKHSVPVYFPAQDPRCDPKATGVWGPWM

SEQ ID NO: 13643 - protein, 413 aa, Homo sapiens
MGPRGAASLPRGPGPRRLLLPVVLPLLLLLLLAPPGSGAGASRPPHLVFLLADDLGWNDVGFHGSRIRTPHLDALAAGGVLLDNYYTQPLCTPSRSQLLTGRYQIRTGLQHQIIWPCQPSCVPLDEKLLPQLLKEAGYTTHMVGKWHLGMYRKECLPTRRGFDTYFGYLLGSEDYYSHERCTLIDALNVTRCALDFRDGEEVATGYKNMYSTNIFTKRAIALITNHPPEKPLFLYLALQSVHEPLQVPEEYLKPYDFIQDKNRHHYAGMVSLMDEAVGNVTAALKSSGLWNNTVFIFSTDNGGQTLAGGNNWPLRGRKWSLWEGGVRGVGFVASPLLKQKGVKNRELIHISDWLPTLVKLARGHTNGTKPLDGFDVWKTISEGSPSPRIELLHNIDPNFVDSSPYWPECSLLL

SEQ ID NO: 13644 - protein, 773 aa, Homo sapiens
MDVTSSSGGGGDPRQIEETKPLLGGDVSAPEGTKMGAVPCRRALLLCNGMRYKLLQEGDIQVCVIRHPRTFLSKILTSKFLRRWEPHHLTLADNSLASATPTGYMENSVSYSAIEDVQLLSWENAPKYCLQLTIPGGTVLLQAANSYLRDQWFHSLQWKKKIYKYKKVLSNPSRWEVVLKEIRTLVDMALTSPLQDDSINQAPLEIVSKLLSENTNLTTQEHENIIVAIAPLLENNHPPPDLCEFFCKHCRERPRSMVVIEVFTPVVQRILKHNMDFGKCPRLRLFTQEYILALNELNAGMEVVKKFIQSMHGPTGHCPHPRVLPNLVAVCLAAIYSCYEEFINSRDNSPSLKEIRNGCQQPCDRKPTLPLRLLHPSPDLVSQEATLSEARLKSVVVASSEIHVEVERTSTAKPALTASAGNDSEPNLIDCLMVSPACSTMSIELGPQADRTLGCYVEILKLLSDYDDWRPSLASLLQPIPFPKEALAHEKFTKELKYVIQRFAEDPRQEVHSCLLSVRAGKDGWFQLYSPGGVACDDDGELFASMVHILMGSCYKTKKFLLSLAENKLGPCMLLALRGNQTMVEILCLMLEYNIIDNNDTQLQIISTLESTDVGKRMYEQLCDRQRELKELQRKGGPTRLTLPSKSTDADLARLLSSGSFGNLENLSLAFTNVTSACAEHLIKLPSLKQLNLWSTQFGDAGLRLLSEHLTMLQVLNLCETPVTDAGLLALSSMKSLCSLNMNSTKLSADTYEDLKAKLPNLKEVDVRYTEAW

SEQ ID NO: 13645 - protein, 679 aa, Homo sapiens
MGQAAEPTGYMENSVSYSAIEDVQLLSWENAPKYCLQLTIPGGTVLLQAANSYLRDQWFHSLQWKKKIYKYKKVLSNPSRWEVVLKEIRTLVDMALTSPLQDDSINQAPLEIVSKLLSENTNLTTQEHENIIVAIAPLLENNHPPPDLCEFFCKHCRERPRSMVVIEVFTPVVQRILKHNMDFGKCPRLRLFTQEYILALNELNAGMEVVKKFIQSMHGPTGHCPHPRVLPNLVAVCLAAIYSCYEEFINSRDNSPSLKEIRNGCQQPCDRKPTLPLRLLHPSPDLVSQEATLSEARLKSVVVASSEIHVEVERTSTAKPALTASAGNDSEPNLIDCLMVSPACSTMSIELGPQADRTLGCYVEILKLLSDYDDWRPSLASLLQPIPFPKEALAHEKFTKELKYVIQRFAEDPRQEVHSCLLSVRAGKDGWFQLYSPGGVACDDDGELFASMVHILMGSCYKTKKFLLSLAENKLGPCMLLALRGNQTMVEILCLMLEYNIIDNNDTQLQIISTLESTDVGKRMYEQLCDRQRELKELQRKGGPTRLTLPSKSTDADLARLLSSGSFGNLENLSLAFTNVTSACAEHLIKLPSLKQLNLWSTQFGDAGLRLLSEHLTMLQVLNLCETPVTDAGLLALSSMKSLCSLNMNSTKLSADTYEDLKAKLPNLKEVDVRYTEAW

SEQ ID NO: 13646 - protein, 620 aa, Homo sapiens
MASVAQKKIYKYKKVLSNPSRWEVVLKEIRTLVDMALTSPLQDDSINQAPLEIVSKLLSENTNLTTQEHENIIVAIAPLLENNHPPPDLCEFFCKHCRERPRSMVVIEVFTPVVQRILKHNMDFGKCPRLRLFTQEYILALNELNAGMEVVKKFIQSMHGPTGHCPHPRVLPNLVAVCLAAIYSCYEEFINSRDNSPSLKEIRNGCQQPCDRKPTLPLRLLHPSPDLVSQEATLSEARLKSVVVASSEIHVEVERTSTAKPALTASAGNDSEPNLIDCLMVSPACSTMSIELGPQADRTLGCYVEILKLLSDYDDWRPSLASLLQPIPFPKEALAHEKFTKELKYVIQRFAEDPRQEVHSCLLSVRAGKDGWFQLYSPGGVACDDDGELFASMVHILMGSCYKTKKFLLSLAENKLGPCMLLALRGNQTMVEILCLMLEYNIIDNNDTQLQIISTLESTDVGKRMYEQLCDRQRELKELQRKGGPTRLTLPSKSTDADLARLLSSGSFGNLENLSLAFTNVTSACAEHLIKLPSLKQLNLWSTQFGDAGLRLLSEHLTMLQVLNLCETPVTDAGLLALSSMKSLCSLNMNSTKLSADTYEDLKAKLPNLKEVDVRYTEAW

SEQ ID NO: 13647 - protein, 774 aa, Homo sapiens
MRGPIVLHICLAFCSLLLFSVATQCLAFPKIERRREIAHVHAEKGQSDKMNTDDLENSSVTSKQTPQLVVSEDPMMMSAVPSATSLNKAFSINKETQPGQAGLMQTERPGVSTPTESGVPSAEEVFGSSQPERISPESGLAKAMLTIAITATPSLTVDEKEELLTSTNFQPIVEEITETTKGFLKYMDNQSFATESQEGVGLGHSPSSYVNTKEMLTTNPKTEKFEADTDHRTTSFPGAESTAGSEPGSLTPDKEKPSQMTADNTQAAATKQPLETSEYTLSVEPETDSLLGAPEVTVSVSTAVPAASALSDEWDDTKLESVSRIRTPKLGDNEETQVRTEMSQTAQVSHEGMEGGQPWTEAAQVALGLPEGETHTGTALLIAHGNERSPAFTDQSSFTPTSLMEDMKVSIVNLLQSTGDFTESTKENDALFFLETTVSVSVYESEADQLLGNTMKDIITQEMTTAVQEPDATLSMVTQEQVATLELIRDSGKTEEEKEDPSPVSDVPGVTQLSRRWEPLATTISTTVVPLSFEVTPTVEEQMDTVTGPNEEFTPVLGSPVTPPGIMVGEPSISPALPALEASSERRTVVPSITRVNTAASYGLDQLESEEGQEDEDEEDEEDEDEEEEDEEEDEEDKDADSLDEGLDGDTELPGFTLPGITSQEPGLEEGNMDLLEGATYQVPDALEWEQQNQGLVRSWMEKLKDKAGYMSGMLVPVGVGIAGALFILGALYSIKVMNRRRRNGFKRHKRKQREFNSMQDRVMLLADSSEDEF

SEQ ID NO: 13648 - protein, 670 aa, Homo sapiens
MRGPIVLHICLAFCSLLLFSVATQCLAFPKIERRREIAHVHAEKGQSDKMNTDDLENSSVTSKQTPQLVVSEDPMMMSAVPSATSLNKAFSINKETQPGQAGLMQTERPGVSTPTESGVPSAEEVFGSSQPERISPESGLAKAMLTIAITATPSLTVDEKEELLTSTNFQPIVEEITETTKGFLKYMDNQSFATESQEGVGLGHSPSSYVNTKEMLTTNPKTEKFEADTDHRTTSFPGAESTAGSEPGSLTPDKEKPSQMTADNTQAAATKQPLETSEYTLSVEPETDSLLGAPEVTVSVSTAVPAASALSDEWDDTKLESVSRIRTPKLGDNEETQVRTEMSQTAQVSHEGMEGGQPWTEAAQVALGLPEGETHTGTALLIAHGNERSPAFTDQSSFTPTSLMEDMKVSIVNLLQSTGDFTESTKENDALFFLETTVSVSVYESEADQLLGNTMKDIITQEMTTAVQEPDATLSMVTQEQVATLELIRDSGKTEEEKEDPSPVSDVPGVTQLSRRWEPLATTISTTVVPLSFEVTPTVEEQMDTVTGPNEEFTPVLGSPVTPPGIMVGEPSISPALPALEASSERRTVVPSITRVNTAASYGLDQLESEETGFHHVAQARLKLLGLRSLPASASQSVGITSVNSCTQPRKYLNSCLKWKLNPKHFATGV

SEQ ID NO: 13649 - protein, 232 aa, Homo sapiens
MDTVTGPNEEFTPVLGSPVTPPGIMVGEPSISPALPALEASSERRTVVPSITRVNTAASYGLDQLESEEGQEDEDEEDEEDEDEEEEDEEEDEEDKDADSLDEGLDGDTELPGFTLPGITSQEPGLEEGNMDLLEGATYQVPDALEWEQQNQGLVRSWMEKLKDKAGYMSGMLVPVGVGIAGALFILGALYSIKVMNRRRRNGFKRHKRKQREFNSMQDRVMLLADSSEDEF

SEQ ID NO: 13650 - protein, 525 aa, Homo sapiens
MGWLFLKVLLAGVSFSGFLYPLVDFCISGKTRGQKPNFVIILADDMGWGDLGANWAETKDTANLDKMASEGMRFVDFHAAASTCSPSRASLLTGRLGLRNGVTRNFAVTSVGGLPLNETTLAEVLQQAGYVTGIIGKWHLGHHGSYHPNFRGFDYYFGIPYSHDMGCTDTPGYNHPPCPACPQGDGPSRNLQRDCYTDVALPLYENLNIVEQPVNLSSLAQKYAEKATQFIQRASTSGRPFLLYVALAHMHVPLPVTQLPAAPRGRSLYGAGLWEMDSLVGQIKDKVDHTVKENTFLWFTGDNGPWAQKCELAGSVGPFTGFWQTRQGGSPAKQTTWEGGHRVPALAYWPGRVPVNVTSTALLSVLDIFPTVVALAQASLPQGRRFDGVDVSEVLFGRSQPGHRVLFHPNSGAAGEFGALQTVRLERYKAFYITGGARACDGSTGPELQHKFPLIFNLEDDTAEAVPLERGGAEYQAVLPEVRKVLADVLQDIANDNISSADYTQDPSVTPCCNPYQIACRCQAA

SEQ ID NO: 13651 - protein, 177 aa, Homo sapiens
MSSNECFKCGRSGHWARECPTGGGRGRGMRSRGRGGFTSDRGFQFVSSSLPDICYRCGESGHLAKDCDLQEDACYNCGRGGHIAKDCKEPKREREQCCYNCGKPGHLARDCDHADEQKCYSCGEFGHIQKDCTKVKCYRCGETGHVAINCSKTSEVNCYRCGESGHLARECTIEATA

SEQ ID NO: 13652 - protein, 170 aa, Homo sapiens
MSSNECFKCGRSGHWARECPTGGGRGRGMRSRGRGFQFVSSSLPDICYRCGESGHLAKDCDLQEDACYNCGRGGHIAKDCKEPKREREQCCYNCGKPGHLARDCDHADEQKCYSCGEFGHIQKDCTKVKCYRCGETGHVAINCSKTSEVNCYRCGESGHLARECTIEATA

SEQ ID NO: 13653 - protein, 167 aa, Homo sapiens
MSSNECFKCGRSGHWARECPTGGGRGRGMRSRGRGGFTSDRDICYRCGESGHLAKDCDLQEDACYNCGRGGHIAKDCKEPKREREQCCYNCGKPGHLARDCDHADEQKCYSCGEFGHIQKDCTKVKCYRCGETGHVAINCSKTSEVNCYRCGESGHLARECTIEATA

SEQ ID NO: 13654 - protein, 178 aa, Homo sapiens
MSSNECFKCGRSGHWARECPTGGGRGRGMRSRGRGGFTSDRGFQFVSSSLPDICYRCGESGHLAKDCDLQEDEACYNCGRGGHIAKDCKEPKREREQCCYNCGKPGHLARDCDHADEQKCYSCGEFGHIQKDCTKVKCYRCGETGHVAINCSKTSEVNCYRCGESGHLARECTIEATA

SEQ ID NO: 13655 - protein, 172 aa, Homo sapiens
MSSNECFKCGRSGHWARECPTGGGRGRGMRSRGRGFQFVSSSLPDICYRCGESGHLAKDCDLQEDVEACYNCGRGGHIAKDCKEPKREREQCCYNCGKPGHLARDCDHADEQKCYSCGEFGHIQKDCTKVKCYRCGETGHVAINCSKTSEVNCYRCGESGHLARECTIEATA

SEQ ID NO: 13656 - protein, 179 aa, Homo sapiens
MSSNECFKCGRSGHWARECPTGGGRGRGMRSRGRGGFTSDRGFQFVSSSLPDICYRCGESGHLAKDCDLQEDVEACYNCGRGGHIAKDCKEPKREREQCCYNCGKPGHLARDCDHADEQKCYSCGEFGHIQKDCTKVKCYRCGETGHVAINCSKTSEVNCYRCGESGHLARECTIEATA

SEQ ID NO: 13657 - protein, 160 aa, Homo sapiens
MSSNECFKCGRSGHWARECPTGGGRGRGMRSRGRDICYRCGESGHLAKDCDLQEDACYNCGRGGHIAKDCKEPKREREQCCYNCGKPGHLARDCDHADEQKCYSCGEFGHIQKDCTKVKCYRCGETGHVAINCSKTSEVNCYRCGESGHLARECTIEATA

SEQ ID NO: 13658 - protein, 171 aa, Homo sapiens
MSSNECFKCGRSGHWARECPTGGGRGRGMRSRGRGFQFVSSSLPDICYRCGESGHLAKDCDLQEDEACYNCGRGGHIAKDCKEPKREREQCCYNCGKPGHLARDCDHADEQKCYSCGEFGHIQKDCTKVKCYRCGETGHVAINCSKTSEVNCYRCGESGHLARECTIEATA

SEQ ID NO: 13659 - protein, 569 aa, Homo sapiens
MHTLTGFSLVSLLSFGYLSWDWAKPSFVADGPGEAGEQPSAAPPQPPHIIFILTDDQGYHDVGYHGSDIETPTLDRLAAKGVKLENYYIQPICTPSRSQLLTGRYQIHTGLQHSIIRPQQPNCLPLDQVTLPQKLQEAGYSTHMVGKWHLGFYRKECLPTRRGFDTFLGSLTGNVDYYTYDNCDGPGVCGFDLHEGENVAWGLSGQYSTMLYAQRASHILASHSPQRPLFLYVAFQAVHTPLQSPREYLYRYRTMGNVARRKYAAMVTCMDEAVRNITWALKRYGFYNNSVIIFSSDNGGQTFSGGSNWPLRGRKGTYWEGGVRGLGFVHSPLLKRKQRTSRALMHITDWYPTLVGLAGGTTSAADGLDGYDVWPAISEGRASPRTEILHNIDPLYNHAQHGSLEGGFGIWNTAVQAAIRVGEWKLLTGDPGYGDWIPPQTLATFPGSWWNLERMASVRQAVWLFNISADPYEREDLAGQRPDVVRTLLARLAEYNRTAIPVRYPAENPRAHPDFNGGAWGPWASDEEEEEEEGRARSFSRGRRKKKCKICKLRSFFRKLNTRLMSQRI

SEQ ID NO: 13660 - protein, 426 aa, Homo sapiens
MVGKWHLGFYRKECLPTRRGFDTFLGSLTGNVDYYTYDNCDGPGVCGFDLHEGENVAWGLSGQYSTMLYAQRASHILASHSPQRPLFLYVAFQAVHTPLQSPREYLYRYRTMGNVARRKYAAMVTCMDEAVRNITWALKRYGFYNNSVIIFSSDNGGQTFSGGSNWPLRGRKGTYWEGGVRGLGFVHSPLLKRKQRTSRALMHITDWYPTLVGLAGGTTSAADGLDGYDVWPAISEGRASPRTEILHNIDPLYNHAQHGSLEGGFGIWNTAVQAAIRVGEWKLLTGDPGYGDWIPPQTLATFPGSWWNLERMASVRQAVWLFNISADPYEREDLAGQRPDVVRTLLARLAEYNRTAIPVRYPAENPRAHPDFNGGAWGPWASDEEEEEEEGRARSFSRGRRKKKCKICKLRSFFRKLNTRLMSQRI

SEQ ID NO: 13661 - protein, 536 aa, Homo sapiens
MLLLWVSVVAALALAVLAPGAGEQRRRAAKAPNVVLVVSDSFDGRLTFHPGSQVVKLPFINFMKTRGTSFLNAYTNSPICCPSRAAMWSGLFTHLTESWNNFKGLDPNYTTWMDVMERHGYRTQKFGKLDYTSGHHSISNRVEAWTRDVAFLLRQEGRPMVNLIRNRTKVRVMERDWQNTDKAVNWLRKEAINYTEPFVIYLGLNLPHPYPSPSSGENFGSSTFHTSLYWLEKVSHDAIKIPKWSPLSEMHPVDYYSSYTKNCTGRFTKKEIKNIRAFYYAMCAETDAMLGEIILALHQLDLLQKTIVIYSSDHGELAMEHRQFYKMSMYEASAHVPLLMMGPGIKAGLQVSNVVSLVDIYPTMLDIAGIPLPQNLSGYSLLPLSSETFKNEHKVKNLHPPWILSEFHGCNVNASTYMLRTNHWKYIAYSDGASILPQLFDLSSDPDELTNVAVKFPEITYSLDQKLHSIINYPKVSASVHQYNKEQFIKWKQSIGQNYSNVIANLRWHQDWQKEPRKYENAIDQWLKTHMNPRAV

SEQ ID NO: 13662 - protein, 174 aa, Homo sapiens
MINPELRDGRADGFIHRIVPKLIQNWKIGLMCFLSIIITTVCIIMIATWSKHAKPVACSGDWLGVRDKCFYFSDDTRNWTASKIFCSLQKAELAQIDTQEDMEFLKRYAGTDMHWIGLSRKQGDSWKWTNGTTFNGWFEIIGNGSFAFLSADGVHSSRGFIDIKWICSKPKYFL

SEQ ID NO: 13663 - protein, 160 aa, Homo sapiens
MINPELRDGRADGFIHRIVPKLIQNWKIGLMCFLSIIITTVCIIMIATWSKHAKPVACSGDWLGVRDKCFYFSDDTRNWTASKIFCSLQKAELAQIDTQEDMEFLKRYAGTDMHWIGLSRKQGDSWKWTNGTTFNGWPSNSKWSCNWSLRQWLLLLGPLR

SEQ ID NO: 13664 - protein, 558 aa, Homo sapiens
MVDSGTEARARGKAEAGLQDGISGPATARVNGKTQAEAVAEAELKTESVTQAKAGDGAMTRTHTVTYREAMAVTREVIKVEDTTKTRVMVETKTKPLAERSIVPQTKSKAMPMSRVSTVTKSEVKVVAVIEANIRSYAKSHDKANTGSRPDRREETSIGMKSSDEDEENICSWFWTGEEPSVGSWFWPEEETSLQVYKPLPKIQEKPKPTHKPTLTIKQKVIAWSRARYIVLVPVEGGEQSLPPEGNWTLVETLIETPLGIRPLTKIPPYHGPYYQTLAEIKKQIRQREKYGPNPKACHCKSRGFSLEPKEFDKLVALLKLTKDPFIHEIATMIMGISPAYPFTQDIIHDVGITVMIENLVNNPNVKEHPGALSMVDDSSESSEEPKSGESYIHQVCKGIISCPLNSPVQLAGLKLLGHLSIKFEDHYVITSYIPDFLTLLNKGSVKTKFYVLKVFSCLSKNHANTRELISAKVLSSLVAPFNKNESKANILNIIEIFENINFQFKTKAKLFTKEKFTKSELISIFQEAKQFGQKLQDLAEHSDPEVRDKVIRLILKL

SEQ ID NO: 13665 - protein, 197 aa, Homo sapiens
MAKNGLVICILVITLLLDQTTSHTSRLKARKHSKRRVRDKDGDLKTQIEKLWTEVNALKEIQALQTVCLRGTKVHKKCYLASEGLKHFHEANEDCISKGGILVIPRNSDEINALQDYGKRSLPGVNDFWLGINDMVTEGKFVDVNGIAISFLNWDRAQPNGGKRENCVLFSQSAQGKWSDEACRSSKRYICEFTIPQ

SEQ ID NO: 13666 - protein, 694 aa, Homo sapiens
MAKINTQYSHPSRTHLKVKTSDRDLNRAENGLSRAHSSSEETSSVLQPGIAMETRGLADSGQGSFTGQGIARLSRLIFLLRRWAARHVHHQDQGPDSFPDRFRGAELKEVSSQESNAQANVGSQEPADRGRSAWPLAKCNTNTSNNTEEEKKTKKKDAIVVDPSSNLYYRWLTAIALPVFYNWYLLICRACFDELQSEYLMLWLVLDYSADVLYVLDVLVRARTGFLEQGLMVSDTNRLWQHYKTTTQFKLDVLSLVPTDLAYLKVGTNYPEVRFNRLLKFSRLFEFFDRTETRTNYPNMFRIGNLVLYILIIIHWNACIYFAISKFIGFGTDSWVYPNISIPEHGRLSRKYIYSLYWSTLTLTTIGETPPPVKDEEYLFVVVDFLVGVLIFATIVGNVGSMISNMNASRAEFQAKIDSIKQYMQFRKVTKDLETRVIRWFDYLWANKKTVDEKEVLKSLPDKLKAEIAINVHLDTLKKVRIFQDCEAGLLVELVLKLRPTVFSPGDYICKKGDIGKEMYIINEGKLAVVADDGVTQFVVLSDGSYFGEISILNIKGSKSGNRRTANIRSIGYSDLFCLSKDDLMEALTEYPEAKKALEEKGRQILMKDNLIDEELARAGADPKDLEEKVEQLGSSLDTLQTRFARLLAEYNATQMKMKQRLSQLESQVKGGGDKPLADGEVPGDATKTEDKQQ

SEQ ID NO: 13667 - protein, 676 aa, Homo sapiens
MAKINTQYSHPSRTHLKVKTSDRDLNRAENGLSRAHSSSEETSSVLQPGIAMETRGLADSGQGSFTGQGIARLSRLIFLLRRWAARHVHHQDQGPDSFPDRFRGAELKEVSSQESNAQANVGSQEPADRGRRKKTKKKDAIVVDPSSNLYYRWLTAIALPVFYNWYLLICRACFDELQSEYLMLWLVLDYSADVLYVLDVLVRARTGFLEQGLMVSDTNRLWQHYKTTTQFKLDVLSLVPTDLAYLKVGTNYPEVRFNRLLKFSRLFEFFDRTETRTNYPNMFRIGNLVLYILIIIHWNACIYFAISKFIGFGTDSWVYPNISIPEHGRLSRKYIYSLYWSTLTLTTIGETPPPVKDEEYLFVVVDFLVGVLIFATIVGNVGSMISNMNASRAEFQAKIDSIKQYMQFRKVTKDLETRVIRWFDYLWANKKTVDEKEVLKSLPDKLKAEIAINVHLDTLKKVRIFQDCEAGLLVELVLKLRPTVFSPGDYICKKGDIGKEMYIINEGKLAVVADDGVTQFVVLSDGSYFGEISILNIKGSKSGNRRTANIRSIGYSDLFCLSKDDLMEALTEYPEAKKALEEKGRQILMKDNLIDEELARAGADPKDLEEKVEQLGSSLDTLQTRFARLLAEYNATQMKMKQRLSQLESQVKGGGDKPLADGEVPGDATKTEDKQQ

SEQ ID NO: 13668 - protein, 698 aa, Homo sapiens
METRGLADSGQGSFTGQGIARFGRIQKKSQPEKVVRAASRGRPLIGWTQWCAEDGGDESEMALAGSPGCSSGPQGRLSRLIFLLRRWAARHVHHQDQGPDSFPDRFRGAELKEVSSQESNAQANVGSQEPADRGRSAWPLAKCNTNTSNNTEEEKKTKKKDAIVVDPSSNLYYRWLTAIALPVFYNWYLLICRACFDELQSEYLMLWLVLDYSADVLYVLDVLVRARTGFLEQGLMVSDTNRLWQHYKTTTQFKLDVLSLVPTDLAYLKVGTNYPEVRFNRLLKFSRLFEFFDRTETRTNYPNMFRIGNLVLYILIIIHWNACIYFAISKFIGFGTDSWVYPNISIPEHGRLSRKYIYSLYWSTLTLTTIGETPPPVKDEEYLFVVVDFLVGVLIFATIVGNVGSMISNMNASRAEFQAKIDSIKQYMQFRKVTKDLETRVIRWFDYLWANKKTVDEKEVLKSLPDKLKAEIAINVHLDTLKKVRIFQDCEAGLLVELVLKLRPTVFSPGDYICKKGDIGKEMYIINEGKLAVVADDGVTQFVVLSDGSYFGEISILNIKGSKSGNRRTANIRSIGYSDLFCLSKDDLMEALTEYPEAKKALEEKGRQILMKDNLIDEELARAGADPKDLEEKVEQLGSSLDTLQTRFARLLAEYNATQMKMKQRLSQLESQVKGGGDKPLADGEVPGDATKTEDKQQ

SEQ ID NO: 13669 - protein, 121 aa, Homo sapiens
MNSPEARLCVAQCRDSYPGCQPLKDTRAWASSLKMDPAGLEGGPRDESRDEPPIRAQAASWDQPQGCLTYKGRRSASGTQKQLQLPDTLSSLLCWRGAIMVYIKVTVQTDDSNKLLSLLYR

SEQ ID NO: 13670 - protein, 237 aa, Homo sapiens
MTSEITYAEVRFKNEFKSSGINTASSAASKERTAPHKSNTGFPKLLCASLLIFFLLLAISFFIAFVIFFQKYSQLLEKKTTKELVHTTLECVKKNMPVEETAWSCCPKNWKSFSSNCYFISTESASWQDSEKDCARMEAHLLVINTQEEQDFIFQNLQEESAYFVGLSDPEGQRHWQWVDQTPYNESSTFWHPREPSDPNERCVVLNFRKSPKRWGWNDVNCLGPQRSVCEMMKIHL

SEQ ID NO: 13671 - protein, 204 aa, Homo sapiens
MTSEITYAEVRFKNEFKSSGINTASSAASKERTAPHKSNTGFPKLLCASLLIFFLLLAISFFIAFVKTAWSCCPKNWKSFSSNCYFISTESASWQDSEKDCARMEAHLLVINTQEEQDFIFQNLQEESAYFVGLSDPEGQRHWQWVDQTPYNESSTFWHPREPSDPNERCVVLNFRKSPKRWGWNDVNCLGPQRSVCEMMKIHL

SEQ ID NO: 13672 - protein, 198 aa, Homo sapiens
MTSEITYAEVRFKNEFKSSGINTASSAVFFQKYSQLLEKKTTKELVHTTLECVKKNMPVEETAWSCCPKNWKSFSSNCYFISTESASWQDSEKDCARMEAHLLVINTQEEQDFIFQNLQEESAYFVGLSDPEGQRHWQWVDQTPYNESSTFWHPREPSDPNERCVVLNFRKSPKRWGWNDVNCLGPQRSVCEMMKIHL

SEQ ID NO: 13673 - protein, 165 aa, Homo sapiens
MTSEITYAEVRFKNEFKSSGINTASSAETAWSCCPKNWKSFSSNCYFISTESASWQDSEKDCARMEAHLLVINTQEEQDFIFQNLQEESAYFVGLSDPEGQRHWQWVDQTPYNESSTFWHPREPSDPNERCVVLNFRKSPKRWGWNDVNCLGPQRSVCEMMKIHL

SEQ ID NO: 13674 - protein, 809 aa, Homo sapiens
MFKSLTKVNKVKPIGENNENEQSSRRNEEGSHPSNQSQQTTAQEENKGEEKSLKTKSTPVTSEEPHTNIQDKLSKKNSSGDLTTNPDPQNAAEPTGTVPEQKEMDPGKEGPNSPQNKPPAAPVINEYADAQLHNLVKRMRQRTALYKKKLVEGDLSSPEASPQTAKPTAVPPVKESDDKPTEHYYRLLWFKVKKMPLTEYLKRIKLPNSIDSYTDRLYLLWLLLVTLAYNWNCCFIPLRLVFPYQTADNIHYWLIADIICDIIYLYDMLFIQPRLQFVRGGDIIVDSNELRKHYRTSTKFQLDVASIIPFDICYLFFGFNPMFRANRMLKYTSFFEFNHHLESIMDKAYIYRVIRTTGYLLFILHINACVYYWASNYEGIGTTRWVYDGEGNEYLRCYYWAVRTLITIGGLPEPQTLFEIVFQLLNFFSGVFVFSSLIGQMRDVIGAATANQNYFRACMDDTIAYMNNYSIPKLVQKRVRTWYEYTWDSQRMLDESDLLKTLPTTVQLALAIDVNFSIISKVDLFKGCDTQMIYDMLLRLKSVLYLPGDFVCKKGEIGKEMYIIKHGEVQVLGGPDGTKVLVTLKAGSVFGEISLLAAGGGNRRTANVVAHGFANLLTLDKKTLQEILVHYPDSERILMKKARVLLKQKAKTAEATPPRKDLALLFPPKEETPKLFKTLLGGTGKASLARLLKLKREQAAQKKENSEGGEEEGKENEDKQKENEDKQKENEDKGKENEDKDKGREPEEKPLDRPECTASPIAVEEEPHSVRRTVLPRGTSRQSLIISMAPSAEGGEEVLTIEVKEKAKQ

SEQ ID NO: 13675 - protein, 804 aa, Homo sapiens
MFKSLTKVNKVKPIGENNENEQSSRRNEEGSHPSNQSQQTTAQEENKGEEKSLKTKSTPVTSEEPHTNIQDKLSKKNSSGDLTTNPDPQNAAEPTGTVPEQKEMDPGKEGPNSPQNKPPAAPVINEYADAQLHNLVKRMRQRTALYKKKLVEGDLSSPEASPQTAKPTAVPPVKESDDKPTEHYYRLLWFKVKKMPLTEYLKRIKLPNSIDSYTDRLYLLWLLLVTLAYNWNCCFIPLRLVFPYQTADNIHYWLIADIICDIIYLYDMLFIQPRLQFVRGGDIIVDSNELRKHYRTSTKFQLDVASIIPFDICYLFFGFNPMFRANRMLKYTSFFEFNHHLESIMDKAYIYRVIRTTGYLLFILHINACVYYWASNYEGIGTTRWVYDGEGNEYLRCYYWAVRTLITIGGLPEPQTLFEIVFQLLNFFSGVFVFSSLIGQMRDVIGAATANQNYFRACMDDTIAYMNNYSIPKLVQKRVRTWYEYTWDSQRMLDESDLLKTLPTTVQLALAIDVNFSIISKVDLFKGCDTQMIYDMLLRLKSVLYLPGDFVCKKGEIGKEMYIIKHGEVQVLGGPDGTKVLVTLKAGSVLLAAGGGNRRTANVVAHGFANLLTLDKKTLQEILVHYPDSERILMKKARVLLKQKAKTAEATPPRKDLALLFPPKEETPKLFKTLLGGTGKASLARLLKLKREQAAQKKENSEGGEEEGKENEDKQKENEDKQKENEDKGKENEDKDKGREPEEKPLDRPECTASPIAVEEEPHSVRRTVLPRGTSRQSLIISMAPSAEGGEEVLTIEVKEKAKQ

SEQ ID NO: 13676 - protein, 589 aa, Homo sapiens
MDGEAVRFCTDNQCVSLHPQEVDSVAMAPAAPKIPRLVQATPAFMAVTLVFSLVTLFVVVQQQTRPVPKPVQAVILGDNITGHLPFEPNNHHHFGREAEMRELIQTFKGHMENSSAWVVEIQMLKCRVDNVNSQLQVLGDHLGNTNADIQMVKGVLKDATTLSLQTQMLRSSLEGTNAEIQRLKEDLEKADALTFQTLNFLKSSLENTSIELHVLSRGLENANSEIQMLNASLETANTQAQLANSSLKNANAEIYVLRGHLDSVNDLRTQNQVLRNSLEGANAEIQGLKENLQNTNALNSQTQAFIKSSFDNTSAEIQFLRGHLERAGDEIHVLKRDLKMVTAQTQKANGRLDQTDTQIQVFKSEMENVNTLNAQIQVLNGHMKNASREIQTLKQGMKNASALTSQTQMLDSNLQKASAEIQRLRGDLENTKALTMEIQQEQSRLKTLHVVITSQEQLQRTQSQLLQMVLQGWKFNGGSLYYFSSVKKSWHEAEQFCVSQGAHLASVASKEEQAFLVEFTSKVYYWIGLTDRGTEGSWRWTDGTPFNAAQNKAPGSKGSCPLRKYIIVNSGMGACSFIDTPPCPWILSN

SEQ ID NO: 13677 - protein, 567 aa, Homo sapiens
MDGEAVRFCTDNQCVSLHPQEVDSVAMAPAAPKIPRLVQATPAFMAVTLVFSLVTLFVVVQQQTRPVPKPVQAVILGDNITGHLPFEPNNHHHFGREAEMRELIQTFKGHMENSSAWVVEIQMLKCRVDNVNSQLQVLGDHLGNTNADIQMVKGVLKDATTLSLQTQMLRSSLEGTNAEIQRLKEDLEKADALTFQTLNFLKSSLENTSIELHVLSRGLENANSEIQMLNASLETANTQAQLANSSLKNANAEIYVLRGHLDSVNDLRTQNQVLRNSLEGANAEIQGLKENLQNTNALNSQTQAFIKSSFDNTSAEIQFLRGHLERAGDEIHVLKRDLKMVTAQTQKANGRLDQTDTQIQVFKSEMENVNTLNAQIQVLNGHMKNASREIQTLKQGMKNASALTSQTQMLDSNLQKASAEIQRLRGDLENTKALTMEIQQEQSRLKTLHVVITSQEQLQRTQSQLLQMVLQGWKFNGGSLYYFSSVKKSWHEAEQFCVSQGAHLASVASKEEQAFLVEFTSKVYYWIGLTDRGTEGSWRWTDGTPFNAAQNKASHSTRKGCCLHLTV

SEQ ID NO: 13678 - protein, 299 aa, Homo sapiens
MWLPWALLLLWVPGCFALSKCRTVAGPVGGSLSVQCPYEKEHRTLNKYWCRPPQIFLCDKIVETKGSAGKRNGRVSIRDSPANLSFTVTLENLTEEDAGTYWCGVDTPWLRDFHDPVVEVEVSVFPASTSMTPASITAAKTSTITTAFPPVSSTTLFAVGATHSASIQEETEEVVNSQLPLLLSLLALLLLLLVGASLLAWRMFQKWIKAGDHSELSQNPKQAATQSELHYANLELLMWPLQEKPAPPREVEVEYSTVASPREELHYASVVFDSNTNRIAAQRPREEEPDSDYSVIRKT

SEQ ID NO: 13679 - protein, 186 aa, Homo sapiens
MWLPWALLLLWVPASTSMTPASITAAKTSTITTAFPPVSSTTLFAVGATHSASIQEETEEVVNSQLPLLLSLLALLLLLLVGASLLAWRMFQKWIKAGDHSELSQNPKQAATQSELHYANLELLMWPLQEKPAPPREVEVEYSTVASPREELHYASVVFDSNTNRIAAQRPREEEPDSDYSVIRKT

SEQ ID NO: 13680 - protein, 103 aa, Homo sapiens
MWLPWALLLLWVPAGDHSELSQNPKQAATQSELHYANLELLMWPLQEKPAPPREVEVEYSTVASPREELHYASVVFDSNTNRIAAQRPREEEPDSDYSVIRKT

SEQ ID NO: 13681 - protein, 150 aa, Homo sapiens
MWLPWALLLLWVPASTSMTPASITAAKTSTITTAFPPVSSTTLFAVGATHSASIQEETEEVVNSQLPLLLSLLALLLLLLVGASLLAWRMFQKWIKAGDHSELSQNPKQASPREELHYASVVFDSNTNRIAAQRPREEEPDSDYSVIRKT

SEQ ID NO: 13682 - protein, 293 aa, Homo sapiens
MDTTRYSKWGGSSEEVPGGPWGRWVHWSRRPLFLALAVLVTTVLWAVILSILLSKASTERAALLDGHDLLRTNASKQTAALGALKEEVGDCHSCCSGTQAQLQTTRAELGEAQAKLMEQESALRELRERVTQGLAEAGRGREDVRTELFRALEAVRLQNNSCEPCPTSWLSFEGSCYFFSVPKTTWAAAQDHCADASAHLVIVGGLDEQGFLTRNTRGRGYWLGLRAVRHLGKVQGYQWVDGVSLSFSHWNQGEPNDAWGRENCVMMLHTGLWNDAPCDSEKDGWICEKRHNC

SEQ ID NO: 13683 - protein, 1002 aa, Homo sapiens
MAAHEWDWFQREELIGQISDIRVQNLQVERENVQKRTFTRWINLHLEKCNPPLEVKDLFVDIQDGKILMALLEVLSGRNLLHEYKSSSHRIFRLNNIAKALKFLEDSNVKLVSIDAAEIADGNPSLVLGLIWNIILFFQIKELTGNLSRNSPSSSLSPGSGGTDSDSSFPPTPTAERSVAISVKDQRKAIKALLAWVQRKTRKYGVAVQDFAGSWRSGLAFLAVIKAIDPSLVDMKQALENSTRENLEKAFSIAQDALHIPRLLEPEDIMVDTPDEQSIMTYVAQFLERFPELEAEDIFDSDKEVPIESTFVRIKETPSEQESKVFVLTENGERTYTVNHETSHPPPSKVFVCDKPESMKEFRLDGVSSHALSDSSTEFMHQIIDQVLQGGPGKTSDISEPSPESSILSSRKENGRSNSLPIKKTVHFEADTYKDPFCSKNLSLCFEGSPRVAKESLRQDGHVLAVEVAEEKEQKQESSKIPESSSDKVAGDIFLVEGTNNNSQSSSCNGALESTARHDEESHSLSPPGENTVMADSFQIKVNLMTVEALEEGDYFEAIPLKASKFNSDLIDFASTSQAFNKVPSPHETKPDEDAEAFENHAEKLGKRSIKSAHKKKDSPEPQVKMDKHEPHQDSGEEAEGCPSAPEETPVDKKPEVHEKAKRKSTRPHYEEEGEDDDLQGVGEELSSSPPSSCVSLETLGSHSEEGLDFKPSPPLSKVSVIPHDLFYFPHYEVPLAAVLEAYVEDPEDLKNEEMDLEEPEGYMPDLDSREEEADGSQSSSSSSVPGESLPSASDQVLYLSRGGVGTTPASEPAPLAPHEDHQQRETKENDPMDSHQSQESPNLENIANPLEENVTKESISSKKKEKRKHVDHVESSLFVAPGSVQSSDDLEEDSSDYSIPSRTSHSDSSIYLRRHTHRSSESDHFSYVQLRNAADLDDRRNRILTRKANSSGEAMSLGSHSPQSDSLTQLVQQPDMMYFILFLWLLVYCLLLFPQLDVSRL

SEQ ID NO: 13684 - protein, 399 aa, Homo sapiens
MSDSKEPRVQQLGLLEEDPTTSGIRLFPRDFQFQQIHGHKSSTGCLGHGALVLQLLSFMLLAGVLVAILVQVSKVPSSLSQEQSEQDAIYQNLTQLKAAVGELSEKSKLQEIYQELTQLKAAVGELPEKSKLQEIYQELTRLKAAVGELPEKSKLQEIYQELTRLKAAVGELPEKSKLQEIYQELTRLKAAVGELPEKSKLQEIYQELTELKAAVGELPEKSKLQEIYQELTQLKAAVGELPDQSKQQQIYQELTDLKTAFERLCRHCPKDWTFFQGNCYFMSNSQRNWHDSVTACQEVRAQLVVIKTAEEQNFLQLQTSRSNRFSWMGLSDLNQEGTWQWVDGSPLSPSFQRYWNSGEPNNSGNEDCAEFSGSGWNDNRCDVDNYWICKKPAACFRDE

SEQ ID NO: 13685 - protein, 272 aa, Homo sapiens
MSDSKEPRVQQLGLLEEDPTTSGIRLFPRDFQFQQIHGHKSSTGCLGHGALVLQLLSFMLLAGVLVAILVQVSKVPSSLSQEQSEQDAIYQNLTQLKAAVGELSEKSKLQEIYQELTQLKAAVGELPEKSKLQEIYQELTRLKAAVGELPEKSKLQEIYQELTRLKAAVGELPEKSKLQEIYQELTRLKAAVGELPEKSKLQEIYQELTELKAAVGELPEKSKLQEIYQELTQLKAAVGELPDQSKQQQIYQELTDLKTAFGEFLHIKGPWA

SEQ ID NO: 13686 - protein, 324 aa, Homo sapiens
MSDSKEPRVQQLGLLEEDPTTSGIRLFPRDFQFQQIHGHKSSTGCLGHGALVLQLLSFMLLAGVLVAILVQVSKVPSSLSQEQSEQDAIYQNLTQLKAAVGELSEKSKLQEIYQELTQLKAAVGELPEKSKLQEIYQELTRLKAAVGELPEKSKLQEIYQELTRLKAAVGELPEKSKLQEIYQELTRLKAAVGELPEKSKLQEIYQELTELKAAVGELPEKSKLQEIYQELTQLKAAVGELPDQSKQQQIYQELTDLKTAFERLCRHCPKDWTFFQGNCYFMSNSQRNWHDSVTACQEVRAQLVVIKTAEEQLPAVLEQWRTQQ

SEQ ID NO: 13687 - protein, 232 aa, Homo sapiens
MSDSKEPRVQQLGLLEEDPTTSGIRLFPRDFQFQQIHGHKSSTGCLGHGALVLQLLSFMLLAGVLVAILVQVSKVPSSLSQEQSEQDAIYQNLTQLKAAVGELSEKSKLQEIYQELTQLKAAVGELPEKSKLQEIYQELTRLKAAVGELPEKSKLQEIYQELTRLKAAVERLCRHCPKDWTFFQGNCYFMSNSQRNWHDSVTACQEVRAQLVVIKTAEEQLPAVLEQWRTQQ

SEQ ID NO: 13688 - protein, 332 aa, Homo sapiens
MSDSKEPRVQQLGLLEEDPTTSGIRLFPRDFQFQQIHGHKSSTVPFLLGPVSKVPSSLSQEQSEQDAIYQNLTQLKAAVGELSEKSKLQEIYQELTQLKAAVGELPEKSKLQEIYQELTRLKAAVGELPEKSKLQEIYQELTRLKAAVGELPEKSKLQEIYQELTELKAAVGELPEKSKLQEIYQELTQLKAAVERLCRHCPKDWTFFQGNCYFMSNSQRNWHDSVTACQEVRAQLVVIKTAEEQNFLQLQTSRSNRFSWMGLSDLNQEGTWQWVDGSPLSPSFQRYWNSGEPNNSGNEDCAEFSGSGWNDNRCDVDNYWICKKPAACFRDE

SEQ ID NO: 13689 - protein, 251 aa, Homo sapiens
MSDSKEPRVQQLGLLEEDPTTSGIRLFPRDFQFQQIHGHKSSTVPFLLGPVSKVPSSLSQEQSEQDAIYQNLTQLKAAVGELSEKSKLQEIYQELTQLKAAVGELPEKSKLQEIYQELTRLKAAVGELPEKSKLQEIYQELTRLKAAVGELPEKSKLQEIYQELTRLKAAVGELPEKSKLQEIYQELTELKAAVGELPEKSKLQEIYQELTQLKAAVGELPDQSKQQQIYQELTDLKTAFGEFLHIKGPWA

SEQ ID NO: 13690 - protein, 263 aa, Homo sapiens
MSDSKEPRVQQLGLLEEDPTTSGIRLFPRDFQFQQIHGHKSSTVPFLLGPVSKVPSSLSQEQSEQDAIYQNLTQLKAAVGELSEKSKLQEIYQELTQLKAAVGELPEKSKLQEIYQELTRLKAAVERLCRHCPKDWTFFQGNCYFMSNSQRNWHDSVTACQEVRAQLVVIKTAEEQNFLQLQTSRSNRFSWMGLSDLNQEGTWQWVDGSPLSPSFQRYWNSGEPNNSGNEDCAEFSGSGWNDNRCDVDNYWICKKPAACFRDE

SEQ ID NO: 13691 - protein, 376 aa, Homo sapiens
MSDSKEPRVQQLGLLEEDPTTSGIRLFPRDFQFQQIHGHKSSTGCLGHGALVLQLLSFMLLAGVLVAILVQVSKVPSSLSQEQSEQDAIYQNLTQLKAAVGELSEKSKLQEIYQELTQLKAAVGELPEKSKLQEIYQELTRLKAAVGELPEKSKLQEIYQELTRLKAAVGELPEKSKLQEIYQELTELKAAVGELPEKSKLQEIYQELTQLKAAVGELPDQSKQQQIYQELTDLKTAFERLCRHCPKDWTFFQGNCYFMSNSQRNWHDSVTACQEVRAQLVVIKTAEEQNFLQLQTSRSNRFSWMGLSDLNQEGTWQWVDGSPLSPSFQRYWNSGEPNNSGNEDCAEFSGSGWNDNRCDVDNYWICKKPAACFRDE

SEQ ID NO: 13692 - protein, 296 aa, Homo sapiens
MSDSKEPRVQQLGLLGCLGHGALVLQLLSFMLLAGVLVAILVQVSKVPSSLSQEQSEQDAIYQNLTQLKAAVGELSEKSKLQEIYQELTQLKAAVGELPEKSKLQEIYQELTRLKAAVGELPEKSKLQEIYQELTRLKAAVGELPEKSKLQEIYQELTRLKAAVGELPEKSKLQEIYQELTELKAAVGELPEKSKLQEIYQELTQLKAAVGELPDQSKQQQIYQELTDLKTAFERLCRHCPKDWTFFQGNCYFMSNSQRNWHDSVTACQEVRAQLVVIKTAEEQLPAVLEQWRTQQ

SEQ ID NO: 13693 - protein, 216 aa, Homo sapiens
MSDSKEPRVQQLGLLVSKVPSSLSQEQSEQDAIYQNLTQLKAAVGELSEKSKLQEIYQELTQLKAAVGELPEKSKLQEIYQELTRLKAAVGELPEKSKLQEIYQELTRLKAAVGELPEKSKLQEIYQELTRLKAAVGELPEKSKLQEIYQELTELKAAVGELPEKSKLQEIYQELTQLKAAVGELPDQSKQQQIYQELTDLKTAFGEFLHIKGPWA

SEQ ID NO: 13694 - protein, 144 aa, Homo sapiens
MAFTFAAFCYMLALLLTAALIFFAIWHIIAFDELKTDYKNPIDQCNTLNPLVLPEYLIHAFFCVMFLCAAEWLTLGLNMPLLAYHIWRYMSRPVMSGPGLYDPTTIMNADILAYCQKEGWCKLAFYLLAFFYYLYGMIYVLVSS

SEQ ID NO: 13695 - protein, 209 aa, Homo sapiens
MMQEQQPQSTEKRGWLSLRLWSVAGISIALLSACFIVSCVVTYHFTYGETGKRLSELHSYHSSLTCFSEGTKVPAWGCCPASWKSFGSSCYFISSEEKVWSKSEQNCVEMGAHLVVFNTEAEQNFIVQQLNESFSYFLGLSDPQGNNNWQWIDKTPYEKNVRFWHLGEPNHSAEQCASIVFWKPTGWGWNDVICETRRNSICEMNKIYL

SEQ ID NO: 13696 - protein, 179 aa, Homo sapiens
MMQEQQPQSTVTYHFTYGETGKRLSELHSYHSSLTCFSEGTKVPAWGCCPASWKSFGSSCYFISSEEKVWSKSEQNCVEMGAHLVVFNTEAEQNFIVQQLNESFSYFLGLSDPQGNNNWQWIDKTPYEKNVRFWHLGEPNHSAEQCASIVFWKPTGWGWNDVICETRRNSICEMNKIYL

SEQ ID NO: 13697 - protein, 160 aa, Homo sapiens
MAFTFAAFCYMLSLVLCAALIFFAIWHIIAFDELRTDFKSPIDQCNPVHARERLRNIERICFLLRKLVLPEYSIHSLFCIMFLCAQEWLTLGLNVPLLFYHFWRYFHCPADSSELAYDPPVVMNADTLSYCQKEAWCKLAFYLLSFFYYLYCMIYTLVSS

SEQ ID NO: 13698 - protein, 247 aa, Homo sapiens
MEYHPDLENLDEDGYTQLHFDSQSNTRIAVVSEKGSCAASPPWRLIAVILGILCLVILVIAVVLGTMAIWRSNSGSNTLENGYFLSRNKENHSQPTQSSLEDSVTPTKAVKTTGVLSSPCPPNWIIYEKSCYLFSMSLNSWDGSKRQCWQLGSNLLKIDSSNELGFIVKQVSSQPDNSFWIGLSRPQTEVPWLWEDGSTFSSNLFQIRTTATQENPSPNCVWIHVSVIYDQLCSVPSYSICEKKFSM

SEQ ID NO: 13699 - protein, 201 aa, Homo sapiens
MEYHPDLENLDEDGYTQLHFDSQSNTRIAVVSEKGSCAASPPWRLIAVILGILCLVILVIAVVLGTMGVLSSPCPPNWIIYEKSCYLFSMSLNSWDGSKRQCWQLGSNLLKIDSSNELGFIVKQVSSQPDNSFWIGLSRPQTEVPWLWEDGSTFSSNLFQIRTTATQENPSPNCVWIHVSVIYDQLCSVPSYSICEKKFSM

SEQ ID NO: 13700 - protein, 189 aa, Homo sapiens
MEYHPDLENLDEDGYTQLHFDSQSNTRIAVVSEKGSCAASPPWRLIAVILGILCLVILVIAVVLGTMAIWRSNSGSNTLENGYFLSRNKENHSQPTQSSLEDSVTPTKAVKTTGVLSSPCPPNWIIYEKSCYLFSMSLNSWDGSKRQCWQLGSNLLKIDSSNELISDQNHSYPRKPISKLCMDSRVSHL

SEQ ID NO: 13701 - protein, 192 aa, Homo sapiens
MEYHPDLENLDEDGYTQLHFDSQSNTRIAVVSEKGSCAASPPWRLIAVILGILCLVILVIAVVLGTMAIWRSNSGSNTLENGYFLSRNKENHSQPTQSSLEDSVTPTKAVKTTGVLSSPCPPNWIIYEKSCYLFSMSLNSWDGSKRQCWQLGSNLLKIDSSNELSLTLLPKLECSEAATSQAQVILPPQLPE

SEQ ID NO: 13702 - protein, 168 aa, Homo sapiens
MEYHPDLENLDEDGYTQLHFDSQSNTRIAVVSEKGVLSSPCPPNWIIYEKSCYLFSMSLNSWDGSKRQCWQLGSNLLKIDSSNELGFIVKQVSSQPDNSFWIGLSRPQTEVPWLWEDGSTFSSNLFQIRTTATQENPSPNCVWIHVSVIYDQLCSVPSYSICEKKFSM

SEQ ID NO: 13703 - protein, 132 aa, Homo sapiens
MEYHPDLENLDEDGYTQLHFDSQSNTRIAVVSEKGSCAASPPWRLIAVILGILCLVILVIAVVLGTMGVLSSPCPPNWIIYEKSCYLFSMSLNSWDGSKRQCWQLGSNLLKIDSSNELVSVDFCYDYLWCVS

SEQ ID NO: 13704 - protein, 143 aa, Homo sapiens
MEYHPDLENLDEDGYTQLHFDSQSNTRIAVVSEKGSCAASPPWRLIAVILGILCLVILVIAVVLGTMGVLSSPCPPNWIIYEKSCYLFSMSLNSWDGSKRQCWQLGSNLLKIDSSNELISDQNHSYPRKPISKLCMDSRVSHL

SEQ ID NO: 13705 - protein, 45 aa, Homo sapiens
MEYHPDLENLDEDGYTQLHFDSQSNTRIAVVSEKGIYSKTSVFPT

SEQ ID NO: 13706 - protein, 77 aa, Homo sapiens
MEYHPDLENLDEDGYTQLHFDSQSNTRIAVVSEKGSCAASPPWRLIAVILGILCLVILVIAVVLGTMAGFKAVEFKG

SEQ ID NO: 13707 - protein, 116 aa, Homo sapiens
MEYHPDLENLDEDGYTQLHFDSQSNTRIAVVSEKGSCAASPPWRLIAVILGILCLVILVIAVVLGTMGTGQFLKDLSFLNNRRKLFGDPIQEATHWRMATFYQEIKRTTVNPHNHL

SEQ ID NO: 13708 - protein, 680 aa, Homo sapiens
MLPQIPFLLLVSLNLVHGVFYAERYQMPTGIKGPLPNTKTQFFIPYTIKSKGIAVRGEQGTPGPPGPAGPRGHPGPSGPPGKPGYGSPGLQGEPGLPGPPGPSAVGKPGVPGLPGKPGERGPYGPKGDVGPAGLPGPRGPPGPPGIPGPAGISVPGKPGQQGPTGAPGPRGFPGEKGAPGVPGMNGQKGEMGYGAPGRPGERGLPGPQGPTGPSGPPGVGKRGENGVPGQPGIKGDRGFPGEMGPIGPPGPQGPPGERGPEGIGKPGAAGAPGQPGIPGTKGLPGAPGIAGPPGPPGFGKPGLPGLKGERGPAGLPGGPGAKGEQGPAGLPGKPGLTGPPGNMGPQGPKGIPGSHGLPGPKGETGPAGPAGYPGAKGERGSPGSDGKPGYPGKPGLDGPKGNPGLPGPKGDPGVGGPPGLPGPVGPAGAKGMPGHNGEAGPRGAPGIPGTRGPIGPPGIPGFPGSKGDPGSPGPPGPAGIATKGLNGPTGPPGPPGPRGHSGEPGLPGPPGPPGPPGQAVMPEGFIKAGQRPSLSGTPLVSANQGVTGMPVSAFTVILSKAYPAIGTPIPFDKILYNRQQHYDPRTGIFTCQIPGIYYFSYHVHVKGTHVWVGLYKNGTPVMYTYDEYTKGYLDQASGSAIIDLTENDQVWLQLPNAESNGLYSSEYVHSSFSGFLVAPM

SEQ ID NO: 13709 - protein, 899 aa, Homo sapiens
MEPVTKWSPKQVVDWTRGLDDCLQQYVHKFEREKINGEQLLQISHQDLEELGVTRIGHQELVLEAVDLLCALNYGLETDNMKNLVLKLRASSHNLQNYISSRRKSPAYDGNTSRKAPNEFLTSVVELIGAAKALLAWLDRAPFTGITDFSVTKNKIIQLCLDLTTTVQKDCFVAEMEDKVLTVVKVLNGICDKTIRSTTDPVMSQCACLEEVHLPNIKPGEGLGMYIKSTYDGLHVITGTTENSPADRSQKIHAGDEVIQVNQQTVVGWQLKNLVKKLRENPTGVVLLLKKRPTGSFNFTPAPLKNLRWKPPLVQTSPPPATTQSPESTMDTSLKKEKSAILDLYIPPPPAVPYSPRDENGSFVYGGSSKCKQPLPGPKGSESPNSFLDQESRRRRFTIADSDQLPGYSVETNILPTKMREKTPSYGKPRPLSMPADGNWMGIVDPFARPRGHGRKAFVSTKMTSYMAIDGSALVPLRQKPRRKTQGFLTMSRRRISCKDLGHADCQGWLYKKKEKGSFLSNKWKKFWVILKGSSLYWYSNQMAEKADGFVNLPDFTVERASECKKKHAFKISHPQIKTFYFAAENVQEMNVWLNKLGSAVIHQESTTKDEECYSESEQEDPEIAAETPPPPHASQTQSLTAQQASSSSPSLSGTSYSFSSLENTVKTPSSFPSSLSKERQSLPDTVNSLSAAEDEGQPITFAVQVHSPVPSEAGIHKALENSFVTSESGFLNSLSSDDTSSLSSNHDHLTVPDKPAGSKIMDKEETKVSEDDEMEKLYKSLEQASLSPLGDRRPSTKKELRKSFVKRCKNPSINEKLHKIRTLNSTLKCKEHDLAMINQLLDDPKLTARKYREWKVMNTLLIQDIYQQQRASPAPDDTDDTPQELKKSPSSPSVENSI

SEQ ID NO: 13710 - protein, 900 aa, Homo sapiens
MEPVTKWSPKQVVDWTRGLDDCLQQYVHKFEREKINGEQLLQISHQDLEELGVTRIGHQELVLEAVDLLCALNYGLETDNMKNLVLKLRASSHNLQNYISSRRKSPAYDGNTSRKAPNEFLTSVVELIGAAKALLAWLDRAPFTGITDFSVTKNKIIQLCLDLTTTVQKDCFVAEMEDKVLTVVKVLNGICDKTIRSTTDPVMSQCACLEEVHLPNIKPGEGLGMYIKSTYDGLHVITGTTENSPADRSQKIHAGDEVIQVNQQTVVGWQLKNLVKKLRENPTGVVLLLKKRPTGSFNFTPAPLKNLRWKPPLVQTSPPPATTQSPESTMDTSLKKEKSAILDLYIPPPPAVPYSPRDENGSFVYGGSSKCKQPLPGPKGSESPNSFLDQESRRRRFTIADSDQLPGYSVETNILPTKMREKTPSYGKPRPLSMPADGNWMGIVDPFARPRGHGRKAFVSTKMTSYMAIDGSALQVPLRQKPRRKTQGFLTMSRRRISCKDLGHADCQGWLYKKKEKGSFLSNKWKKFWVILKGSSLYWYSNQMAEKADGFVNLPDFTVERASECKKKHAFKISHPQIKTFYFAAENVQEMNVWLNKLGSAVIHQESTTKDEECYSESEQEDPEIAAETPPPPHASQTQSLTAQQASSSSPSLSGTSYSFSSLENTVKTPSSFPSSLSKERQSLPDTVNSLSAAEDEGQPITFAVQVHSPVPSEAGIHKALENSFVTSESGFLNSLSSDDTSSLSSNHDHLTVPDKPAGSKIMDKEETKVSEDDEMEKLYKSLEQASLSPLGDRRPSTKKELRKSFVKRCKNPSINEKLHKIRTLNSTLKCKEHDLAMINQLLDDPKLTARKYREWKVMNTLLIQDIYQQQRASPAPDDTDDTPQELKKSPSSPSVENSI

SEQ ID NO: 13711 - protein, 830 aa, Homo sapiens
MEPVTKWSPKQVVDWTRGLDDCLQQYVHKFEREKINGEQLLQISHQDLEELGVTRIGHQELVLEAVDLLCALNYGLETDNMKNLVLKLRASSHNLQNYISSRRKSPAYDGNTSRKAPNEFLTSVVELIGAAKALLAWLDRAPFTGITDFSVTKNKIIQLCLDLTTTVQKDCFVAEMEDKVLTVVKVLNGICDKTIRSTTDPVMSQCACLEEVHLPNIKPGEGLGMYIKSTYDGLHVITGTTENSPADRSQKIHAGDEVIQVNQQTVVGWQLKNLVKKLRENPTGVVLLLKKRPTGSFNFTPAPLKNLRWKPPLVQTSPPPATTQSPESTMDTSLKKEKSAILDLYIPPPPAVPYSPRDENGSFVYGGSSKCKQPLPGPKGSESPNSFLDQESRRRRFTIADSDQLPGYSVETNILPTKMREKTPSYGKPRPLSMPADGNWMGIVDPFARPRGHGRKAFVSTKMTSYMAIDGSALAEKADGFVNLPDFTVERASECKKKHAFKISHPQIKTFYFAAENVQEMNVWLNKLGSAVIHQESTTKDEECYSESEQEDPEIAAETPPPPHASQTQSLTAQQASSSSPSLSGTSYSFSSLENTVKTPSSFPSSLSKERQSLPDTVNSLSAAEDEGQPITFAVQVHSPVPSEAGIHKALENSFVTSESGFLNSLSSDDTSSLSSNHDHLTVPDKPAGSKIMDKEETKVSEDDEMEKLYKSLEQASLSPLGDRRPSTKKELRKSFVKRCKNPSINEKLHKIRTLNSTLKCKEHDLAMINQLLDDPKLTARKYREWKVMNTLLIQDIYQQQRASPAPDDTDDTPQELKKSPSSPSVENSI

SEQ ID NO: 13712 - protein, 277 aa, Homo sapiens
MWPGILVGGARVASCRYPALGPRLAAHFPAQRPPQRTLQNGLALQRCLHATATRALPLIPIVVEQTGRGERAYDIYSRLLRERIVCVMGPIDDSVASLVIAQLLFLQSESNKKPIHMYINSPGGVVTAGLAIYDTMQYILNPICTWCVGQAASMGSLLLAAGTPGMRHSLPNSRIMIHQPSGGARGQATDIAIQAEEIMKLKKQLYNIYAKHTKQSLQVIESAMERDRYMSPMEAQEFGILDKVLVHPPQDGEDEPTLVQKEPVEAAPAAEPVPAST

SEQ ID NO: 13713 - protein, 309 aa, Homo sapiens
MSSTQFNKGPSYGLSAEVKNRLLSKYDPQKEAELRTWIEGLTGLSIGPDFQKGLKDGTILCTLMNKLQPGSVPKINRSMQNWHQLENLSNFIKAMVSYGMNPVDLFEANDLFESGNMTQVQVSLLALAGKAKTKGLQSGVDIGVKYSEKQERNFDDATMKAGQCVIGLQMGTNKCASQSGMTAYGTRRHLYDPKNHILPPMDHSTISLQMGTNKCASQVGMTAPGTRRHIYDTKLGTDKCDNSSMSLQMGYTQGANQSGQVFGLGRQIYDPKYCPQGTVADGAPSGTGDCPDPGEVPEYPPYYQEEAGY

SEQ ID NO: 13714 - protein, 270 aa, Homo sapiens
MSSTQFNKGPSYGLSAEVKNRLLSKYDPQKEAELRTWIEGLTGLSIGPDFQKGLKDGTILCTLMNKLQPGSVPKINRSMQNWHQLENLSNFIKAMVSYGMNPVDLFEANDLFESGNMTQVQVSLLALAGKMGTNKCASQSGMTAYGTRRHLYDPKNHILPPMDHSTISLQMGTNKCASQVGMTAPGTRRHIYDTKLGTDKCDNSSMSLQMGYTQGANQSGQVFGLGRQIYDPKYCPQGTVADGAPSGTGDCPDPGEVPEYPPYYQEEAGY

SEQ ID NO: 13715 - protein, 2376 aa, Homo sapiens
MNLDSLSLALSQISYLVDNLTKKNYRASQQEIQHIVNRHGPEADRHLLRCLFSHVDFSGDGKSSGKDFHQTQFLIQECALLITKPNFISTLSYAIDNPLHYQKSLKPAPHLFAQLSKVLKLSKVQEVIFGLALLNSSSSDLRGFAAQFIKQKLPDLLRSYIDADVSGNQEGGFQDIAIEVLHLLLSHLLFGQKGAFGVGQEQIDAFLKTLRRDFPQERCPVVLAPLLYPEKRDILMDRILPDSGGVAKTMMESSLADFMQEVGYGFCASIEECRNIIVQFGVREVTAAQVARVLGMMARTHSGLTDGIPLQSISAPGSGIWSDGKDKSDGAQAHTWNVEVLIDVLKELNPSLNFKEVTYELDHPGFQIRDSKGLHNVVYGIQRGLGMEVFPVDLIYRPWKHAEGQLSFIQHSLINPEIFCFADYPCHTVATDILKAPPEDDNREIATWKSLDLIESLLRLAEVGQYEQVKQLFSFPIKHCPDMLVLALLQINTSWHTLRHELISTLMPIFLGNHPNSAIILHYAWHGQGQSPSIRQLIMHAMAEWYMRGEQYDQAKLSRILDVAQDLKALSMLLNGTPFAFVIDLAALASRREYLKLDKWLTDKIREHGEPFIQACMTFLKRRCPSILGGLAPEKDQPKSAQLPPETLATMLACLQACAGSVSQELSETILTMVANCSNVMNKARQPPPGVMPKGRPPSASSLDAISPVQIDPLAGMTSLSIGGSAAPHTQSMQGFPPNLGSAFSTPQSPAKAFPPLSTPNQTTAFSGIGGLSSQLPVGGLGTGSLTGIGTGALGLPAVNNDPFVQRKLGTSGLNQPTFQQSKMKPSDLSQVWPEANQHFSKEIDDEANSYFQRIYNHPPHPTMSVDEVLEMLQRFKDSTIKREREVFNCMLRNLFEEYRFFPQYPDKELHITACLFGGIIEKGLVTYMALGLALRYVLEALRKPFGSKMYYFGIAALDRFKNRLKDYPQYCQHLASISHFMQFPHHLQEYIEYGQQSRDPPVKMQGSITTPGSIALAQAQAQAQVPAKAPLAGQVSTMVTTSTTTTVAKTVTVTRPTGVSFKKDVPPSINTTNIDTLLVATDQTERIVEPPENIQEKIAFIFNNLSQSNMTQKVEELKETVKEEFMPWVSQYLVMKRVSIEPNFHSLYSNFLDTLKNPEFNKMVLNETYRNIKVLLTSDKAAANFSDRSLLKNLGHWLGMITLAKNKPILHTDLDVKSLLLEAYVKGQQELLYVVPFVAKVLESSIRSVVFRPPNPWTMAIMNVLAELHQEHDLKLNLKFEIEVLCKNLALDINELKPGNLLKDKDRLKNLDEQLSAPKKDVKQPEELPPITTTTTSTTPATNTTCTATVPPQPQYSYHDINVYSLAGLAPHITLNPTIPLFQAHPQLKQCVRQAIERAVQELVHPVVDRSIKIAMTTCEQIVRKDFALDSEESRMRIAAHHMMRNLTAGMAMITCREPLLMSISTNLKNSFASALRTASPQQREMMDQAAAQLAQDNCELACCFIQKTAVEKAGPEMDKRLATEFELRKHARQEGRRYCDPVVLTYQAERMPEQIRLKVGGVDPKQLAVYEEFARNVPGFLPTNDLSQPTGFLAQPMKQAWATDDVAQIYDKCITELEQHLHAIPPTLAMNPQAQALRSLLEVVVLSRNSRDAIAALGLLQKAVEGLLDATSGADADLLLRYRECHLLVLKALQDGRAYGSPWCNKQITRCLIECRDEYKYNVEAVELLIRNHLVNMQQYDLHLAQSMENGLNYMAVAFAMQLVKILLVDERSVAHVTEADLFHTIETLMRINAHSRGNAPEGLPQLMEVVRSNYEAMIDRAHGGPNFMMHSGISQASEYDDPPGLREKAEYLLREWVNLYHSAAAGRDSTKAFSAFVGQMHQQGILKTDDLITRFFRLCTEMCVEISYRAQAEQQHNPAANPTMIRAKCYHNLDAFVRLIALLVKHSGEATNTVTKINLLNKVLGIVVGVLLQDHDVRQSEFQQLPYHRIFIMLLLELNAPEHVLETINFQTLTAFCNTFHILRPTKAPGFVYAWLELISHRIFIARMLAHTPQQKGWPMYAQLLIDLFKYLAPFLRNVELTKPMQILYKGTLRVLLVLLHDFPEFLCDYHYGFCDVIPPNCIQLRNLILSAFPRNMRLPDPFTPNLKVDMLSEINIAPRILTNFTGVMPPQFKKDLDSYLKTRSPVTFLSDLRSNLQVSNEPGNRYNLQLINALVLYVGTQAIAHIHNKGSTPSMSTITHSAHMDIFQNLAVDLDTEGRYLFLNAIANQLRYPNSHTHYFSCTMLYLFAEANTEAIQEQITRVLLERLIVNRPHPWGLLITFIELIKNPAFKFWNHEFVHCAPEIEKLFQSVAQCCMGQKQAQQVMEGTGAS

SEQ ID NO: 13716 - protein, 2371 aa, Homo sapiens
MNLDSLSLALSQISYLVDNLTKKNYRASQQEIQHIVNRHGPEADRHLLRCLFSHVDFSGDGKSSGKDFHQTQFLIQECALLITKPNFISTLSYAIDNPLHYQKSLKPAPHLFAQLSKVLKLSKVQEVIFGLALLNSSSSDLRGFAAQFIKQKLPDLLRSYIDADVSGNQEGGFQDIAIEVLHLLLSHLLFGQKGAFGVGQEQIDAFLKTLRRDFPQERCPVVLAPLLYPEKRDILMDRILPDSGGVAKTMMESSLADFMQEVGYGFCASIEECRNIIVQFGVREVTAAQVARVLGMMARTHSGLTDGIPLQSISAPGSGIWSDGKDKSDGAQAHTWNVEVLIDVLKELNPSLNFKEVTYELDHPGFQIRDSKGLHNVVYGIQRGLGMEVFPVDLIYRPWKHAEGQLSFIQHSLINPEIFCFADYPCHTVATDILKAPPEDDNREIATWKSLDLIESLLRLAEVGQYEQVKQLFSFPIKHCPDMLVLALLQINTSWHTLRHELISTLMPIFLGNHPNSAIILHYAWHGQGQSPSIRQLIMHAMAEWYMRGEQYDQAKLSRILDVAQDLKALSMLLNGTPFAFVIDLAALASRREYLKLDKWLTDKIREHGEPFIQACMTFLKRRCPSILGGLAPEKDQPKSAQLPPETLATMLACLQACAGSVSQELSETILTMVANCSNVMNKARQPPPGVMPKGRPPSASSLDAISPVQIDPLAGMTSLSIGGSAAPHTQSMQGFPPNLGSAFSTPQSPAKAFPPLSTPNQTTAFSGIGGLSSQLPVGGLGTGSLTGIGTGALGLPAVNNDPFVQRKLGTSGLNQPTFQQTDLSQVWPEANQHFSKEIDDEANSYFQRIYNHPPHPTMSVDEVLEMLQRFKDSTIKREREVFNCMLRNLFEEYRFFPQYPDKELHITACLFGGIIEKGLVTYMALGLALRYVLEALRKPFGSKMYYFGIAALDRFKNRLKDYPQYCQHLASISHFMQFPHHLQEYIEYGQQSRDPPVKMQGSITTPGSIALAQAQAQAQVPAKAPLAGQVSTMVTTSTTTTVAKTVTVTRPTGVSFKKDVPPSINTTNIDTLLVATDQTERIVEPPENIQEKIAFIFNNLSQSNMTQKVEELKETVKEEFMPWVSQYLVMKRVSIEPNFHSLYSNFLDTLKNPEFNKMVLNETYRNIKVLLTSDKAAANFSDRSLLKNLGHWLGMITLAKNKPILHTDLDVKSLLLEAYVKGQQELLYVVPFVAKVLESSIRSVVFRPPNPWTMAIMNVLAELHQEHDLKLNLKFEIEVLCKNLALDINELKPGNLLKDKDRLKNLDEQLSAPKKDVKQPEELPPITTTTTSTTPATNTTCTATVPPQPQYSYHDINVYSLAGLAPHITLNPTIPLFQAHPQLKQCVRQAIERAVQELVHPVVDRSIKIAMTTCEQIVRKDFALDSEESRMRIAAHHMMRNLTAGMAMITCREPLLMSISTNLKNSFASALRTASPQQREMMDQAAAQLAQDNCELACCFIQKTAVEKAGPEMDKRLATEFELRKHARQEGRRYCDPVVLTYQAERMPEQIRLKVGGVDPKQLAVYEEFARNVPGFLPTNDLSQPTGFLAQPMKQAWATDDVAQIYDKCITELEQHLHAIPPTLAMNPQAQALRSLLEVVVLSRNSRDAIAALGLLQKAVEGLLDATSGADADLLLRYRECHLLVLKALQDGRAYGSPWCNKQITRCLIECRDEYKYNVEAVELLIRNHLVNMQQYDLHLAQSMENGLNYMAVAFAMQLVKILLVDERSVAHVTEADLFHTIETLMRINAHSRGNAPEGLPQLMEVVRSNYEAMIDRAHGGPNFMMHSGISQASEYDDPPGLREKAEYLLREWVNLYHSAAAGRDSTKAFSAFVGQMHQQGILKTDDLITRFFRLCTEMCVEISYRAQAEQQHNPAANPTMIRAKCYHNLDAFVRLIALLVKHSGEATNTVTKINLLNKVLGIVVGVLLQDHDVRQSEFQQLPYHRIFIMLLLELNAPEHVLETINFQTLTAFCNTFHILRPTKAPGFVYAWLELISHRIFIARMLAHTPQQKGWPMYAQLLIDLFKYLAPFLRNVELTKPMQILYKGTLRVLLVLLHDFPEFLCDYHYGFCDVIPPNCIQLRNLILSAFPRNMRLPDPFTPNLKVDMLSEINIAPRILTNFTGVMPPQFKKDLDSYLKTRSPVTFLSDLRSNLQVSNEPGNRYNLQLINALVLYVGTQAIAHIHNKGSTPSMSTITHSAHMDIFQNLAVDLDTEGRYLFLNAIANQLRYPNSHTHYFSCTMLYLFAEANTEAIQEQITRVLLERLIVNRPHPWGLLITFIELIKNPAFKFWNHEFVHCAPEIEKLFQSVAQCCMGQKQAQQVMEGTGAS

SEQ ID NO: 13717 - protein, 2150 aa, Homo sapiens
MNLDSLSLALSQISYLVDNLTKKNYRASQQEIQHIVNRHGPEADRHLLRCLFSHVDFSGDGKSSGKDFHQTQFLIQECALLITKPNFISTLSYAIDNPLHYQKSLKPAPHLFAQLSKVLKLSKVQEVIFGLALLNSSSSDLRGFAAQFIKQKLPDLLRSYIDADVSGNQEGGFQDIAIEVLHLLLSHLLFGQKGAFGVGQEQIDAFLKTLRRDFPQERCPVVLAPLLYPEKRDILMDRILPDSGGVAKTMMESSLADFMQEVGYGFCASIEECRNIIVQFGVREVTAAQVARVLGMMARTHSGLTDGIPLQSISAPGSGIWSDGKDKSDGAQAHTWNVEVLIDVLKELNPSLNFKEVTYELDHPGFQIRDSKGLHNVVYGIQRGLGMEVFPVDLIYRPWKHAEGQLSFIQHSLINPEIFCFADYPCHTVATDILKAPPEDDNREIATWKSLDLIESLLRLAEVGQYEQVKQLFSFPIKHCPDMLVLALLQINTSWHTLRHELISTLMPIFLGNHPNSAIILHYAWHGQGQSPSIRQLIMHAMAEWYMRGEQYDQAKLSRILDVAQDLKALSMLLNGTPFAFVIDLAALASRREYLKLDKWLTDKIREHGEPFIQACMTFLKRRCPSILGGLAPEKDQPKSAQLPPETLATMLACLQACAGSVSQELSETILTMVANCSNVMNKARQPPPGVMPKGRPPSASSLDAISPVQIDPLAGMTSLSIGGSAAPHTQSMQGFPPNLGSAFSTPQSPAKAFPPLSTPNQTTAFSGIGGLSSQLPVGGLGTGSLTGIGTGALGLPAVNNDPFVQRKLGTSGLNQPTFQQTDLSQVWPEANQHFSKEIDDEANSYFQRIYNHPPHPTMSVDEVLEMLQRFKDSTIKREREVFNCMLRNLFEEYRFFPQYPDKELHITACLFGGIIEKGLVTYMALGLALRYVLEALRKPFGSKMYYFGIAALDRFKNRLKDYPQYCQHLASISHFMQFPHHLQEYIEYGQQSRDPPVKMQGSITTPGSIALAQAQAQAQVPAKAPLAGQVSTMVTTSTTTTVAKTVTVTRPTGVSFKKDVPPSINTTNIDTLLVATDQTERIVEPPENIQEKIAFIFNNLSQSNMTQKVEELKETVKEEFMPWVSQYLVMKRVSIEPNFHSLYSNFLDTLKNPEFNKMVLNETYRNIKVLLTSDKAAANFSDRSLLKNLGHWLGMITLAKNKPILHTDLDVKSLLLEAYVKGQQELLYVVPFVAKVLESSIRSVVFRPPNPWTMAIMNVLAELHQEHDLKLNLKFEIEVLCKNLALDINELKPGNLLKDKDRLKNLDEQLSAPKKDVKQPEELPPITTTTTSTTPATNTTCTATVPPQPQYSYHDINVYSLAGLAPHITLNPTIPLFQAHPQLKQCVRQAIERAVQELVHPVVDRSIKIAMTTCEQIVRKDFALDSEESRMRIAAHHMMRNLTAGMAMITCREPLLMSISTNLKNSFASALRTASPQQREMMDQAAAQLAQDNCELACCFIQKTAVEKAGPEMDKRLATEFELRKHARQEGRRYCDPVVLTYQAERMPEQIRLKVGGVDPKQLAVYEEFARNVPGFLPTNDLSQPTGFLAQPMKQAWATDDVAQIYDKCITELEQHLHAIPPTLAMNPQAQALRSLLEVVVLSRNSRDAIAALGLLQKAVEGLLDATSGADADLLLRYRECHLLVLKALQDGRAYGSPWCNKQITRCLIECRDEYKYNVEAVELLIRNHLVNMQQYDLHLAQSMENGLNYMAVAFAMQLVKILLVDERSVAHVTEADLFHTIETLMRINAHSRGNAPEGLPQLMEVVRSNYEAMIDRAHGGPNFMMHSGISQASEYDDPPGLREKAEYLLREWVNLYHSAAAGRDSTKAFSAFVGQMHQQGILKTDDLITRFFRLCTEMCVEISYRAQAEQQHNPAANPTMIRAKCYHNLDAFVRLIALLVKHSGEATNTVTKINLLNKVLGIVVGVLLQDHDVRQSEFQQLPYHRIFIMLLLELNAPEHVLETINFQTLTAFCNTFHILRPTKAPGFVYAWLELISHRIFIARMLAHTPQQKGWPMYAQLLIDLFKYLAPFLRNVELTKPMQILYKGTLRVLLVLLHDFPEFLCDYHYGFCDVIPPNCIQLRNLILSAFPRNMRLPDPFTPNLKSLTL

SEQ ID NO: 13718 - protein, 1551 aa, Homo sapiens
MNLDSLSLALSQISYLVDNLTKKNYRASQQEIQHIVNRHGPEADRHLLRCLFSHVDFSGDGKSSGKDFHQTQFLIQECALLITKPNFISTLSYAIDNPLHYQKSLKPAPHLFAQLSKVLKLSKVQEVIFGLALLNSSSSDLRGFAAQFIKQKLPDLLRSYIDADVSGNQEGGFQDIAIEVLHLLLSHLLFGQKGAFGVGQEQIDAFLKTLRRDFPQERCPVVLAPLLYPEKRDILMDRILPDSGGVAKTMMESSLADFMQEVGYGFCASIEECRNIIVQFGVREVTAAQVARVLGMMARTHSGLTDGIPLQSISAPGSGIWSDGKDKSDGAQAHTWNVEVLIDVLKELNPSLNFKEVTYELDHPGFQIRDSKGLHNVVYGIQRGLGMEVFPVDLIYRPWKHAEGQLSFIQHSLINPEIFCFADYPCHTVATDILKAPPEDDNREIATWKSLDLIESLLRLAEVGQYEQVKQLFSFPIKHCPDMLVLALLQINTSWHTLRHELISTLMPIFLGNHPNSAIILHYAWHGQGQSPSIRQLIMHAMAEWYMRGEQYDQAKLSRILDVAQDLKALSMLLNGTPFAFVIDLAALASRREYLKLDKWLTDKIREHGEPFIQACMTFLKRRCPSILGGLAPEKDQPKSAQLPPETLATMLACLQACAGSVSQELSETILTMVANCSNVMNKARQPPPGVMPKGRPPSASSLDAISPVQIDPLAGMTSLSIGGSAAPHTQSMQGFPPNLGSAFSTPQSPAKAFPPLSTPNQTTAFSGIGGLSSQLPVGGLGTGSLTGIGTGALGLPAVNNDPFVQRKLGTSGLNQPTFQQSKMKPSDLSQVWPEANQHFSKEIDDEANSYFQRIYNHPPHPTMSVDEVLEMLQRFKDSTIKREREVFNCMLRNLFEEYRFFPQYPDKELHITACLFGGIIEKGLVTYMALGLALRYVLEALRKPFGSKMYYFGIAALDRFKNRLKDYPQYCQHLASISHFMQFPHHLQEYIEYGQQSRDPPVKMQGSITTPGSIALAQAQAQAQVPAKAPLAGQVSTMVTTSTTTTVAKTVTVTRPTGVSFKKDVPPSINTTNIDTLLVATDQTERIVEPPENIQEKIAFIFNNLSQSNMTQKVEELKETVKEEFMPWVSQYLVMKRVSIEPNFHSLYSNFLDTLKNPEFNKMVLNETYRNIKVLLTSDKAAANFSDRSLLKNLGHWLGMITLAKNKPILHTDLDVKSLLLEAYVKGQQELLYVVPFVAKVLESSIRSVVFRPPNPWTMAIMNVLAELHQEHDLKLNLKFEIEVLCKNLALDINELKPGNLLKDKDRLKNLDEQLSAPKKDVKQPEELPPITTTTTSTTPATNTTCTATVPPQPQYSYHDINVYSLAGLAPHITLNPTIPLFQAHPQLKQCVRQAIERAVQELVHPVVDRSIKIAMTTCEQIVRKDFALDSEESRMRIAAHHMMRNLTAGMAMITCREPLLMSISTNLKNSFASALRVSWLFPWYRYKTYYCLSVIIFFFVYIWHWALPLILNNHHICLMSSIILDCNSVRQSIMSVCFFFFLLYSQHDV

SEQ ID NO: 13719 - protein, 2492 aa, Homo sapiens
MTAEPMSESKLNTLVQKLHDFLAHSSEESEETSSPPRLAMNQNTDKISGSGSNSDMMENSKEEGTSSSEKSKSSGSSRSKRKPSIVTKYVESDDEKPLDDETVNEDASNENSENDITMQSLPKGTVIVQPEPVLNEDKDDFKGPEFRSRSKMKTENLKKRGEDGLHGIVSCTACGQQVNHFQKDSIYRHPSLQVLICKNCFKYYMSDDISRDSDGMDEQCRWCAEGGNLICCDFCHNAFCKKCILRNLGRKELSTIMDENNQWYCYICHPEPLLDLVTACNSVFENLEQLLQQNKKKIKVDSEKSNKVYEHTSRFSPKKTSSNCNGEEKKLDDSCSGSVTYSYSALIVPKEMIKKAKKLIETTANMNSSYVKFLKQATDNSEISSATKLRQLKAFKSVLADIKKAHLALEEDLNSEFRAMDAVNKEKNTKEHKVIDAKFETKARKGEKPCALEKKDISKSEAKLSRKQVDSEHMHQNVPTEEQRTNKSTGGEHKKSDRKEEPQYEPANTSEDLDMDIVSVPSSVPEDIFENLETAMEVQSSVDHQGDGSSGTEQEVESSSVKLNISSKDNRGGIKSKTTAKVTKELYVKLTPVSLSNSPIKGADCQEVPQDKDGYKSCGLNPKLEKCGLGQENSDNEHLVENEVSLLLEESDLRRSPRVKTTPLRRPTETNPVTSNSDEECNETVKEKQKLSVPVRKKDKRNSSDSAIDNPKPNKLPKSKQSETVDQNSDSDEMLAILKEVSRMSHSSSSDTDINEIHTNHKTLYDLKTQAGKDDKGKRKRKSSTSGSDFDTKKGKSAKSSIISKKKRQTQSESSNYDSELEKEIKSMSKIGAARTTKKRIPNTKDFDSSEDEKHSKKGMDNQGHKNLKTSQEGSSDDAERKQERETFSSAEGTVDKDTTIMELRDRLPKKQQASASTDGVDKLSGKEQSFTSLEVRKVAETKEKSKHLKTKTCKKVQDGLSDIAEKFLKKDQSDETSEDDKKQSKKGTEEKKKPSDFKKKVIKMEQQYESSSDGTEKLPEREEICHFPKGIKQIKNGTTDGEKKSKKIRDKTSKKKDELSDYAEKSTGKGDSCDSSEDKKSKNGAYGREKKRCKLLGKSSRKRQDCSSSDTEKYSMKEDGCNSSDKRLKRIELRERRNLSSKRNTKEIQSGSSSSDAEESSEDNKKKKQRTSSKKKAVIVKEKKRNSLRTSTKRKQADITSSSSSDIEDDDQNSIGEGSSDEQKIKPVTENLVLSSHTGFCQSSGDEALSKSVPVTVDDDDDDNDPENRIAKKMLLEEIKANLSSDEDGSSDDEPEEGKKRTGKQNEENPGDEEAKNQVNSESDSDSEESKKPRYRHRLLRHKLTVSDGESGEEKKTKPKEHKEVKGRNRRKVSSEDSEDSDFQESGVSEEVSESEDEQRPRTRSAKKAELEENQRSYKQKKKRRRIKVQEDSSSENKSNSEEEEEEKEEEEEEEEEEEEEEEDENDDSKSPGKGRKKIRKILKDDKLRTETQNALKEEEERRKRIAEREREREKLREVIEIEDASPTKCPITTKLVLDEDEETKEPLVQVHRNMVIKLKPHQVDGVQFMWDCCCESVKKTKKSPGSGCILAHCMGLGKTLQVVSFLHTVLLCDKLDFSTALVVCPLNTALNWMNEFEKWQEGLKDDEKLEVSELATVKRPQERSYMLQRWQEDGGVMIIGYEMYRNLAQGRNVKSRKLKEIFNKALVDPGPDFVVCDEGHILKNEASAVSKAMNSIRSRRRIILTGTPLQNNLIEYHCMVNFIKENLLGSIKEFRNRFINPIQNGQCADSTMVDVRVMKKRAHILYEMLAGCVQRKDYTALTKFLPPKHEYVLAVRMTSIQCKLYQYYLDHLTGVGNNSEGGRGKAGAKLFQDFQMLSRIWTHPWCLQLDYISKENKGYFDEDSMDEFIASDSDETSMSLSSDDYTKKKKKGKKGKKDSSSSGSGSDNDVEVIKVWNSRSRGGGEGNVDETGNNPSVSLKLEESKATSSSNPSSPAPDWYKDFVTDADAEVLEHSGKMVLLFEILRMAEEIGDKVLVFSQSLISLDLIEDFLELASREKTEDKDKPLIYKGEGKWLRNIDYYRLDGSTTAQSRKKWAEEFNDETNVRGRLFIISTKAGSLGINLVAANRVIIFDASWNPSYDIQSIFRVYRFGQTKPVYVYRFLAQGTMEDKIYDRQVTKQSLSFRVVDQQQVERHFTMNELTELYTFEPDLLDDPNSEKKKKRDTPMLPKDTILAELLQIHKEHIVGYHEHDSLLDHKEEEELTEEERKAAWAEYEAEKKGLTMRFNIPTGTNLPPVSFNSQTPYIPFNLGALSAMSNQQLEDLINQGREKVVEATNSVTAVRIQPLEDIISAVWKENMNLSEAQVQALALSRQASQELDVKRREAIYNDVLTKQQMLISCVQRILMNRRLQQQYNQQQQQQMTYQQATLGHLMMPKPPNLIMNPSNYQQIDMRGMYQPVAGGMQPPPLQRAPPPMRSKNPGPSQGKSM

SEQ ID NO: 13720 - protein, 2288 aa, Homo sapiens
MSDDISRDSDGMDEQCRWCAEGGNLICCDFCHNAFCKKCILRNLGRKELSTIMDENNQWYCYICHPEPLLDLVTACNSVFENLEQLLQQNKKKIKVDSEKSNKVYEHTSRFSPKKTSSNCNGEEKKLDDSCSGSVTYSYSALIVPKEMIKKAKKLIETTANMNSSYVKFLKQATDNSEISSATKLRQLKAFKSVLADIKKAHLALEEDLNSEFRAMDAVNKEKNTKEHKVIDAKFETKARKGEKPCALEKKDISKSEAKLSRKQVDSEHMHQNVPTEEQRTNKSTGGEHKKSDRKEEPQYEPANTSEDLDMDIVSVPSSVPEDIFENLETAMEVQSSVDHQGDGSSGTEQEVESSSVKLNISSKDNRGGIKSKTTAKVTKELYVKLTPVSLSNSPIKGADCQEVPQDKDGYKSCGLNPKLEKCGLGQENSDNEHLVENEVSLLLEESDLRRSPRVKTTPLRRPTETNPVTSNSDEECNETVKEKQKLSVPVRKKDKRNSSDSAIDNPKPNKLPKSKQSETVDQNSDSDEMLAILKEVSRMSHSSSSDTDINEIHTNHKTLYDLKTQAGKDDKGKRKRKSSTSGSDFDTKKGKSAKSSIISKKKRQTQSESSNYDSELEKEIKSMSKIGAARTTKKRIPNTKDFDSSEDEKHSKKGMDNQGHKNLKTSQEGSSDDAERKQERETFSSAEGTVDKDTTIMELRDRLPKKQQASASTDGVDKLSGKEQSFTSLEVRKVAETKEKSKHLKTKTCKKVQDGLSDIAEKFLKKDQSDETSEDDKKQSKKGTEEKKKPSDFKKKVIKMEQQYESSSDGTEKLPEREEICHFPKGIKQIKNGTTDGEKKSKKIRDKTSKKKDELSDYAEKSTGKGDSCDSSEDKKSKNGAYGREKKRCKLLGKSSRKRQDCSSSDTEKYSMKEDGCNSSDKRLKRIELRERRNLSSKRNTKEIQSGSSSSDAEESSEDNKKKKQRTSSKKKAVIVKEKKRNSLRTSTKRKQADITSSSSSDIEDDDQNSIGEGSSDEQKIKPVTENLVLSSHTGFCQSSGDEALSKSVPVTVDDDDDDNDPENRIAKKMLLEEIKANLSSDEDGSSDDEPEEGKKRTGKQNEENPGDEEAKNQVNSESDSDSEESKKPRYRHRLLRHKLTVSDGESGEEKKTKPKEHKEVKGRNRRKVSSEDSEDSDFQESGVSEEVSESEDEQRPRTRSAKKAELEENQRSYKQKKKRRRIKVQEDSSSENKSNSEEEEEEKEEEEEEEEEEEEEEEDENDDSKSPGKGRKKIRKILKDDKLRTETQNALKEEEERRKRIAEREREREKLREVIEIEDASPTKCPITTKLVLDEDEETKEPLVQVHRNMVIKLKPHQVDGVQFMWDCCCESVKKTKKSPGSGCILAHCMGLGKTLQVVSFLHTVLLCDKLDFSTALVVCPLNTALNWMNEFEKWQEGLKDDEKLEVSELATVKRPQERSYMLQRWQEDGGVMIIGYEMYRNLAQGRNVKSRKLKEIFNKALVDPGPDFVVCDEGHILKNEASAVSKAMNSIRSRRRIILTGTPLQNNLIEYHCMVNFIKENLLGSIKEFRNRFINPIQNGQCADSTMVDVRVMKKRAHILYEMLAGCVQRKDYTALTKFLPPKHEYVLAVRMTSIQCKLYQYYLDHLTGVGNNSEGGRGKAGAKLFQDFQMLSRIWTHPWCLQLDYISKENKGYFDEDSMDEFIASDSDETSMSLSSDDYTKKKKKGKKGKKDSSSSGSGSDNDVEVIKVWNSRSRGGGEGNVDETGNNPSVSLKLEESKATSSSNPSSPAPDWYKDFVTDADAEVLEHSGKMVLLFEILRMAEEIGDKVLVFSQSLISLDLIEDFLELASREKTEDKDKPLIYKGEGKWLRNIDYYRLDGSTTAQSRKKWAEEFNDETNVRGRLFIISTKAGSLGINLVAANRVIIFDASWNPSYDIQSIFRVYRFGQTKPVYVYRFLAQGTMEDKIYDRQVTKQSLSFRVVDQQQVERHFTMNELTELYTFEPDLLDDPNSEKKKKRDTPMLPKDTILAELLQIHKEHIVGYHEHDSLLDHKEEEELTEEERKAAWAEYEAEKKGLTMRFNIPTGTNLPPVSFNSQTPYIPFNLGALSAMSNQQLEDLINQGREKVVEATNSVTAVRIQPLEDIISAVWKENMNLSEAQVQALALSRQASQELDVKRREAIYNDVLTKQQMLISCVQRILMNRRLQQQYNQQQQQQMTYQQATLGHLMMPKPPNLIMNPSNYQQIDMRGMYQPVAGGMQPPPLQRAPPPMRSKNPGPSQGKSM

SEQ ID NO: 13721 - protein, 2375 aa, Homo sapiens
MQSLPKGTVIVQPEPVLNEDKDDFKGPEFRSRSKMKTENLKKRGEDGLHGIVSCTACGQQVNHFQKDSIYRHPSLQVLICKNCFKYYMSDDISRDSDGMDEQCRWCAEGGNLICCDFCHNAFCKKCILRNLGRKELSTIMDENNQWYCYICHPEPLLDLVTACNSVFENLEQLLQQNKKKIKVDSEKSNKVYEHTSRFSPKKTSSNCNGEEKKLDDSCSGSVTYSYSALIVPKEMIKKAKKLIETTANMNSSYVKFLKQATDNSEISSATKLRQLKAFKSVLADIKKAHLALEEDLNSEFRAMDAVNKEKNTKEHKVIDAKFETKARKGEKPCALEKKDISKSEAKLSRKQVDSEHMHQNVPTEEQRTNKSTGGEHKKSDRKEEPQYEPANTSEDLDMDIVSVPSSVPEDIFENLETAMEVQSSVDHQGDGSSGTEQEVESSSVKLNISSKDNRGGIKSKTTAKVTKELYVKLTPVSLSNSPIKGADCQEVPQDKDGYKSCGLNPKLEKCGLGQENSDNEHLVENEVSLLLEESDLRRSPRVKTTPLRRPTETNPVTSNSDEECNETVKEKQKLSVPVRKKDKRNSSDSAIDNPKPNKLPKSKQSETVDQNSDSDEMLAILKEVSRMSHSSSSDTDINEIHTNHKTLYDLKTQAGKDDKGKRKRKSSTSGSDFDTKKGKSAKSSIISKKKRQTQSESSNYDSELEKEIKSMSKIGAARTTKKRIPNTKDFDSSEDEKHSKKGMDNQGHKNLKTSQEGSSDDAERKQERETFSSAEGTVDKDTTIMELRDRLPKKQQASASTDGVDKLSGKEQSFTSLEVRKVAETKEKSKHLKTKTCKKVQDGLSDIAEKFLKKDQSDETSEDDKKQSKKGTEEKKKPSDFKKKVIKMEQQYESSSDGTEKLPEREEICHFPKGIKQIKNGTTDGEKKSKKIRDKTSKKKDELSDYAEKSTGKGDSCDSSEDKKSKNGAYGREKKRCKLLGKSSRKRQDCSSSDTEKYSMKEDGCNSSDKRLKRIELRERRNLSSKRNTKEIQSGSSSSDAEESSEDNKKKKQRTSSKKKAVIVKEKKRNSLRTSTKRKQADITSSSSSDIEDDDQNSIGEGSSDEQKIKPVTENLVLSSHTGFCQSSGDEALSKSVPVTVDDDDDDNDPENRIAKKMLLEEIKANLSSDEDGSSDDEPEEGKKRTGKQNEENPGDEEAKNQVNSESDSDSEESKKPRYRHRLLRHKLTVSDGESGEEKKTKPKEHKEVKGRNRRKVSSEDSEDSDFQESGVSEEVSESEDEQRPRTRSAKKAELEENQRSYKQKKKRRRIKVQEDSSSENKSNSEEEEEEKEEEEEEEEEEEEEEEDENDDSKSPGKGRKKIRKILKDDKLRTETQNALKEEEERRKRIAEREREREKLREVIEIEDASPTKCPITTKLVLDEDEETKEPLVQVHRNMVIKLKPHQVDGVQFMWDCCCESVKKTKKSPGSGCILAHCMGLGKTLQVVSFLHTVLLCDKLDFSTALVVCPLNTALNWMNEFEKWQEGLKDDEKLEVSELATVKRPQERSYMLQRWQEDGGVMIIGYEMYRNLAQGRNVKSRKLKEIFNKALVDPGPDFVVCDEGHILKNEASAVSKAMNSIRSRRRIILTGTPLQNNLIEYHCMVNFIKENLLGSIKEFRNRFINPIQNGQCADSTMVDVRVMKKRAHILYEMLAGCVQRKDYTALTKFLPPKHEYVLAVRMTSIQCKLYQYYLDHLTGVGNNSEGGRGKAGAKLFQDFQMLSRIWTHPWCLQLDYISKENKGYFDEDSMDEFIASDSDETSMSLSSDDYTKKKKKGKKGKKDSSSSGSGSDNDVEVIKVWNSRSRGGGEGNVDETGNNPSVSLKLEESKATSSSNPSSPAPDWYKDFVTDADAEVLEHSGKMVLLFEILRMAEEIGDKVLVFSQSLISLDLIEDFLELASREKTEDKDKPLIYKGEGKWLRNIDYYRLDGSTTAQSRKKWAEEFNDETNVRGRLFIISTKAGSLGINLVAANRVIIFDASWNPSYDIQSIFRVYRFGQTKPVYVYRFLAQGTMEDKIYDRQVTKQSLSFRVVDQQQVERHFTMNELTELYTFEPDLLDDPNSEKKKKRDTPMLPKDTILAELLQIHKEHIVGYHEHDSLLDHKEEEELTEEERKAAWAEYEAEKKGLTMRFNIPTGTNLPPVSFNSQTPYIPFNLGALSAMSNQQLEDLINQGREKVVEATNSVTAVRIQPLEDIISAVWKENMNLSEAQVQALALSRQASQELDVKRREAIYNDVLTKQQMLISCVQRILMNRRLQQQYNQQQQQQMTYQQATLGHLMMPKPPNLIMNPSNYQQIDMRGMYQPVAGGMQPPPLQRAPPPMRSKNPGPSQGKSM

SEQ ID NO: 13722 - protein, 2454 aa, Homo sapiens
MTAEPMSESKLNTLVQKLHDFLAHSSEESEETSSPPRLAMNQNTDKISGSGSNSDMMENSKEEGTSSSEKSKSSGSSRSKRKPSIVTKYVESDDEKPLDDETVNEDASNENSENDITMQSLPKEDGLHGIVSCTACGQQVNHFQKDSIYRHPSLQVLICKNCFKYYMSDDISRDSDGMDEQCRWCAEGGNLICCDFCHNAFCKKCILRNLGRKELSTIMDENNQWYCYICHPEPLLDLVTACNSVFENLEQLLQQNKKKIKVDSEKSNKVYEHTSRFSPKKTSSNCNGEEKKLDDSCSGSVTYSYSALIVPKEMIKKAKKLIETTANMNSSYVKFLKQATDNSEISSATKLRQLKAFKSVLADIKKAHLALEEDLNSEFRAMDAVNKEKNTKEHKVIDAKFETKARKGEKPCALEKKDISKSEAKLSRKQVDSEHMHQNVPTEEQRTNKSTGGEHKKSDRKEEPQYEPANTSEDLDMDIVSVPSSVPEDIFENLETAMEVQSSVDHQGDGSSGTEQEVESSSVKLNISSKDNRGGIKSKTTAKVTKELYVKLTPVSLSNSPIKGADCQEVPQDKDGYKSCGLNPKLEKCGLGQENSDNEHLVENEVSLLLEESDLRRSPRVKTTPLRRPTETNPVTSNSDEECNETVKEKQKLSVPVRKKDKRNSSDSAIDNPKPNKLPKSKQSETVDQNSDSDEMLAILKEVSRMSHSSSSDTDINEIHTNHKTLYDLKTQAGKDDKGKRKRKSSTSGSDFDTKKGKSAKSSIISKKKRQTQSESSNYDSELEKEIKSMSKIGAARTTKKRIPNTKDFDSSEDEKHSKKGMDNQGHKNLKTSQEGSSDDAERKQERETFSSAEGTVDKDTTIMELRDRLPKKQQASASTDGVDKLSGKEQSFTSLEVRKVAETKEKSKHLKTKTCKKVQDGLSDIAEKFLKKDQSDETSEDDKKQSKKGTEEKKKPSDFKKKVIKMEQQYESSSDGTEKLPEREEICHFPKGIKQIKNGTTDGEKKSKKIRDKTSKKKDELSDYAEKSTGKGDSCDSSEDKKSKNGAYGREKKRCKLLGKSSRKRQDCSSSDTEKYSMKEDGCNSSDKRLKRIELRERRNLSSKRNTKEIQSGSSSSDAEESSEDNKKKKQRTSSKKKAVIVKEKKRNSLRTSTKRKQADITSSSSSDIEDDDQNSIGEGSSDEQKIKPVTENLVLSSHTGFCQSSGDEALSKSVPVTVDDDDDDNDPENRIAKKMLLEEIKANLSSDEDGSSDDEPEEGKKRTGKQNEENPGDEEAKNQVNSESDSDSEESKKPRYRHRLLRHKLTVSDGESGEEKKTKPKEHKEVKGRNRRKVSSEDSEDSDFQESGVSEEVSESEDEQRPRTRSAKKAELEENQRSYKQKKKRRRIKVQEDSSSENKSNSEEEEEEKEEEEEEEEEEEEEEEDENDDSKSPGKGRKKIRKILKDDKLRTETQNALKEEEERRKRIAEREREREKLREVIEIEDASPTKCPITTKLVLDEDEETKEPLVQVHRNMVIKLKPHQVDGVQFMWDCCCESVKKTKKSPGSGCILAHCMGLGKTLQVVSFLHTVLLCDKLDFSTALVVCPLNTALNWMNEFEKWQEGLKDDEKLEVSELATVKRPQERSYMLQRWQEDGGVMIIGYEMYRNLAQGRNVKSRKLKEIFNKALVDPGPDFVVCDEGHILKNEASAVSKAMNSIRSRRRIILTGTPLQNNLIEYHCMVNFIKENLLGSIKEFRNRFINPIQNGQCADSTMVDVRVMKKRAHILYEMLAGCVQRKDYTALTKFLPPKHEYVLAVRMTSIQCKLYQYYLDHLTGVGNNSEGGRGKAGAKLFQDFQMLSRIWTHPWCLQLDYISKENKGYFDEDSMDEFIASDSDETSMSLSSDDYTKKKKKGKKGKKDSSSSGSGSDNDVEVIKVWNSRSRGGGEGNVDETGNNPSVSLKLEESKATSSSNPSSPAPDWYKDFVTDADAEVLEHSGKMVLLFEILRMAEEIGDKVLVFSQSLISLDLIEDFLELASREKTEDKDKPLIYKGEGKWLRNIDYYRLDGSTTAQSRKKWAEEFNDETNVRGRLFIISTKAGSLGINLVAANRVIIFDASWNPSYDIQSIFRVYRFGQTKPVYVYRFLAQGTMEDKIYDRQVTKQSLSFRVVDQQQVERHFTMNELTELYTFEPDLLDDPNSEKKKKRDTPMLPKDTILAELLQIHKEHIVGYHEHDSLLDHKEEEELTEEERKAAWAEYEAEKKGLTMRFNIPTGTNLPPVSFNSQTPYIPFNLGALSAMSNQQLEDLINQGREKVVEATNSVTAVRIQPLEDIISAVWKENMNLSEAQVQALALSRQASQELDVKRREAIYNDVLTKQQMLISCVQRILMNRRLQQQYNQQQQQQMTYQQATLGHLMMPKPPNLIMNPSNYQQIDMRGMYQPVAGGMQPPPLQRAPPPMRSKNPGPSQGKSM

SEQ ID NO: 13723 - protein, 2337 aa, Homo sapiens
MQSLPKEDGLHGIVSCTACGQQVNHFQKDSIYRHPSLQVLICKNCFKYYMSDDISRDSDGMDEQCRWCAEGGNLICCDFCHNAFCKKCILRNLGRKELSTIMDENNQWYCYICHPEPLLDLVTACNSVFENLEQLLQQNKKKIKVDSEKSNKVYEHTSRFSPKKTSSNCNGEEKKLDDSCSGSVTYSYSALIVPKEMIKKAKKLIETTANMNSSYVKFLKQATDNSEISSATKLRQLKAFKSVLADIKKAHLALEEDLNSEFRAMDAVNKEKNTKEHKVIDAKFETKARKGEKPCALEKKDISKSEAKLSRKQVDSEHMHQNVPTEEQRTNKSTGGEHKKSDRKEEPQYEPANTSEDLDMDIVSVPSSVPEDIFENLETAMEVQSSVDHQGDGSSGTEQEVESSSVKLNISSKDNRGGIKSKTTAKVTKELYVKLTPVSLSNSPIKGADCQEVPQDKDGYKSCGLNPKLEKCGLGQENSDNEHLVENEVSLLLEESDLRRSPRVKTTPLRRPTETNPVTSNSDEECNETVKEKQKLSVPVRKKDKRNSSDSAIDNPKPNKLPKSKQSETVDQNSDSDEMLAILKEVSRMSHSSSSDTDINEIHTNHKTLYDLKTQAGKDDKGKRKRKSSTSGSDFDTKKGKSAKSSIISKKKRQTQSESSNYDSELEKEIKSMSKIGAARTTKKRIPNTKDFDSSEDEKHSKKGMDNQGHKNLKTSQEGSSDDAERKQERETFSSAEGTVDKDTTIMELRDRLPKKQQASASTDGVDKLSGKEQSFTSLEVRKVAETKEKSKHLKTKTCKKVQDGLSDIAEKFLKKDQSDETSEDDKKQSKKGTEEKKKPSDFKKKVIKMEQQYESSSDGTEKLPEREEICHFPKGIKQIKNGTTDGEKKSKKIRDKTSKKKDELSDYAEKSTGKGDSCDSSEDKKSKNGAYGREKKRCKLLGKSSRKRQDCSSSDTEKYSMKEDGCNSSDKRLKRIELRERRNLSSKRNTKEIQSGSSSSDAEESSEDNKKKKQRTSSKKKAVIVKEKKRNSLRTSTKRKQADITSSSSSDIEDDDQNSIGEGSSDEQKIKPVTENLVLSSHTGFCQSSGDEALSKSVPVTVDDDDDDNDPENRIAKKMLLEEIKANLSSDEDGSSDDEPEEGKKRTGKQNEENPGDEEAKNQVNSESDSDSEESKKPRYRHRLLRHKLTVSDGESGEEKKTKPKEHKEVKGRNRRKVSSEDSEDSDFQESGVSEEVSESEDEQRPRTRSAKKAELEENQRSYKQKKKRRRIKVQEDSSSENKSNSEEEEEEKEEEEEEEEEEEEEEEDENDDSKSPGKGRKKIRKILKDDKLRTETQNALKEEEERRKRIAEREREREKLREVIEIEDASPTKCPITTKLVLDEDEETKEPLVQVHRNMVIKLKPHQVDGVQFMWDCCCESVKKTKKSPGSGCILAHCMGLGKTLQVVSFLHTVLLCDKLDFSTALVVCPLNTALNWMNEFEKWQEGLKDDEKLEVSELATVKRPQERSYMLQRWQEDGGVMIIGYEMYRNLAQGRNVKSRKLKEIFNKALVDPGPDFVVCDEGHILKNEASAVSKAMNSIRSRRRIILTGTPLQNNLIEYHCMVNFIKENLLGSIKEFRNRFINPIQNGQCADSTMVDVRVMKKRAHILYEMLAGCVQRKDYTALTKFLPPKHEYVLAVRMTSIQCKLYQYYLDHLTGVGNNSEGGRGKAGAKLFQDFQMLSRIWTHPWCLQLDYISKENKGYFDEDSMDEFIASDSDETSMSLSSDDYTKKKKKGKKGKKDSSSSGSGSDNDVEVIKVWNSRSRGGGEGNVDETGNNPSVSLKLEESKATSSSNPSSPAPDWYKDFVTDADAEVLEHSGKMVLLFEILRMAEEIGDKVLVFSQSLISLDLIEDFLELASREKTEDKDKPLIYKGEGKWLRNIDYYRLDGSTTAQSRKKWAEEFNDETNVRGRLFIISTKAGSLGINLVAANRVIIFDASWNPSYDIQSIFRVYRFGQTKPVYVYRFLAQGTMEDKIYDRQVTKQSLSFRVVDQQQVERHFTMNELTELYTFEPDLLDDPNSEKKKKRDTPMLPKDTILAELLQIHKEHIVGYHEHDSLLDHKEEEELTEEERKAAWAEYEAEKKGLTMRFNIPTGTNLPPVSFNSQTPYIPFNLGALSAMSNQQLEDLINQGREKVVEATNSVTAVRIQPLEDIISAVWKENMNLSEAQVQALALSRQASQELDVKRREAIYNDVLTKQQMLISCVQRILMNRRLQQQYNQQQQQQMTYQQATLGHLMMPKPPNLIMNPSNYQQIDMRGMYQPVAGGMQPPPLQRAPPPMRSKNPGPSQGKSM

SEQ ID NO: 13724 - protein, 1350 aa, Homo sapiens
MTAEPMSESKLNTLVQKLHDFLAHSSEESEETSSPPRLAMNQNTDKISGSGSNSDMMENSKEEGTSSSEKSKSSGSSRSKRKPSIVTKYVESDDEKPLDDETVNEDASNENSENDITMQSLPKDGLHGIVSCTACGQQVNHFQKDSIYRHPSLQVLICKNCFKYYMSDDISRDSDGMDEQCRWCAEGGNLICCDFCHNAFCKKCILRNLGRKELSTIMDENNQWYCYICHPEPLLDLVTACNSVFENLEQLLQQNKKKIKVDSEKSNKVYEHTSRFSPKKTSSNCNGEEKKLDDSCSGSVTYSYSALIVPKEMIKKAKKLIETTANMNSSYVKFLKQATDNSEISSATKLRQLKAFKSVLADIKKAHLALEEDLNSEFRAMDAVNKEKNTKEHKVIDAKFETKARKGEKPCALEKKDISKSEAKLSRKQVDSEHMHQNVPTEEQRTNKSTGGEHKKSDRKEEPQYEPANTSEDLDMDIVSVPSSVPEDIFENLETAMEVQSSVDHQGDGSSGTEQEVESSSVKLNISSKDNRGGADCQEVPQDKDGYKSCGLNPKLEKCGLGQENSDNEHLVENEVSLLLEESDLRRSPRVKTTPLRRPTETNPVTSNSDEECNETVKEKQKLSVPVRKKDKRNSSDSAIDNPKPNKLPKSKQSETVDQNSDSDEMLAILKEVSRMSHSSSSDTDINEIHTNHKTLYDLKTQAGKDDKGKRKRKSSTSGSDFDTKKGKSAKSSIISKKKRQTQSESSNYDSELEKEIKSMSKIGAARTTKKRIPNTKDFDSSEDEKHSKKGMDNQGHKNLKTSQEGSSDDAERKQERETFSSAEGTVDKDTTIMELRDRLPKKQQASASTDGVDKLSGKEQSFTSLEVRKVAETKEKSKHLKTKTCKKVQDGLSDIAEKFLKKDQSDETSEDDKKQSKKGTEEKKKPSDFKKKVIKMEQQYESSSDGTEKLPEREEICHFPKGIKQIKNGTTDGEKKSKKIRDKTSKKKDELSDYAEKSTGKGDSCDSSEDKKSKNGAYGREKKRCKLLGKSSRKRQDCSSSDTEKYSMKEDGCNSSDKRLKRIELRERRNLSSKRNTKEIQSGSSSSDAEESSEDNKKKKQRTSSKKKAVIVKEKKRNSLRTSTKRKQADITSSSSSDIEDDDQNSIGEGSSDEQKIKPVTENLVLSSHTGFCQSSGDEALSKSVPVTVDDDDDDNDPENRIAKKMLLEEIKANLSSDEDGSSDDEPEEGKKRTGKQNEENPGDEEAKNQVNSESDSDSEESKKPRYRHRLLRHKLTVSDGESGEEKKTKPKEHKEVKGRNRRKVSSEDSEDSDFQESGVSEEVSESEDEQRPRTRSAKKAELEENQRS

SEQ ID NO: 13725 - protein, 261 aa, Homo sapiens
MSTTTCQVVAFLLSILGLAGCIAATGMDMWSTQDLYDNPVTSVFQYEGLWRSCVRQSSGFTECRPYFTILGLPAMLQAVRALMIVGIVLGAIGLLVSIFALKCIRIGSMEDSAKANMTLTSGIMFIVSGLCAIAGVSVFANMLVTNFWMSTANMYTGMGGMVQTVQTRYTFGAALFVGWVAGGLTLIGGVMMCIACRGLAPEETNYKAVSYHASGHSVAYKPGGFKASTGFGSNTKNKKIYDGGARTEDEVQSYPSKHDYV

SEQ ID NO: 13726 - protein, 261 aa, Homo sapiens
MAVTACQGLGFVVSLIGIAGIIAATCMDQWSTQDLYNNPVTAVFNYQGLWRSCVRESSGFTECRGYFTLLGLPAMLQAVRALMIVGIVLGAIGLLVSIFALKCIRIGSMEDSAKANMTLTSGIMFIVSGLCAIAGVSVFANMLVTNFWMSTANMYTGMGGMVQTVQTRYTFGAALFVGWVAGGLTLIGGVMMCIACRGLAPEETNYKAVSYHASGHSVAYKPGGFKASTGFGSNTKNKKIYDGGARTEDEVQSYPSKHDYV

SEQ ID NO: 13727 - protein, 399 aa, Homo sapiens
MERKNPSRESPRRLSAKVGKGTEMKKVARQLGMAAAESDKDSGFSDGSSECLSSAEQMESEDMLSALGWSREDRPRQNSKTAKNAFPTLSPMVVMKNVLVKQGSSSSQLQSWTVQPSFEVISAQPQLLFLHPPVPSPVSPCHTGEKKSDSRNYLPILNSYTKIAPHPGKRGLSLGPEEKGTSGVQKKICTERLGPSLSSSEPTKAGAVPSSPSTPAPPSAKLAEDSALQGVPSLVAGGSPQTLQPVSSSHVAKAPSLTFASPASPVCASDSTLHGLESNSPLSPLSANYSSPLWAAEHLCRSPDIFSEQRQSKHRRFQNTLVVLHKSGLLEITLKTKELIRQNQATQVELDQLKEQTQLFIEATKSRAPQAWAKLQASLTPGSSNTGSDLEAFSDHPAI

SEQ ID NO: 13728 - protein, 298 aa, Homo sapiens
MFSRAGVAGLSAWTLQPQWIQVRNMATLKDITRRLKSIKNIQKITKSMKMVAAAKYARAERELKPARIYGLGSLALYEKADIKGPEDKKKHLLIGVSSDRGLCGAIHSSIAKQMKSEVATLTAAGKEVMLVGIGDKIRGILYRTHSDQFLVAFKEVGRKPPTFGDASVIALELLNSGYEFDEGSIIFNKFRSVISYKTEEKPIFSLNTVASADSMSIYDDIDADVLQNYQEYNLANIIYYSLKESTTSEQSARMTAMDNASKNASEMIDKLTLTFNRTRQAVITKELIEIISGAAALD

SEQ ID NO: 13729 - protein, 297 aa, Homo sapiens
MFSRAGVAGLSAWTLQPQWIQVRNMATLKDITRRLKSIKNIQKITKSMKMVAAAKYARAERELKPARIYGLGSLALYEKADIKGPEDKKKHLLIGVSSDRGLCGAIHSSIAKQMKSEVATLTAAGKEVMLVGIGDKIRGILYRTHSDQFLVAFKEVGRKPPTFGDASVIALELLNSGYEFDEGSIIFNKFRSVISYKTEEKPIFSLNTVASADSMSIYDDIDADVLQNYQEYNLANIIYYSLKESTTSEQSARMTAMDNASKNASEMIDKLTLTFNRTRQAVITKELIEIISGAAAL

SEQ ID NO: 13730 - protein, 211 aa, Homo sapiens
MANAGLQLLGFILAFLGWIGAIVSTALPQWRIYSYAGDNIVTAQAMYEGLWMSCVSQSTGQIQCKVFDSLLNLSSTLQATRALMVVGILLGVIAIFVATVGMKCMKCLEDDEVQKMRMAVIGGAIFLLAGLAILVATAWYGNRIVQEFYDPMTPVNARYEFGQALFTGWAAASLCLLGGALLCCSCPRKTTSYPTPRPYPKPAPSSGKDYV

SEQ ID NO: 13731 - protein, 357 aa, Homo sapiens
MRRTGPEEEACGVWLDAAALKRRKVQTHLIKPGTKMLTLLPGERKANIYFTQRRAPSTGIHQRSIASFFTLQPGKTNGSDQKSVSSHTESQINKESKKNATQLDHLIPGLAHDCMASPLATSTTADIQEAGLSPQSLQTSGHHRMKTPFSTELSLLQPDTPDCAGDSHTPLAFSFTEDLESSCLLDRKEEKGDSARKWEWLHESKKNYQSMEKHTKLPGDKCCQPLGKTKLERKVSAKENRQAPVLLQTYRESWNGENIESVKQSRSPVSVFSWDNEKNDKDSWSQLFTEDSQGQRVIAHNTRAPFQDVTNNWNWDLGPFPNSPWAQCQEDGPTQNLKPDLLFTQDSEGNQVIRHQF

SEQ ID NO: 13732 - protein, 371 aa, Homo sapiens
MRRTGPEEEACGVWLDAAALKRRKVQTHLIKPGTKMLTLLPGERKANIYFTQRRAPSTGIHQRSIASFFTLQPGKTNGSDQKSVSSHTESQINKESKKNATQLDHLIPGLAHDCMASPLATSTTADIQEAGLSPQSLQTSGHHRMKTPFSTELSLLQPDTPDCAGDSHTPLAFSFTEDLESSCLLDRKEEKGDSARKWEWLHESKKNYQSMEKHTKLPGDKCCQPLGKTKLERKVSAKENRQAPVLLQTYRESWNGENIESVKQSRSPVSVFSWDNEKNDKDSWSQLFTEDSQGQRVIAHNTRAPFQDVTNNWNWDLGPFPNSPWAQCQEDGPTQNLKPDLLFTQDSEVQALACQQDCCRRSILKRQKHLR

SEQ ID NO: 13733 - protein, 2644 aa, Homo sapiens
MGEHGLELASMIPALRELGSATPEEYNTVVQKPRQILCQFIDRILTDVNVVAVELVKKTDSQPTSVMLLDFIQHIMKSSPLMFVNVSGSHEAKGSCIEFSNWIITRLLRIAATPSCHLLHKKICEVICSLLFLFKSKSPAIFGVLTKELLQLFEDLVYLHRRNVMGHAVEWPVVMSRFLSQLDEHMGYLQSAPLQLMSMQNLEFIEVTLLMVLTRIIAIVFFRRQELLLWQIGCVLLEYGSPKIKSLAISFLTELFQLGGLPAQPASTFFSSFLELLKHLVEMDTDQLKLYEEPLSKLIKTLFPFEAEAYRNIEPVYLNMLLEKLCVMFEDGVLMRLKSDLLKAALCHLLQYFLKFVPAGYESALQVRKVYVRNICKALLDVLGIEVDAEYLLGPLYAALKMESMEIIEEIQCQTQQENLSSNSDGISPKRRRLSSSLNPSKRAPKQTEEIKHVDMNQKSILWSALKQKAESLQISLEYSGLKNPVIEMLEGIAVVLQLTALCTVHCSHQNMNCRTFKDCQHKSKKKPSVVITWMSLDFYTKVLKSCRSLLESVQKLDLEATIDKVVKIYDALIYMQVNSSFEDHILEDLCGMLSLPWIYSHSDDGCLKLTTFAANLLTLSCRISDSYSPQAQSRCVFLLTLFPRRIFLEWRTAVYNWALQSSHEVIRASCVSGFFILLQQQNSCNRVPKILIDKVKDDSDIVKKEFASILGQLVCTLHGMFYLTSSLTEPFSEHGHVDLFCRNLKATSQHECSSSQLKASVCKPFLFLLKKKIPSPVKLAFIDNLHHLCKHLDFREDETDVKAVLGTLLNLMEDPDKDVRVAFSGNIKHILESLDSEDGFIKELFVLRMKEAYTHAQISRNNELKDTLILTTGDIGRAAKGDLVPFALLHLLHCLLSKSASVSGAAYTEIRALVAAKSVKLQSFFSQYKKPICQFLVESLHSSQMTALPNTPCQNADVRKQDVAHQREMALNTLSEIANVFDFPDLNRFLTRTLQVLLPDLAAKASPAASALIRTLGKQLNVNRREILINNFKYIFSHLVCSCSKDELERALHYLKNETEIELGSLLRQDFQGLHNELLLRIGEHYQQVFNGLSILASFASSDDPYQGPRDIISPELMADYLQPKLLGILAFFNMQLLSSSVGIEDKKMALNSLMSLMKLMGPKHVSSVRVKMMTTLRTGLRFKDDFPELCCRAWDCFVRCLDHACLGSLLSHVIVALLPLIHIQPKETAAIFHYLIIENRDAVQDFLHEIYFLPDHPELKKIKAVLQEYRKETSESTDLQTTLQLSMKAIQHENVDVRIHALTSLKETLYKNQEKLIKYATDSETVEPIISQLVTVLLKGCQDANSQARLLCGECLGELGAIDPGRLDFSTTETQGKDFTFVTGVEDSSFAYGLLMELTRAYLAYADNSRAQDSAAYAIQELLSIYDCREMETNGPGHQLWRRFPEHVREILEPHLNTRYKSSQKSTDWSGVKKPIYLSKLGSNFAEWSASWAGYLITKVRHDLASKIFTCCSIMMKHDFKVTIYLLPHILVYVLLGCNQEDQQEVYAEIMAVLKHDDQHTINTQDIASDLCQLSTQTVFSMLDHLTQWARHKFQALKAEKCPHSKSNRNKVDSMVSTVDYEDYQSVTRFLDLIPQDTLAVASFRSKAYTRAVMHFESFITEKKQNIQEHLGFLQKLYAAMHEPDGVAGVSAIRKAEPSLKEQILEHESLGLLRDATACYDRAIQLEPDQIIHYHGVVKSMLGLGQLSTVITQVNGVHANRSEWTDELNTYRVEAAWKLSQWDLVENYLAADGKSTTWSVRLGQLLLSAKKRDITAFYDSLKLVRAEQIVPLSAASFERGSYQRGYEYIVRLHMLCELEHSIKPLFQHSPGDSSQEDSLNWVARLEMTQNSYRAKEPILALRRALLSLNKRPDYNEMVGECWLQSARVARKAGHHQTAYNALLNAGESRLAELYVERAKWLWSKGDVHQALIVLQKGVELCFPENETPPEGKNMLIHGRAMLLVGRFMEETANFESNAIMKKYKDVTACLPEWEDGHFYLAKYYDKLMPMVTDNKMEKQGDLIRYIVLHFGRSLQYGNQFIYQSMPRMLTLWLDYGTKAYEWEKAGRSDRVQMRNDLGKINKVITEHTNYLAPYQFLTAFSQLISRICHSHDEVFVVLMEIIAKVFLAYPQQAMWMMTAVSKSSYPMRVNRCKEILNKAIHMKKSLEKFVGDATRLTDKLLELCNKPVDGSSSTLSMSTHFKMLKKLVEEATFSEILIPLQSVMIPTLPSILGTHANHASHEPFPGHWAYIAGFDDMVEILASLQKPKKISLKGSDGKFYIMMCKPKDDLRKDCRLMEFNSLINKCLRKDAESRRRELHIRTYAVIPLNDECGIIEWVNNTAGLRPILTKLYKEKGVYMTGKELRQCMLPKSAALSEKLKVFREFLLPRHPPIFHEWFLRTFPDPTSWYSSRSAYCRSTAVMSMVGYILGLGDRHGENILFDSLTGECVHVDFNCLFNKGETFEVPEIVPFRLTHNMVNGMGPMGTEGLFRRACEVTMRLMRDQREPLMSVLKTFLHDPLVEWSKPVKGHSKAPLNETGEVVNEKAKTHVLDIEQRLQGVIKTRNRVTGLPLSIEGHVHYLIQEATDENLLCQMYLGWTPYM

SEQ ID NO: 13734 - protein, 2580 aa, Homo sapiens
MGEHGLELASMIPALRELGSATPEEYNTVVQKPRQILCQFIDRILTDVNVVAVELVKKTDSQPTSVMLLDFIQHIMKSSPLMFVNVSGSHEAKGSCIEFSNWIITRLLRIAATPSCHLLHKKICEVICSLLFLFKSKSPAIFGVLTKELLQLFEDLVYLHRRNVMGHAVEWPVVMSRFLSQLDEHMGYLQSAPLQLMSMQNLEFIEVTLLMVLTRIIAIVFFRRQELLLWQIGCVLLEYGSPKIKSLAISFLTELFQLGGLPAQPASTFFSSFLELLKHLVEMDTDQLKLYEEPLSKLIKTLFPFEAEAYRNIEPVYLNMLLEKLCVMFEDGVLMRLKSDLLKAALCHLLQYFLKFVPAGYESALQVRKVYVRNICKALLDVLGIEVDAEYLLGPLYAALKMESMEIIEEIQCQTQQENLSSNSDGISPKRRRLSSSLNPSKRAPKQTEDRTFKDCQHKSKKKPSVVITWMSLDFYTKVLKSCRSLLESVQKLDLEATIDKVVKIYDALIYMQVNSSFEDHILEDLCGMLSLPWIYSHSDDGCLKLTTFAANLLTLSCRISDSYSPQAQSRCVFLLTLFPRRIFLEWRTAVYNWALQSSHEVIRASCVSGFFILLQQQNSCNRVPKILIDKVKDDSDIVKKEFASILGQLVCTLHGMFYLTSSLTEPFSEHGHVDLFCRNLKATSQHECSSSQLKASVCKPFLFLLKKKIPSPVKLAFIDNLHHLCKHLDFREDETDVKAVLGTLLNLMEDPDKDVRVAFSGNIKHILESLDSEDGFIKELFVLRMKEAYTHAQISRNNELKDTLILTTGDIGRAAKGDLVPFALLHLLHCLLSKSASVSGAAYTEIRALVAAKSVKLQSFFSQYKKPICQFLVESLHSSQMTALPNTPCQNADVRKQDVAHQREMALNTLSEIANVFDFPDLNRFLTRTLQVLLPDLAAKASPAASALIRTLGKQLNVNRREILINNFKYIFSHLVCSCSKDELERALHYLKNETEIELGSLLRQDFQGLHNELLLRIGEHYQQVFNGLSILASFASSDDPYQGPRDIISPELMADYLQPKLLGILAFFNMQLLSSSVGIEDKKMALNSLMSLMKLMGPKHVSSVRVKMMTTLRTGLRFKDDFPELCCRAWDCFVRCLDHACLGSLLSHVIVALLPLIHIQPKETAAIFHYLIIENRDAVQDFLHEIYFLPDHPELKKIKAVLQEYRKETSESTDLQTTLQLSMKAIQHENVDVRIHALTSLKETLYKNQEKLIKYATDSETVEPIISQLVTVLLKGCQDANSQARLLCGECLGELGAIDPGRLDFSTTETQGKDFTFVTGVEDSSFAYGLLMELTRAYLAYADNSRAQDSAAYAIQELLSIYDCREMETNGPGHQLWRRFPEHVREILEPHLNTRYKSSQKSTDWSGVKKPIYLSKLGSNFAEWSASWAGYLITKVRHDLASKIFTCCSIMMKHDFKVTIYLLPHILVYVLLGCNQEDQQEVYAEIMAVLKHDDQHTINTQDIASDLCQLSTQTVFSMLDHLTQWARHKFQALKAEKCPHSKSNRNKVDSMVSTVDYEDYQSVTRFLDLIPQDTLAVASFRSKAYTRAVMHFESFITEKKQNIQEHLGFLQKLYAAMHEPDGVAGVSAIRKAEPSLKEQILEHESLGLLRDATACYDRAIQLEPDQIIHYHGVVKSMLGLGQLSTVITQVNGVHANRSEWTDELNTYRVEAAWKLSQWDLVENYLAADGKSTTWSVRLGQLLLSAKKRDITAFYDSLKLVRAEQIVPLSAASFERGSYQRGYEYIVRLHMLCELEHSIKPLFQHSPGDSSQEDSLNWVARLEMTQNSYRAKEPILALRRALLSLNKRPDYNEMVGECWLQSARVARKAGHHQTAYNALLNAGESRLAELYVERAKWLWSKGDVHQALIVLQKGVELCFPENETPPEGKNMLIHGRAMLLVGRFMEETANFESNAIMKKYKDVTACLPEWEDGHFYLAKYYDKLMPMVTDNKMEKQGDLIRYIVLHFGRSLQYGNQFIYQSMPRMLTLWLDYGTKAYEWEKAGRSDRVQMRNDLGKINKVITEHTNYLAPYQFLTAFSQLISRICHSHDEVFVVLMEIIAKVFLAYPQQAMWMMTAVSKSSYPMRVNRCKEILNKAIHMKKSLEKFVGDATRLTDKLLELCNKPVDGSSSTLSMSTHFKMLKKLVEEATFSEILIPLQSVMIPTLPSILGTHANHASHEPFPGHWAYIAGFDDMVEILASLQKPKKISLKGSDGKFYIMMCKPKDDLRKDCRLMEFNSLINKCLRKDAESRRRELHIRTYAVIPLNDECGIIEWVNNTAGLRPILTKLYKEKGVYMTGKELRQCMLPKSAALSEKLKVFREFLLPRHPPIFHEWFLRTFPDPTSWYSSRSAYCRSTAVMSMVGYILGLGDRHGENILFDSLTGECVHVDFNCLFNKGETFEVPEIVPFRLTHNMVNGMGPMGTEGLFRRACEVTMRLMRDQREPLMSVLKTFLHDPLVEWSKPVKGHSKAPLNETGEVVNEKAKTHVLDIEQRLQGVIKTRNRVTGLPLSIEGHVHYLIQEATDENLLCQMYLGWTPYM

SEQ ID NO: 13735 - protein, 2610 aa, Homo sapiens
MGEHGLELASMIPALRELGSATPEEYNTVVQKPRQILCQFIDRILTDVNVVAVELVKKTDSQPTSVMLLDFIQHIMKSSPLMFVNVSGSHEAKGSCIEFSNWIITRLLRIAATPSCHLLHKKICEVICSLLFLFKSKSPAIFGVLTKELLQLFEDLVYLHRRNVMGHAVEWPVVMSRFLSQLDEHMGYLQSAPLQLMSMQNLEFIEVTLLMVLTRIIAIVFFRRQELLLWQIGCVLLEYGSPKIKSLAISFLTELFQLGGLPAQPASTFFSSFLELLKHLVEMDTDQLKLYEEPLSKLIKTLFPFEAEAYRNIEPVYLNMLLEKLCVMFEDGVLMRLKSDLLKAALCHLLQYFLKFVPAGYESALQVRKVYVRNICKALLDVLGIEVDAEYLLGPLYAALKMESMEIIEEIQCQTQQENLSSNSDGISPKRRRLSSSLNPSKRAPKQTEEIKHVDMNQKSILWSALKQKAESLQISLEYSGLKNPVIEMLEGIAVVLQLTALCTVHCSHQNMNCRTFKDCQHKSKKKPSVVITWMSLDFYTKVLKSCRSLLESVQKLDLEATIDKVVKIYDALIYMQVNSSFEDHILEDLCGMLSLPWIYSHSDDGCLKLTTFAANLLTLSCRISDSYSPQAQSRCVFLLTLFPRRIFLEWRTAVYNWALQSSHEVIRASCVSGFFILLQQQNSCNRVPKILIDKVKDDSDIVKKEFASILGQLVCTLHGMFYLTSSLTEPFSEHGHVDLFCRNLKATSQHECSSSQLKASVCKPFLFLLKKKIPSPVKLAFIDNLHHLCKHLDFREDETDVKAVLGTLLNLMEDPDKDVRVAFSGNIKHILESLDSEDGFIKELFVLRMKEAYTHAQISRNNELKDTLILTTGDIGRAAKGDLVPFALLHLLHCLLSKSASVSGAAYTEIRALVAAKSVKLQSFFSQYKKPICQFLVESLHSSQMTALPNTPCQNADVRKQDVAHQREMALNTLSEIANVFDFPDLNRFLTRTLQVLLPDLAAKASPAASALIRTLGKQLNVNRREILINNFKYIFSHLVCSCSKDELERALHYLKNETEIELGSLLRQDFQGLHNELLLRIGEHYQQVFNGLSILASFASSDDPYQGPRDIISPELMADYLQPKLLGILAFFNMQLLSSSVGIEDKKMALNSLMSLMKLMGPKHVSSVRVKMMTTLRTGLRFKDDFPELCCRAWDCFVRCLDHACLGSLLSHVIVALLPLIHIQPKETAAIFHYLIIENRDAVQDFLHEIYFLPDHPELKKIKAVLQEYRKETSESTDLQTTLQLSMKAIQHENVDVRIHALTSLKETLYKNQEKLIKYATDSETVEPIISQLVTVLLKGCQDANSQARLLCGECLGELGAIDPGRLDFSTTETQGKDFTFVTGVEDSSFAYGLLMELTRAYLAYADNSRAQDSAAYAIQELLSIYDCREMETNGPGHQLWRRFPEHVREILEPHLNTRYKSSQKSTDWSGVKKPIYLSKLGSNFAEWSASWAGYLITKVRHDLASKIFTCCSIMMKHDFKVTIYLLPHILVYVLLGCNQEDQQEVYAEIMAVLKHDDQHTINTQDIASDLCQLSTQTVFSMLDHLTQWARHKFQALKAEKCPHSKSNRNKVDSMVSTVDYEDYQSVTRFLDLIPQDTLAVASFRSKAYTRAVMHFESFITEKKQNIQEHLGFLQKLYAAMHEPDGVAGVSAIRKAEPSLKEQILEHESLGLLRDATACYDRAIQLEPDQIIHYHGVVKSMLGLGQLSTVITQVNGVHANRSEWTDELNTYRVEAAWKLSQWDLVENYLAADGKSTTWSVRLGQLLLSAKKRDITAFYDSLKLVRAEQIVPLSAASFERGSYQRGYEYIVRLHMLCELEHSIKPLFQHSPGDSSQEDSLNWVARLEMTQNSYRAKEPILALRRALLSLNKRPDYNEMVGECWLQSARVARKAGHHQTAYNALLNAGESRLAELYVERAKWLWSKGDVHQALIVLQKGVELCFPENETPPEGKNMLIHGRAMLLVGRFMEETANFESNAIMKKYKDVTACLPEWEDGHFYLAKYYDKLMPMVTDNKMEKQGDLIRYIVLHFGRSLQYGNQFIYQSMPRMLTLWLDYGTKAYEWEKAGRSDRVQMRNDLGKINKVITEHTNYLAPYQFLTAFSQLISRICHSHDEVFVVLMEIIAKVFLAYPQQAMWMMTAVSKSSYPMRVNRCKEILNKAIHMKKSLEKFVGDATRLTDKLLELCNKPVDGSSSTLSMSTHFKMLKKLVEEATFSEILIPLQSVMIPTLPSILGTHANHASHEPFPGHWAYIAGFDDMVEILASLQKPKKISLKGSDGKFYIMMCKPKDDLRKDCRLMEFNSLINKCLRKDAESRRRELHIRTYAVIPLNDECGIIEWVNNTAGLRPILTKLYKEKGVYMTGKELRQCMLPKSAALSEKLKVFREFLLPRHPPIFHEWFLRTFPDPTSWYSSRSAYCRSTAVMSMVGYILGLGDRHGENILFDSLTGECVHVDFNCLFNKGETFEVPEIVPFRLTHNMVNGMGPMGTEGLFRRACEVTMRLMRDQREPLMSVLKTFLHDPLVEWSKPVKGHSKAPLNETGEVVNEKVSRRYSLIWAVVLISTNELDMQL

SEQ ID NO: 13736 - protein, 898 aa, Homo sapiens
MAAAAAEEGMEPRALQYEQTLMYGRYTQDLGAFAKEEAARIRLGGPEPWKGPPSSRAAPELLEYGRSRCARCRVCSVRCHKFLVSRVGEDWIFLVLLGLLMALVSWVMDYAIAACLQAQQWMSRGLNTSILLQYLAWVTYPVVLITFSAGFTQILAPQAVGSGIPEMKTILRGVVLKEYLTLKTFIAKVIGLTCALGSGMPLGKEGPFVHIASMCAALLSKFLSLFGGIYENESRNTEMLAAACAVGVGCCFAAPIGGVLFSIEVTSTFFAVRNYWRGFFAATFSAFIFRVLAVWNRDEETITALFKTRFRLDFPFDLQELPAFAVIGIASGFGGALFVYLNRKIVQVMRKQKTINRFLMRKRLLFPALVTLLISTLTFPPGFGQFMAGQLSQKETLVTLFDNRTWVRQGLVEELEPPSTSQAWNPPRANVFLTLVIFILMKFWMSALATTIPVPCGAFMPVFVIGAAFGRLVGESMAAWFPDGIHTDSSTYRIVPGGYAVVGAAALAGAVTHTVSTAVIVFELTGQIAHILPVMIAVILANAVAQSLQPSLYDSIIRIKKLPYLPELGWGRHQQYRVRVEDIMVRDVPHVALSCTFRDLRLALHRTKGRMLALVESPESMILLGSIERSQVVALLGAQLSPARRRQHMQERRATQTSPLSDQEGPPTPEASVCFQVNTEDSAFPAARGETHKPLKPALKRGPSVTRNLGESPTGSAESAGIALRSLFCGSPPPEAASEKLESCEKRKLKRVRISLASDADLEGEMSPEEILEWEEQQLDEPVNFSDCKIDPAPFQLVERTSLHKTHTIFSLLGVDHAYVTSIGRLIGIVTLKELRKAIEGSVTAQGVKVRPPLASFRDSATSSSDTETTEVHALWGPHSRHGLPREGSPSDSDDKCQ

SEQ ID NO: 13737 - protein, 126 aa, Homo sapiens
MRKRLLFPALVTLLISTLTFPPGFGQFMAGQLSQKETLVTLFDNRTWVRQGLVEELEPPSTSQAWNPPRANVFLTLVIFILMKHLGVWWVKAWLPGSQMEFIRTAAPTGLCLGATLWSGQLRWQER

SEQ ID NO: 13738 - protein, 881 aa, Homo sapiens
MAAAAAEEGMEPRALQYEQTLMYGRYTQDLGAFAKEEAARIRLGGPEPWKGPPSSRAAPELLEYGRSRCARCRVCSVRCHKFLVSRVGEDWIFLVLLGLLMALVSWVMDYAIAACLQAQQWMSRGLNTSILLQYLAWVTYPVVLITFSAGFTQILAPQAVGSGIPEMKTILRGVVLKEYLTLKTFIAKVIGLTCALGSGMPLGKEGPFVHIASMCAALLSKFLSLFGGIYENESRNTEMLAAACAVGVGCCFAAPIGGVLFSIEVTSTFFAVRNYWRGFFAATFSAFIFRVLAVWNRDEETITALFKTRFRLDFPFDLQELPAFAVIGIASGFGGALFVYLNRKIVQVMRKQKTINRFLMRKRLLFPALVTLLISTLTFPPGFGQFMAGQLSQKETLVTLFDNRTWVRQGLVEELEPPSTSQAWNPPRANVFLTLVIFILMKFWMSALATTIPVPCGAFMPVFVIDGIHTDSSTYRIVPGGYAVVGAAALAGAVTHTVSTAVIVFELTGQIAHILPVMIAVILANAVAQSLQPSLYDSIIRIKKLPYLPELGWGRHQQYRVRVEDIMVRDVPHVALSCTFRDLRLALHRTKGRMLALVESPESMILLGSIERSQVVALLGAQLSPARRRQHMQERRATQTSPLSDQEGPPTPEASVCFQVNTEDSAFPAARGETHKPLKPALKRGPSVTRNLGESPTGSAESAGIALRSLFCGSPPPEAASEKLESCEKRKLKRVRISLASDADLEGEMSPEEILEWEEQQLDEPVNFSDCKIDPAPFQLVERTSLHKTHTIFSLLGVDHAYVTSIGRLIGIVTLKELRKAIEGSVTAQGVKVRPPLASFRDSATSSSDTETTEVHALWGPHSRHGLPREGSPSDSDDKCQ

SEQ ID NO: 13739 - protein, 854 aa, Homo sapiens
MAAAAAEEGMEPRALQYEQTLMYGRYTQDLGAFAKEEAARIRLGGPEPWKGPPSSRAAPELLEYGRSRCARCRAQQWMSRGLNTSILLQYLAWVTYPVVLITFSAGFTQILAPQAVGSGIPEMKTILRGVVLKEYLTLKTFIAKVIGLTCALGSGMPLGKEGPFVHIASMCAALLSKFLSLFGGIYENESRNTEMLAAACAVGVGCCFAAPIGGVLFSIEVTSTFFAVRNYWRGFFAATFSAFIFRVLAVWNRDEETITALFKTRFRLDFPFDLQELPAFAVIGIASGFGGALFVYLNRKIVQVMRKQKTINRFLMRKRLLFPALVTLLISTLTFPPGFGQFMAGQLSQKETLVTLFDNRTWVRQGLVEELEPPSTSQAWNPPRANVFLTLVIFILMKFWMSALATTIPVPCGAFMPVFVIGAAFGRLVGESMAAWFPDGIHTDSSTYRIVPGGYAVVGAAALAGAVTHTVSTAVIVFELTGQIAHILPVMIAVILANAVAQSLQPSLYDSIIRIKKLPYLPELGWGRHQQYRVRVEDIMVRDVPHVALSCTFRDLRLALHRTKGRMLALVESPESMILLGSIERSQVVALLGAQLSPARRRQHMQERRATQTSPLSDQEGPPTPEASVCFQVNTEDSAFPAARGETHKPLKPALKRGPSVTRNLGESPTGSAESAGIALRSLFCGSPPPEAASEKLESCEKRKLKRVRISLASDADLEGEMSPEEILEWEEQQLDEPVNFSDCKIDPAPFQLVERTSLHKTHTIFSLLGVDHAYVTSIGRLIGIVTLKELRKAIEGSVTAQGVKVRPPLASFRDSATSSSDTETTEVHALWGPHSRHGLPREGSPSDSDDKCQ

SEQ ID NO: 13740 - protein, 869 aa, Homo sapiens
MAAAAAEEGMEPRALQYEQTLMYGRYTQDLGAFAKEEAARIRLGGPEPWKGPPSSRAAPELLEYGRSRCARCRVCSVRCHKFLVSRVGEDWIFLVLLGLLMALVSWVMDYAIAACLQAQQWMSRGLNTSILLQYLAWVTYPVVLITFSAGFTQILAPQAVGSGIPEMKTILRGVVLKEYLTLKTFIAKVIGLTCALGSGMPLGKEGPFVHIASMCAALLSKFLSLFGGIYENESRNTEMLAAACAVGVGCCFAAPIGGVLFSIEVTSTFFAVRNYWRGFFAATFSAFIFRVLAVWNRDEETITALFKTRFRLDFPFDLQELPAFAVIGIASGFGGALFVYLNRKIVQVMRKQKTINRFLMRKRLLFPALVTLLISTLTFPPGFGQFMAGQLSQKETLVTLFDNRTWVRQGLVEELEPPSTSQAWNPPRANVFLTLVIFILMKFWMSALATTIPVPCGAFMPVFVIGAAFGRLVGESMAAWFPDGIHTDSSTYRIVPGGYAVVGAAALAGAVTHTVSTAVIVFELTGQIAHILPVMIAVILANAVAQSLQPSLYDSIIRIKKLPYLPELGWGRHQQYRVRVEDIMVRDVPHVALSCTFRDLRLALHRTKGRMLALVESPESMILLGSIERSQVVALLGAQLSPARRRQHMQERRATQTSPLSDQEGPPTPEASVCFQVNTEDSAFPAARGETHKPLKPALKRGPSVTRNLGESPTGSAESAGIALRSLFCGSPPPEAASEKLESCEKRKLKRVRISLASDADLEGEMSPEEILEWEEQQLDEPVNFSDCKIDPAPFQLVERTSLHKLRKAIEGSVTAQGVKVRPPLASFRDSATSSSDTETTEVHALWGPHSRHGLPREGSPSDSDDKCQ

SEQ ID NO: 13741 - protein, 1103 aa, Homo sapiens
MAPACQILRWALALGLGLMFEVTHAFRSQDEFLSSLESYEIAFPTRVDHNGALLAFSPPPPRRQRRGTGATAESRLFYKVASPSTHFLLNLTRSSRLLAGHVSVEYWTREGLAWQRAARPHCLYAGHLQGQASTSHVAISTCGGLHGLIVADEEEYLIEPLHGGPKGSRSPEESGPHVVYKRSSLRHPHLDTACGVRDEKPWKGRPWWLRTLKPPPARPLGNETERGQPGLKRSVSRERYVETLVVADKMMVAYHGRRDVEQYVLAIMNIVAKLFQDSSLGSTVNILVTRLILLTEDQPTLEITHHAGKSLDSFCKWQKSIVNHSGHGNAIPENGVANHDTAVLITRYDICIYKNKPCGTLGLAPVGGMCERERSCSVNEDIGLATAFTIAHEIGHTFGMNHDGVGNSCGARGQDPAKLMAAHITMKTNPFVWSSCSRDYITSFLDSGLGLCLNNRPPRQDFVYPTVAPGQAYDADEQCRFQHGVKSRQCKYGEVCSELWCLSKSNRCITNSIPAAEGTLCQTHTIDKGWCYKRVCVPFGSRPEGVDGAWGPWTPWGDCSRTCGGGVSSSSRHCDSPRPTIGGKYCLGERRRHRSCNTDDCPPGSQDFREVQCSEFDSIPFRGKFYKWKTYRGGGVKACSLTCLAEGFNFYTERAAAVVDGTPCRPDTVDICVSGECKHVGCDRVLGSDLREDKCRVCGGDGSACETIEGVFSPASPGAGYEDVVWIPKGSVHIFIQDLNLSLSHLALKGDQESLLLEGLPGTPQPHRLPLAGTTFQLRQGPDQVQSLEALGPINASLIVMVLARTELPALRYRFNAPIARDSLPPYSWHYAPWTKCSAQCAGGSQVQAVECRNQLDSSAVAPHYCSAHSKLPKRQRACNTEPCPPDWVVGNWSLCSRSCDAGVRSRSVVCQRRVSAAEEKALDDSACPQPRPPVLEACHGPTCPPEWAALDWSECTPSCGPGLRHRVVLCKSADHRATLPPAHCSPAAKPPATMRCNLRRCPPARWVAGEWGECSAQCGVGQRQRSVRCTSHTGQASHECTEALRPPTTQQCEAKCDSPTPGDGPEECKDVNKVAYCPLVLKFQFCSRAYFRQMCCKTCHGH

SEQ ID NO: 13742 - protein, 590 aa, Homo sapiens
MGPTSVLRAGLTPSCLPPPSGATNGSVSPLGRAQRVWTEPGGRGLHGATAAGPVAAACPLLAVTATAPGQPSGASTVWVREGGTAPATRMTVPLAPRTSEKCSVLNLTASLSVGNSTSGKRTGEACSLTCLAEGFNFYTERAAAVVDGTPCRPDTVDICVSGECKHVGCDRVLGSDLREDKCRVCGGDGSACETIEGVFSPASPGAGYEDVVWIPKGSVHIFIQDLNLSLSHLALKGDQESLLLEGLPGTPQPHRLPLAGTTFQLRQGPDQVQSLEALGPINASLIVMVLARTELPALRYRFNAPIARDSLPPYSWHYAPWTKCSAQCAGGSQVQAVECRNQLDSSAVAPHYCSAHSKLPKRQRACNTEPCPPDWVVGNWSLCSRSCDAGVRSRSVVCQRRVSAAEEKALDDSACPQPRPPVLEACHGPTCPPEWAALDWSECTPSCGPGLRHRVVLCKSADHRATLPPAHCSPAAKPPATMRCNLRRCPPARWVAGEWGECSAQCGVGQRQRSVRCTSHTGQASHECTEALRPPTTQQCEAKCDSPTPGDGPEECKDVNKVAYCPLVLKFQFCSRAYFRQMCCKTCHGH

SEQ ID NO: 13743 - protein, 229 aa, Homo sapiens
MAWSFRAKVQLGGLLLSLLGWVCSCVTTILPQWKTLNLELNEMETWIMGIWEVCVDREEVATVCKAFESFLSLPQELQVARILMVASHGLGLLGLLLCSFGSECFQFHRIRWVFKRRLGLLGRTLEASASATTLLPVSWVAHATIQDFWDDSIPDIIPRWEFGGALYLGWAAGIFLALGGLLLIFSACLGKEDVPFPLMAGPTVPLSCAPVEESDGSFHLMLRPRNLVI

SEQ ID NO: 13744 - protein, 230 aa, Homo sapiens
MASLGLQLVGYILGLLGLLGTLVAMLLPSWKTSSYVGASIVTAVGFSKGLWMECATHSTGITQCDIYSTLLGLPADIQAAQAMMVTSSAISSLACIISVVGMRCTVFCQESRAKDRVAVAGGVFFILGGLLGFIPVAWNLHGILRDFYSPLVPDSMKFEIGEALYLGIISSLFSLIAGIILCFSCSSQRNRSNYYDAYQAQPLATRSSPRPGQPPKVKSEFNSYSLTGYV

SEQ ID NO: 13745 - protein, 1224 aa, Homo sapiens
MKPRARGWRGLAALWMLLAQVAEQAPACAMGPAAAAPGSPSVPRPPPPAERPGWMEKGEYDLVSAYEVDHRGDYVSHEIMHHQRRRRAVPVSEVESLHLRLKGSRHDFHMDLRTSSSLVAPGFIVQTLGKTGTKSVQTLPPEDFCFYQGSLRSHRNSSVALSTCQGLSGMIRTEEADYFLRPLPSHLSWKLGRAAQGSSPSHVLYKRSTEPHAPGASEVLVTSRTWELAHQPLHSSDLRLGLPQKQHFCGRRKKYMPQPPKEDLFILPDEYKSCLRHKRSLLRSHRNEELNVETLVVVDKKMMQNHGHENITTYVLTILNMVSALFKDGTIGGNINIAIVGLILLEDEQPGLVISHHADHTLSSFCQWQSGLMGKDGTRHDHAILLTGLDICSWKNEPCDTLGFAPISGMCSKYRSCTINEDTGLGLAFTIAHESGHNFGMIHDGEGNMCKKSEGNIMSPTLAGRNGVFSWSPCSRQYLHKFLSTAQAICLADQPKPVKEYKYPEKLPGELYDANTQCKWQFGEKAKLCMLDFKKDICKALWCHRIGRKCETKFMPAAEGTICGHDMWCRGGQCVKYGDEGPKPTHGHWSDWSSWSPCSRTCGGGVSHRSRLCTNPKPSHGGKFCEGSTRTLKLCNSQKCPRDSVDFRAAQCAEHNSRRFRGRHYKWKPYTQVEDQDLCKLYCIAEGFDFFFSLSNKVKDGTPCSEDSRNVCIDGICERVGCDNVLGSDAVEDVCGVCNGNNSACTIHRGLYTKHHHTNQYYHMVTIPSGARSIRIYEMNVSTSYISVRNALRRYYLNGHWTVDWPGRYKFSGTTFDYRRSYNEPENLIATGPTNETLIVELLFQGRNPGVAWEYSMPRLGTEKQPPAQPSYTWAIVRSECSVSCGGGQMTVREGCYRDLKFQVNMSFCNPKTRPVTGLVPCKVSACPPSWSVGNWSACSRTCGGGAQSRPVQCTRRVHYDSEPVPASLCPQPAPSSRQACNSQSCPPAWSAGPWAECSHTCGKGWRKRAVACKSTNPSARAQLLPDAVCTSEPKPRMHEACLLQRCHKPKKLQWLVSAWSQCSVTCERGTQKRFLKCAEKYVSGKYRELASKKCSHLPKPSLELERACAPLPCPRHPPFAAAGPSRGSWFASPWSQCTASCGGGVQTRSVQCLAGGRPASGCLLHQKPSASLACNTHFCPIAEKKDAFCKDYFHWCYLVPQHGMCSHKFYGKQCCKTCSKSNL

SEQ ID NO: 13746 - protein, 1072 aa, Homo sapiens
MKPRARGWRGLAALWMLLAQVAEQAPACAMGPAAAAPGSPSVPRPPPPAERPGWMEKGEYDLVSAYEVDHRGDYVSHEIMHHQRRRRAVPVSEVESLHLRLKGSRHDFHMDLRTSSSLVAPGFIVQTLGKTGTKSVQTLPPEDFCFYQGSLRSHRNSSVALSTCQGLSGMIRTEEADYFLRPLPSHLSWKLGRAAQGSSPSHVLYKRSTEPHAPGASEVLVTSRTWELAHQPLHSSDLRLGLPQKQHFCGRRKKYMPQPPKEDLFILPDEYKSCLRHKRSLLRSHRNEELNVETLVVVDKKMMQNHGHENITTYVLTILNMVSALFKDGTIGGNINIAIVGLILLEDEQPGLVISHHADHTLSSFCQWQSGLMGKDGTRHDHAILLTGLDICSWKNEPCDTLGFAPISGMCSKYRSCTINEDTGLGLAFTIAHESGHNFGMIHDGEGNMCKKSEGNIMSPTLAGRNGVFSWSPCSRQYLHKFLSTAQAICLADQPKPVKEYKYPEKLPGELYDANTQCKWQFGEKAKLCMLDFKKDICKALWCHRIGRKCETKFMPAAEGTICGHDMWCRGGQCVKYGDEGPKPTHGHWSDWSSWSPCSRTCGGGVSHRSRLCTNPKPSHGGKFCEGSTRTLKLCNSQKCPRDSVDFRAAQCAEHNSRRFRGRHYKWKPYTQVEDQDLCKLYCIAEGFDFFFSLSNKVKDGTPCSEDSRNVCIDGICERVGCDNVLGSDAVEDVCGVCNGNNSACTIHRGLYTKHHHTNQYYHMVTIPSGARSIRIYEMNVSTSYISVRNALRRYYLNGHWTVDWPGRYKFSGTTFDYRRSYNEPENLIATGPTNETLIVELLFQGRNPGVAWEYSMPRLGTEKQPPAQPSYTWAIVRSECSVSCGGGQMTVREGCYRDLKFQVNMSFCNPKTRPVTGLVPCKVSACPPSWSVGNWSACSRTCGGGAQSRPVQCTRRVHYDSEPVPASLCPQPAPSSRQACNSQSCPPAWSAGPWAECSHTCGKGWRKRAVACKSTNPSARAQLLPDAVCTSEPKPRMHEACLLQRCHKPKKLQWLVSAWSQVGALVSRERG

SEQ ID NO: 13747 - protein, 1095 aa, Homo sapiens
MCDGALLPPLVLPVLLLLVWGLDPGTAVGDAAADVEVVLPWRVRPDDVHLPPLPAAPGPRRRRRPRTPPAAPRARPGERALLLHLPAFGRDLYLQLRRDLRFLSRGFEVEEAGAARRRGRPAELCFYSGRVLGHPGSLVSLSACGAAGGLVGLIQLGQEQVLIQPLNNSQGPFSGREHLIRRKWSLTPSPSAEAQRPEQLCKVLTEKKKPTWGRPSRDWRERRNAIRLTSEHTVETLVVADADMVQYHGAEAAQRFILTVMNMVYNMFQHQSLGIKINIQVTKLVLLRQRPAKLSIGHHGERSLESFCHWQNEEYGGARYLGNNQVPGGKDDPPLVDAAVFVTRTDFCVHKDEPCDTVGIAYLGGVCSAKRKCVLAEDNGLNLAFTIAHELGHNLGMNHDDDHSSCAGRSHIMSGEWVKGRNPSDLSWSSCSRDDLENFLKSKVSTCLLVTDPRSQHTVRLPHKLPGMHYSANEQCQILFGMNATFCRNMEHLMCAGLWCLVEGDTSCKTKLDPPLDGTECGADKWCRAGECVSKTPIPEHVDGDWSPWGAWSMCSRTCGTGARFRQRKCDNPPPGPGGTHCPGASVEHAVCENLPCPKGLPSFRDQQCQAHDRLSPKKKGLLTAVVVDDKPCELYCSPLGKESPLLVADRVLDGTPCGPYETDLCVHGKCQKIGCDGIIGSAAKEDRCGVCSGDGKTCHLVKGDFSHARGTALKDSGKGSINSDWKIELPGEFQIAGTTVRYVRRGLWEKISAKGPTKLPLHLMVLLFHDQDYGIHYEYTVPVNRTAENQSEPEKPQDSLFIWTHSGWEGCSVQCGGGERRTIVSCTRIVNKTTTLVNDSDCPQASRPEPQVRRCNLHPCQSRWVAGPWSPCSATCEKGFQHREVTCVYQLQNGTHVATRPLYCPGPRPAAVQSCEGQDCLSIWEASEWSQCSASCGKGVWKRTVACTNSQGKCDASTRPRAEEACEDYSGCYEWKTGDWSTCSSTCGKGLQSRVVQCMHKVTGRHGSECPALSKPAPYRQCYQEVCNDRINANTITSPRLAALTYKCTRDQWTVYCRVIREKNLCQDMRWYQRCCQTCRDFYANKMRQPPPNS

SEQ ID NO: 13748 - protein, 502 aa, Homo sapiens
MVQYHGAEAAQRFILTVMNMVYNMFQHQSLGIKINIQVTKLVLLRQRPAKLSIGHHGERSLESFCHWQNEEYGGARYLGNNQVPGGKDDPPLVDAAVFVTRTDFCVHKDEPCDTVGIAYLGGVCSAKRKCVLAEDNGLNLAFTIAHELGHNLGMNHDDDHSSCAGRSHIMSGEWVKGRNPSDLSWSSCSRDDLENFLKSKVSTCLLVTDPRSQHTVRLPHKLPGMHYSANEQCQILFGMNATFCRNMEHLMCAGLWCLVEGDTSCKTKLDPPLDGTECGADKWCRAGECVSKTPIPEHVDGDWSPWGAWSMCSRTCGTGARFRQRKCDNPPPGPGGTHCPGASVEHAVCENLPCPKGLPSFRDQQCQAHDRLSPKKKGLLTAVVVDDKPCELYCSPLGKESPLLVADRVLDGTPCGPYETDLCVHGKCQKIGCDGIIGSAAKEDRCGVCSGDGKTCHLVKGDFSHARGTGYIEAAVIPAGARRIRVVEDKPAHSFLGKTQMT

SEQ ID NO: 13749 - protein, 1221 aa, Homo sapiens
MECALLLACAFPAAGSGPPRGLAGLGRVAKALQLCCLCCASVAAALASDSSSGASGLNDDYVFVTPVEVDSAGSYISHDILHNGRKKRSAQNARSSLHYRFSAFGQELHLELKPSAILSSHFIVQVLGKDGASETQKPEVQQCFYQGFIRNDSSSSVAVSTCAGLSGLIRTRKNEFLISPLPQLLAQEHNYSSPAGHHPHVLYKRTAEEKIQRYRGYPGSGRNYPGYSPSHIPHASQSRETEYHHRRLQKQHFCGRRKKYAPKPPTEDTYLRFDEYGSSGRPRRSAGKSQKGLNVETLVVADKKMVEKHGKGNVTTYILTVMNMVSGLFKDGTIGSDINVVVVSLILLEQEPGGLLINHHADQSLNSFCQWQSALIGKNGKRHDHAILLTGFDICSWKNEPCDTLGFAPISGMCSKYRSCTINEDTGLGLAFTIAHESGHNFGMIHDGEGNPCRKAEGNIMSPTLTGNNGVFSWSSCSRQYLKKFLSTPQAGCLVDEPKQAGQYKYPDKLPGQIYDADTQCKWQFGAKAKLCSLGFVKDICKSLWCHRVGHRCETKFMPAAEGTVCGLSMWCRQGQCVKFGELGPRPIHGQWSAWSKWSECSRTCGGGVKFQERHCNNPKPQYGGLFCPGSSRIYQLCNINPCNENSLDFRAQQCAEYNSKPFRGWFYQWKPYTKVEEEDRCKLYCKAENFEFFFAMSGKVKDGTPCSPNKNDVCIDGVCELVGCDHELGSKAVSDACGVCKGDNSTCKFYKGLYLNQHKANEYYPVVLIPAGARSIEIQELQVSSSYLAVRSLSQKYYLTGGWSIDWPGEFPFAGTTFEYQRSFNRPERLYAPGPTNETLVFEILMQGKNPGIAWKYALPKVMNGTPPATKRPAYTWSIVQSECSVSCGGGYINVKAICLRDQNTQVNSSFCSAKTKPVTEPKICNAFSCPAYWMPGEWSTCSKACAGGQQSRKIQCVQKKPFQKEEAVLHSLCPVSTPTQVQACNSHACPPQWSLGPWSQCSKTCGRGVRKRELLCKGSAAETLPESQCTSLPRPELQEGCVLGRCPKNSRLQWVASSWSECSATCGLGVRKREMKCSEKGFQGKLITFPERRCRNIKKPNLDLEETCNRRACPAHPVYNMVAGWYSLPWQQCTVTCGGGVQTRSVHCVQQGRPSSSCLLHQKPPVLRACNTNFCPAPEKREDPSCVDFFNWCHLVPQHGVCNHKFYGKQCCKSCTRKI

SEQ ID NO: 13750 - protein, 1082 aa, Homo sapiens
MECALLLACAFPAAGSGPPRGLAGLGRVAKALQLCCLCCASVAAALASDSSSGASGLNDDYVFVTPVEVDSAGSYISHDILHNGRKKRSAQNARSSLHYRFSAFGQELHLELKPSAILSSHFIVQVLGKDGASETQKPEVQQCFYQGFIRNDSSSSVAVSTCAGLSGLIRTRKNEFLISPLPQLLAQEHNYSSPAGHHPHVLYKRTAEEKIQRYRGYPGSGRNYPGYSPSHIPHASQSRETEYHHRRLQKQHFCGRRKKYAPKPPTEDTYLRFDEYGSSGRPRRSAGKSQKGLNVETLVVADKKMVEKHGKGNVTTYILTVMNMVSGLFKDGTIGSDINVVVVSLILLEQEPGGLLINHHADQSLNSFCQWQSALIGKNGKRHDHAILLTGFDICSWKNEPCDTLGFAPISGMCSKYRSCTINEDTGLGLAFTIAHESGHNFGMIHDGEGNPCRKAEGNIMSPTLTGNNGVFSWSSCSRQYLKKFLSTPQAGCLVDEPKQAGQYKYPDKLPGQIYDADTQCKWQFGAKAKLCSLGFVKDICKSLWCHRVGHRCETKFMPAAEGTVCGLSMWCRQGQCVKFGELGPRPIHGQWSAWSKWSECSRTCGGGVKFQERHCNNPKPQYGGLFCPGSSRIYQLCNINPCNENSLDFRAQQCAEYNSKPFRGWFYQWKPYTKVEEEDRCKLYCKAENFEFFFAMSGKVKDGTPCSPNKNDVCIDGVCELVGCDHELGSKAVSDACGVCKGDNSTCKFYKGLYLNQHKANEYYPVVLIPAGARSIEIQELQVSSSYLAVRSLSQKYYLTGGWSIDWPGEFPFAGTTFEYQRSFNRPERLYAPGPTNETLVFEILMQGKNPGIAWKYALPKVMNGTPPATKRPAYTWSIVQSECSVSCGGGYINVKAICLRDQNTQVNSSFCSAKTKPVTEPKICNAFSCPAYWMPGEWSTCSKACAGGQQSRKIQCVQKKPFQKEEAVLHSLCPVSTPTQVQACNSHACPPQWSLGPWSQCSKTCGRGVRKRELLCKGSAAETLPESQCTSLPRPELQEGCVLGRCPKNSRLQWVASSWSEVWIRSHCWVRRLRPSWLTQ

SEQ ID NO: 13751 - protein, 101 aa, Homo sapiens
MHLHVQPLRAKGKRPKDTFNKMAHRKRHSVTSEFLSKVPDEVRQRYINLFVEKYLKVCKTEDEAVYKAKIEKKAIYERCSRRNMYVNIAVNYLKKLRDQGA

SEQ ID NO: 13752 - protein, 1366 aa, Homo sapiens
MLSFVDTRTLLLLAVTLCLATCQSLQEETVRKGPAGDRGPRGERGPPGPPGRDGEDGPTGPPGPPGPPGPPGLGGNFAAQYDGKGVGLGPGPMGLMGPRGPPGAAGAPGPQGFQGPAGEPGEPGQTGPAGARGPAGPPGKAGEDGHPGKPGRPGERGVVGPQGARGFPGTPGLPGFKGIRGHNGLDGLKGQPGAPGVKGEPGAPGENGTPGQTGARGLPGERGRVGAPGPAGARGSDGSVGPVGPAGPIGSAGPPGFPGAPGPKGEIGAVGNAGPAGPAGPRGEVGLPGLSGPVGPPGNPGANGLTGAKGAAGLPGVAGAPGLPGPRGIPGPVGAAGATGARGLVGEPGPAGSKGESGNKGEPGSAGPQGPPGPSGEEGKRGPNGEAGSAGPPGPPGLRGSPGSRGLPGADGRAGVMGPPGSRGASGPAGVRGPNGDAGRPGEPGLMGPRGLPGSPGNIGPAGKEGPVGLPGIDGRPGPIGPAGARGEPGNIGFPGPKGPTGDPGKNGDKGHAGLAGARGAPGPDGNNGAQGPPGPQGVQGGKGEQGPPGPPGFQGLPGPSGPAGEVGKPGERGLHGEFGLPGPAGPRGERGPPGESGAAGPTGPIGSRGPSGPPGPDGNKGEPGVVGAVGTAGPSGPSGLPGERGAAGIPGGKGEKGEPGLRGEIGNPGRDGARGAPGAVGAPGPAGATGDRGEAGAAGPAGPAGPRGSPGERGEVGPAGPNGFAGPAGAAGQPGAKGERGAKGPKGENGVVGPTGPVGAAGPAGPNGPPGPAGSRGDGGPPGMTGFPGAAGRTGPPGPSGISGPPGPPGPAGKEGLRGPRGDQGPVGRTGEVGAVGPPGFAGEKGPSGEAGTAGPPGTPGPQGLLGAPGILGLPGSRGERGLPGVAGAVGEPGPLGIAGPPGARGPPGAVGSPGVNGAPGEAGRDGNPGNDGPPGRDGQPGHKGERGYPGNIGPVGAAGAPGPHGPVGPAGKHGNRGETGPSGPVGPAGAVGPRGPSGPQGIRGDKGEPGEKGPRGLPGLKGHNGLQGLPGIAGHHGDQGAPGSVGPAGPRGPAGPSGPAGKDGRTGHPGTVGPAGIRGPQGHQGPAGPPGPPGPPGPPGVSGGGYDFGYDGDFYRADQPRSAPSLRPKDYEVDATLKSLNNQIETLLTPEGSRKNPARTCRDLRLSHPEWSSGYYWIDPNQGCTMDAIKVYCDFSTGETCIRAQPENIPAKNWYRSSKDKKHVWLGETINAGSQFEYNVEGVTSKEMATQLAFMRLLANYASQNITYHCKNSIAYMDEETGNLKKAVILQGSNDVELVAEGNSRFTYTVLVDGCSKKTNEWGKTIIEYKTNKPSRLPFLDIAPLDIGGADQEFFVDIGPVCFK

SEQ ID NO: 13753 - protein, 225 aa, Homo sapiens
MATHALEIAGLFLGGVGMVGTVAVTVMPQWRVSAFIENNIVVFENFWEGLWMNCVRQANIRMQCKIYDSLLALSPDLQAARGLMCAASVMSFLAFMMAILGMKCTRCTGDNEKVKAHILLTAGIIFIITGMVVLIPVSWVANAIIRDFYNSIVNVAQKRELGEALYLGWTTALVLIVGGALFCCVFCCNEKSSSYRYSIPSHRTTQKSYHTGKKSPSVYSRSQYV

SEQ ID NO: 13754 - protein, 1207 aa, Homo sapiens
MRLTHICCCCLLYQLGFLSNGIVSELQFAPDREEWEVVFPALWRREPVDPAGGSGGSADPGWVRGVGGGGSARAQAAGSSREVRSVAPVPLEEPVEGRSESRLRPPPPSEGEEDEELESQELPRGSSGAAALSPGAPASWQPPPPPQPPPSPPPAQHAEPDGDEVLLRIPAFSRDLYLLLRRDGRFLAPRFAVEQRPNPGPGPTGAASAPQPPAPPDAGCFYTGAVLRHPGSLASFSTCGGGLMGFIQLNEDFIFIEPLNDTMAITGHPHRVYRQKRSMEEKVTEKSALHSHYCGIISDKGRPRSRKIAESGRGKRYSYKLPQEYNIETVVVADPAMVSYHGADAARRFILTILNMVFNLFQHKSLSVQVNLRVIKLILLHETPPELYIGHHGEKMLESFCKWQHEEFGKKNDIHLEMSTNWGEDMTSVDAAILITRKDFCVHKDEPCDTVGIAYLSGMCSEKRKCIIAEDNGLNLAFTIAHEMGHNMGINHDNDHPSCADGLHIMSGEWIKGQNLGDVSWSRCSKEDLERFLRSKASNCLLQTNPQSVNSVMVPSKLPGMTYTADEQCQILFGPLASFCQEMQHVICTGLWCKVEGEKECRTKLDPPMDGTDCDLGKWCKAGECTSRTSAPEHLAGEWSLWSPCSRTCSAGISSRERKCPGLDSEARDCNGPRKQYRICENPPCPAGLPGFRDWQCQAYSVRTSSPKHILQWQAVLDEEKPCALFCSPVGKEQPILLSEKVMDGTSCGYQGLDICANGRCQKVGCDGLLGSLAREDHCGVCNGNGKSCKIIKGDFNHTRGAGYVEVLVIPAGARRIKVVEEKPAHSYLALRDAGKQSINSDWKIEHSGAFNLAGTTVHYVRRGLWEKISAKGPTTAPLHLLVLLFQDQNYGLHYEYTIPSDPLPENQSSKAPEPLFMWTHTSWEDCDATCGGGERKTTVSCTKIMSKNISIVDNEKCKYLTKPEPQIRKCNEQPCQTRWMMTEWTPCSRTCGKGMQSRQVACTQQLSNGTLIRARERDCIGPKPASAQRCEGQDCMTVWEAGVWSECSVKCGKGIRHRTVRCTNPRKKCVLSTRPREAEDCEDYSKCYVWRMGDWSKCSITCGKGMQSRVIQCMHKITGRHGNECFSSEKPAAYRPCHLQPCNEKINVNTITSPRLAALTFKCLGDQWPVYCRVIREKNLCQDMRWYQRCCETCRDFYAQKLQQKS

SEQ ID NO: 13755 - protein, 69 aa, Homo sapiens
MLCVSGFTSNLYSSKKDDKMKEISRTSNWGSSFSEKSGCMQTHPSMNLDCRDVTYVMNLLLIAHHHLLQ

SEQ ID NO: 13756 - protein, 176 aa, Homo sapiens
MEFHYVAQADLELLTSSNPPASASQSTGITGGSHRARPGPVHFIDKVTDKPSHSHPFALKENWNLNPEPSSPPSPLFLEAPSRQASQHHGASPGAGTSAGCPFEKCCSTEPCLSGLGDVGRGEAASLRARPGSGASRGQGPGSRVSCRRDLGKPLHAPAGFSAGEVHTTPLGNLGA

SEQ ID NO: 13757 - protein, 967 aa, Homo sapiens
MQRAVPEGFGRRKLGSDMGNAERAPGSRSFGPVPTLLLLAAALLAVSDALGRPSEEDEELVVPELERAPGHGTTRLRLHAFDQQLDLELRPDSSFLAPGFTLQNVGRKSGSETPLPETDLAHCFYSGTVNGDPSSAAALSLCEGVRGAFYLLGEAYFIQPLPAASERLATAAPGEKPPAPLQFHLLRRNRQGDVGGTCGVVDDEPRPTGKAETEDEDEGTEGEDEGAQWSPQDPALQGVGQPTGTGSIRKKRFVSSHRYVETMLVADQSMAEFHGSGLKHYLLTLFSVAARLYKHPSIRNSVSLVVVKILVIHDEQKGPEVTSNAALTLRNFCNWQKQHNPPSDRDAEHYDTAILFTRQDLCGSQTCDTLGMADVGTVCDPSRSCSVIEDDGLQAAFTTAHELGHVFNMPHDDAKQCASLNGVNQDSHMMASMLSNLDHSQPWSPCSAYMITSFLDNGHGECLMDKPQNPIQLPGDLPGTSYDANRQCQFTFGEDSKHCPDAASTCSTLWCTGTSGGVLVCQTKHFPWADGTSCGEGKWCINGKCVNKTDRKHFDTPFHGSWGMWGPWGDCSRTCGGGVQYTMRECDNPVPKNGGKYCEGKRVRYRSCNLEDCPDNNGKTFREEQCEAHNEFSKASFGSGPAVEWIPKYAGVSPKDRCKLICQAKGIGYFFVLQPKVVDGTPCSPDSTSVCVQGQCVKAGCDRIIDSKKKFDKCGVCGGNGSTCKKISGSVTSAKPGYHDIITIPTGATNIEVKQRNQRGSRNNGSFLAIKAADGTYILNGDYTLSTLEQDIMYKGVVLRYSGSSAALERIRSFSPLKEPLTIQVLTVGNALRPKIKYTYFVKKKKESFNAIPTFSAWVIEEWGECSKSCELGWQRRLVECRDINGQPASECAKEVKPASTRPCADHPCPQWQLGEWSSCSKTCGKGYKKRSLKCLSHDGGVLSHESCDPLKKPKHFIDFCTMAECS

SEQ ID NO: 13758 - protein, 461 aa, Homo sapiens
MDLPDESQWDETTCGLAVCQHPQCWATIRRIERGHPRILGSSCKTPLDAEDKLPVLTVVDILDSGFAAHHLPECTFTKAHSLLSQSSKFYSKFHGRPPKGLPDKSLINCTNRLPKFPVLNLNETQLPCPEDVRNMVVLWIPEETEIHVSQHGKKKRKNSAVKSKSFLGLSGNQSAGTRVGTPGMIVPPPTPVQLSEQFSSDFLPLWAQSEALPQDLLKELLPGGKQTMLCPEMKIKLAMMKKNLPLEKNRPDSVISSKMFLSIHRLTLERPALRYPERLKKLHNLKTEGYRKQQQRQQQQQQQQKKVKTPIKKQEAKKKAKSDPGIQSTSHKHPVTTVHDRLYGYRTLPGQNSDMKQQQQMEKGTTSKQDSTERPKMNYYDHADFHHSVKSPELYETEPTNKDISAPVDAVPEAQAARQKKISFNFSEIMASTGWNSELKLLRILQDTDDEDEEDQSSGAE

SEQ ID NO: 13759 - protein, 253 aa, Homo sapiens
MDNRFATAFVIACVLSLISTIYMAASIGTDFWYEYRSPVQENSSDLNKSIWDEFISDEADEKTYNDALFRYNGTVGLWRRCITIPKNMHWYSPPERTESFDVVTKCVSFTLTEQFMEKFVDPGNHNSGIDLLRTYLWRCQFLLPFVSLGLMCFGALIGLCACICRSLYPTIATGILHLLAGLCTLGSVSCYVAGIELLHQKLELPDNVSGEFGWSFCLACVSAPLQFMASALFIWAAHTNRKEYTLMKAYRVA

SEQ ID NO: 13760 - protein, 184 aa, Homo sapiens
MDNRFATAFVIACVLSLISTIYMAASIGTDFWYEYRSPVQENSSDLNKSIWDEFISDEADEKTYNDALFRYNGTVGLWRRCITIPKNMHWYSPPERTESFDVVTKCVSFTLTEQFMEKFVDPGNHNSGIDLLRTYLWRCQFLLPFVSLGLMCFGALIGLCACICRSLYPTIATGILHLLADTML

SEQ ID NO: 13761 - protein, 158 aa, Homo sapiens
MGESFDVVTKCVSFTLTEQFMEKFVDPGNHNSGIDLLRTYLWRCQFLLPFVSLGLMCFGALIGLCACICRSLYPTIATGILHLLAGLCTLGSVSCYVAGIELLHQKLELPDNVSGEFGWSFCLACVSAPLQFMASALFIWAAHTNRKEYTLMKAYRVA

SEQ ID NO: 13762 - protein, 202 aa, Homo sapiens
MVRIWTTIMIVLILLLRIGPNKPSLSGRQAPAQAQTSDLVPSLFPLGLWAPGFCTWSSPDEDKVWRPAWEQGPKGEPDPRGLRPRKPVPGTGNRDSGTRRRLQDATEQDPRPGNDVASAETAGPPSPSGIRAQDRAPRHRRAPPARMPVAPAPSADGEPLQEQGGGLFHRTRSVYNGLELNTWMKVERLFVEKFHQSFSLDN

SEQ ID NO: 13763 - protein, 183 aa, Homo sapiens
MVRIWTTIMIVLILLLRIGPNKPSLSGRQAPAQAQTSDLVPSLFPLGLWAPGFCTWSSPDEDKRPRKPVPGTGNRDSGTRRRLQDATEQDPRPGNDVASAETAGPPSPSGIRAQDRAPRHRRAPPARMPVAPAPSADGEPLQEQGGGLFHRTRSVYNGLELNTWMKVERLFVEKFHQSFSLDN

SEQ ID NO: 13764 - protein, 431 aa, Homo sapiens
MFWRRLRPGAQDLAPKGLPGDGDFRRSSDPRLPKLTPPALRAALGARGSGDWRIPGGGAAWWPEGDAKPGVGVGRLPPRLPALLTATRRAVRKRGLLRSLLPPPLLSAGASRESAPRQPGPGERERPRRRVAREDPDFLGAFLGELLPSRFREFLHQLQEKCAEEPEPLTSPAPQHQRGVLEHCPGSPRCPNCSFLPDLWGQSSHLQDSLTKISLQQTPILGPLKGDHSQFTTVRKANHRPHGAQVPRLKAALTHNPSGEGSRPCRQRCPFRVRFADETLQDTTLRYWERRRSVQQSVIVNQKAALPVASERVFGSVGKRLESLPKALYPGAKEETLASSSCWDCAGLSTQKTQGYLSEDTSMNSSLPFCSWKKAAAQRPRSSLRAFLDPHRNLEQESLLPNRVLQSVLKQGCPKGYHLLLASATLQPDKR

SEQ ID NO: 13765 - protein, 161 aa, Homo sapiens
MKKIEISGTCLSFHLLFGLEIRMRRIVFAGVILFRLLGVILFRLLGVILFGRLGDLGTCQTKPGQYWKEEVHIQDVGGLICRACNLSLPFHGCLLDLGTCQAEPGQYCKEEVHIQGGIQWYSVKGCTKNTSECFKSTLVKRILQLHELVTTHCCNHSLCNF

SEQ ID NO: 13766 - protein, 127 aa, Homo sapiens
MGVGFTELEYLAPWLRPPFSDLGTCQTKPGQYWKEEVHIQDVGGLICRACNLSLPFHGCLLDLGTCQAEPGQYCKEEVHIQGGIQWYSVKGCTKNTSECFKSTLVKRILQLHELVTTHCCNHSLCNF

SEQ ID NO: 13767 - protein, 167 aa, Homo sapiens
MGVKRSLQSGGILLSLVANVLMVLSTATNYWTRQQEGHSGLWQECNHGICSSIPCQTTLAVTVACMVLAVGVGVVGMVMGLRIRCDEGESLRGQTTSAFLFLGGLLLLTALIGYTVKNAWKNNVFFSWSYFSGWLALPFSILAGFCFLLADMIMQSTDAISGFPVCL

SEQ ID NO: 13768 - protein, 248 aa, Homo sapiens
MAPKAAKGAKPEPAPAPPPPGAKPEEDKKDGKEPSDKPQKAVQDHKEPSDKPQKAVQPKHEVGTRRGCRRYRWELKDSNKEFWLLGHAEIKIRSLGCLIAAMILLSSLTVHPILRLIITMEISFFSFFILLYSFAIHRYIPFILWPISDLFNDLIACAFLVGAVVFAVRSRRSMNLHYLLAVILIGAAGVFAFIDVCLQRNHFRGKKAKKHMLVPPPGKEKGPQQGKGPEPAKPPEPGKPPGPAKGKK

SEQ ID NO: 13769 - protein, 195 aa, Homo sapiens
MAPKAAKGAKPEPAPAPPPPGAKPEEDKKDGKEPSDKPQKAVQDHKEPSDKPQKAVQPKHEVGTRRGCRRYRWELKDSNKEFWLLGHAEIKIRSLDLFNDLIACAFLVGAVVFAVRSRRSMNLHYLLAVILIGAAGVFAFIDVCLQRNHFRGKKAKKHMLVPPPGKEKGPQQGKGPEPAKPPEPGKPPGPAKGKK

SEQ ID NO: 13770 - protein, 1211 aa, Homo sapiens
MDPPAGAARRLLCPALLLLLLLLPPPLLPPPPPPANARLAAAADPPGGPLGHGAERILAVPVRTDAQGRLVSHVVSAATSRAGVRARRAAPVRTPSFPGGNEEEPGSHLFYNVTVFGRDLHLRLRPNARLVAPGATMEWQGEKGTTRVEPLLGSCLYVGDVAGLAEASSVALSNCDGLAGLIRMEEEEFFIEPLEKGLAAQEAEQGRVHVVYRRPPTSPPLGGPQALDTGASLDSLDSLSRALGVLEEHANSSRRRARRHAADDDYNIEVLLGVDDSVVQFHGKEHVQKYLLTLMNIVNEIYHDESLGAHINVVLVRIILLSYGKSMSLIEIGNPSQSLENVCRWAYLQQKPDTGHDEYHDHAIFLTRQDFGPSGMQGYAPVTGMCHPVRSCTLNHEDGFSSAFVVAHETGHVLGMEHDGQGNRCGDEVRLGSIMAPLVQAAFHRFHWSRCSQQELSRYLHSYDCLLDDPFAHDWPALPQLPGLHYSMNEQCRFDFGLGYMMCTAFRTFDPCKQLWCSHPDNPYFCKTKKGPPLDGTMCAPGKHCFKGHCIWLTPDILKRDGSWGAWSPFGSCSRTCGTGVKFRTRQCDNPHPANGGRTCSGLAYDFQLCSRQDCPDSLADFREEQCRQWDLYFEHGDAQHHWLPHEHRDAKERCHLYCESRETGEVVSMKRMVHDGTRCSYKDAFSLCVRGDCRKVGCDGVIGSSKQEDKCGVCGGDNSHCKVVKGTFTRSPKKHGYIKMFEIPAGARHLLIQEVDATSHHLAVKNLETGKFILNEENDVDASSKTFIAMGVEWEYRDEDGRETLQTMGPLHGTITVLVIPVGDTRVSLTYKYMIHEDSLNVDDNNVLEEDSVVYEWALKKWSPCSKPCGGGSQFTKYGCRRRLDHKMVHRGFCAALSKPKAIRRACNPQECSQPVWVTGEWEPCSQTCGRTGMQVRSVRCIQPLHDNTTRSVHAKHCNDARPESRRACSRELCPGRWRAGPWSQCSVTCGNGTQERPVLCRTADDSFGICQEERPETARTCRLGPCPRNISDPSKKSYVVQWLSRPDPDSPIRKISSKGHCQGDKSIFCRMEVLSRYCSIPGYNKLCCKSCNLYNNLTNVEGRIEPPPGKHNDIDVFMPTLPVPTVAMEVRPSPSTPLEVPLNASSTNATEDHPETNAVDEPYKIHGLEDEVQPPNLIPRRPSPYEKTRNQRIQELIDEMRKKEMLGKF

SEQ ID NO: 13771 - protein, 566 aa, Homo sapiens
MDPPAGAARRLLCPALLLLLLLLPPPLLPPPPPPANARLAAAADPPGGPLGHGAERILAVPVRTDAQGRLVSHVVSAATSRAGVRARRAAPVRTPSFPGGNEEEPGSHLFYNVTVFGRDLHLRLRPNARLVAPGATMEWQGEKGTTRVEPLLGSCLYVGDVAGLAEASSVALSNCDGLAGLIRMEEEEFFIEPLEKGLAAQEAEQGRVHVVYRRPPTSPPLGGPQALDTGASLDSLDSLSRALGVLEEHANSSRRRARRHAADDDYNIEVLLGVDDSVVQFHGKEHVQKYLLTLMNIVNEIYHDESLGAHINVVLVRIILLSYGKSMSLIEIGNPSQSLENVCRWAYLQQKPDTGHDEYHDHAIFLTRQDFGPSGMQGYAPVTGMCHPVRSCTLNHEDGFSSAFVVAHETGHVLGMEHDGQGNRCGDEVRLGSIMAPLVQAAFHRFHWSRCSQQELSRYLHSYDCLLDDPFAHDWPALPQLPGLHYSMNEQCRFDFGLGYMMCTAFRTFDPCKQLWCSHPDNPYFCKTKKGPPLDGTMCAPGKFRPGAVAHACYPSTLGGQGRWIA

SEQ ID NO: 13772 - protein, 234 aa, Homo sapiens
MRSGEELDGFEGEASSTSMISGASSPYQPTTEPVSQRRGLAGLRCDPDYLRGALGRLKVAQVILALIAFICIETIMACSPCEGLYFFEFVSCSAFVVTGVLLIMFSLNLHMRIPQINWNLTDLVNTGLSAFLFFIASIVLAALNHRAGAEIAAVIFGFLATAAYAVNTFLAVQKWRVSVRQQSTNDYIRARTESRDVDSRPEIQRLDTFSYSTNVTVRKKSPTNLLSLNHWQLA

SEQ ID NO: 13773 - protein, 208 aa, Homo sapiens
MRSGEELDGFEGEASSTSMISGASSPYQPTTEPVSQRRGLAGLRCDPDYLRGALGRLKVAQVILALIAFICIETIMACSPCEGLYFFEFVSCSAFVVTGVLLIMFSLNLHMRIPQINWNLTDLVNTGLSAFLFFIASIVLAALNHRAGAEIAAVIFGFLATAAYAVNTFLAVQKWRVSVRQQSTNDYIRARTESRDVDSRPEIQRLDT

SEQ ID NO: 13774 - protein, 179 aa, Homo sapiens
MRSGEELDGFEGEASSTSMISGASSPYQPTTEPILALIAFICIETIMACSPCEGLYFFEFVSCSAFVVTGVLLIMFSLNLHMRIPQINWNLTDLVNTGLSAFLFFIASIVLAALNHRAGAEIAAVIFGFLATAAYAVNTFLAVQKWRVSVRQQSTNDYIRARTESRDVDSRPEIQRLDT

SEQ ID NO: 13775 - protein, 179 aa, Homo sapiens
MSSQKGNVARSRPQKHQNTFSFKNDKFDKSVQTKKINAKLHDGVCQRCKEVLEWRVKYSKYKPLSKPKKCVKCLQKTVKDSYHIMCRPCACELEVCAKCGKKEDIVIPWSLPLLPRLECSGRILAHHNLRLPCSSDSPASASRVAGTTGAHHHAQLIFVFLVEMGFHYVGQAGLELLTS

SEQ ID NO: 13776 - protein, 157 aa, Homo sapiens
MSSQKGNVARSRPQKHQNTFSFKNDKFDKSVQTKKINAKLHDGVCQRCKEVLEWRVKYSKYKPLSKPKKCVKCLQKTVKDSYHIMCRPCACELEVCAKCGKKEDIVIPLNKETEKIEHTENNLSSNHRRSCRRNEESDDDLDFDIDLEDTGGDHQMN

SEQ ID NO: 13777 - protein, 35 aa, Homo sapiens
MSSQKGNVARSRPQKHQNTFSFKNDKFDKSVQTKC

SEQ ID NO: 13778 - protein, 223 aa, Homo sapiens
MLSARDRRDRHPEEGVVAELQGFAVDKAFLTSHKGILLETELALTLIIFICFTASISAYMAAALLEFFITLAFLFLYATQYYQRFDRINWPCLLQGHGQSGGPHPLDLLSHSAKVQPQPWPGLTPPGWHTPAAVPWVPAPAPGFWSWLLWFICFHSLGSSDFLRCVSAIIIFLVVSFAAVTSRDGAAIAAFVFGIILVSIFAYDAFKIYRTEMAPGASQGDQQ

SEQ ID NO: 13779 - protein, 156 aa, Homo sapiens
MLSARDRRDRHPEEGVVAELQGFAVDKAFLTSHKGILLETELALTLIIFICFTASISAYMAAALLEFFITLAFLFLYATQYYQRFDRINWPCLDFLRCVSAIIIFLVVSFAAVTSRDGAAIAAFVFGIILVSIFAYDAFKIYRTEMAPGASQGDQQ

SEQ ID NO: 13780 - protein, 118 aa, Homo sapiens
MLSARDRRDRHPEEGVVAELQGFAVDKAFLTSHKGILLETELDYQRFDRINWPCLDFLRCVSAIIIFLVVSFAAVTSRDGAAIAAFVFGIILVSIFAYDAFKIYRTEMAPGASQGDQQ

SEQ ID NO: 13781 - protein, 74 aa, Homo sapiens
MLSARDRRDRHPEEGVVAELQGFAVDKAFLTSHKGILLETELVFGIILVSIFAYDAFKIYRTEMAPGASQGDQQ

SEQ ID NO: 13782 - protein, 105 aa, Homo sapiens
MLSARDRRDRHPEEGVVAELQGFAVDKAFLTSHKGILLETELDFLRCVSAIIIFLVVSFAAVTSRDGAAIAAFVFGIILVSIFAYDAFKIYRTEMAPGASQGDQQ

SEQ ID NO: 13783 - protein, 125 aa, Homo sapiens
MLSARDRRDRHPEEGVVAELQGFAVDKAFLTSHKGILLETELALTLIIFICFTASISAYMAAALLEFFITLAFLFLYATQYYQRFDRINWPCLVFGIILVSIFAYDAFKIYRTEMAPGASQGDQQ

SEQ ID NO: 13784 - protein, 77 aa, Homo sapiens
MARFQRTKEREEDRCSLNIYYVRNTTQGTAPACVGKRMQPSPTGKGGKCCTVHGLTRKIHNVQPNLQSPILSAACVD

SEQ ID NO: 13785 - protein, 108 aa, Homo sapiens
MELNTNIKSKKGLGRRNLKPMNGAWPPARREMARFQRTKEREEDRCSLNIYYVRNTTQGTAPACVGKRMQPSPTGKGGKCCTVHGLTRKIHNVQPNLQSPILSAACVD

SEQ ID NO: 13786 - protein, 232 aa, Homo sapiens
MAYVALSDKPHLSGEVGEEACSSWNPPLFSPRPLPRLWPLPGTPFLPIRALPFSASSSGKSSLVPSPSSSAHSGFRTPCLGPDCLLCTQGCELHEGRNHMAVHSCVARAWPGDPQEVRHLNPLLCDPGSQVEPSWPWHPGLEQAAASWVGNHVSPAHRQALRGHSLGSALRALMPGGHCPLCVPCKRGCNLRGGRGKHGPRPCCPLLRKFPVLPVHPWPFPCAVWDSGWSCR

SEQ ID NO: 13787 - protein, 73 aa, Homo sapiens
MQFADWLHPSGWTIEILNAYGMGDRKRTNSMSKEAFTPEQLHLEKELGEMRLRPTVLHSQTDHQGFRPIPMMQ

SEQ ID NO: 13788 - protein, 183 aa, Homo sapiens
MENGAVYSPTTEEDPGPARGPRSGLAAYFFMGRLPLLRRVLKGLQLLLSLLAFICEEVVSQCTLCGGLYFFEFVSCSAFLLSLLILIVYCTPFYERVDTTKVKSSDFYITLGTGCVFLLASIIFVSTHDRTSAEIAAIVFGFIASFMFLLDFITMLYEKRQESQLRKPENTTRAEALTEPLNA

SEQ ID NO: 13789 - protein, 376 aa, Homo sapiens
MAERGRKRPCGPGEHGQRIEWRKWKQQKKEEKKKWKDLKLMKKLERQRAQEEQAKRLEEEEAAAEKEDRGRPYTLSVALPGSILDNAQSPELRTYLAGQIARACAIFCVDEIVVFDEEGQDAKTVEGEFTGVGKKGQACVQLARILQYLECPQYLRKAFFPKHQDLQFAGLLNPLDSPHHMRQDEESEFREGIVVDRPTRPGHGSFVNCGMKKEVKIDKNLEPGLRVTVRLNQQQHPDCKTYHGKVVSSQDPRTKAGLYWGYTVRLASCLSAVFAEAPFQDGYDLTIGTSERGSDVASAQLPNFRHALVVFGGLQGLEAGADADPNLEVAEPSVLFDLYVNTCPGQGSRTIRTEEAILISLAALQPGLIQAGARHT

SEQ ID NO: 13790 - protein, 175 aa, Homo sapiens
MSHGAGLVRTTCSSGSALGPGAGAAQPSASPLEGLLDLSYPRTHAALLKVAQMVTLLIAFICVRSSLWTNYSAYSYFEVVTICDLIMILAFYLVHLFRFYRVLTCISWPLSELLHYLIGTLLLLIASIVAASKSYNQSGLVAGAIFGFMATFLCMASIWLSYKISCVTQSTDAAV

SEQ ID NO: 13791 - protein, 142 aa, Homo sapiens
MSHGAGLVRTTCSSGSALGPGAGAAQPSASPLEGLLDLSYPRTHAALLKVAQMVTLLIAFICVRSSLWTNYSAYSYFEVVTICDLIMILAFYLVHLFRFYRVLTCISWPLSIFGFMATFLCMASIWLSYKISCVTQSTDAAV

SEQ ID NO: 13792 - protein, 136 aa, Homo sapiens
MAEECPRACAEPVAPKATAPPERTSDYYRVSADLPGRFNNPGWFRGYRTQKAVSVYRTSNQAYGSRAPTVHEMPKVFYPNSNKFSQQLAAGGMFRNNTLNVYLEKSIVTGPDNCITSCDRLNFHPSYNINRPSICD

SEQ ID NO: 13793 - protein, 92 aa, Homo sapiens
MAEECPRACAEPVAPKATAPPERTSDYYRVSADLPGRFNNPGWFRGYRTQKAVSVYRTSNQAYGSRAPTVHEMPRVECSGTILSMFTWRKAS

SEQ ID NO: 13794 - protein, 136 aa, Homo sapiens
MAANATSGRPPSIALRQPEATGWRRGIPAKVATKGTQAEREGDVRSGGRARGRCVRLAKRCSPSSLGLRRRRRRTGGRQGDPQIFLGSDFRLLTPANSNPVLENPARTGSRIVIGISRERNLPFCGRSNLPDVSSL

SEQ ID NO: 13795 - protein, 1079 aa, Homo sapiens
MEWLLEDLLGAKGDMGLLWGQLTHALACRHCGSSCFQSPGNLVTLFLFVVWQIQRWWQLGRLRQLHPWCSGNMVQGKELPLLHRVAFLDHLCKQKSEVEEEGEEEEEGEDEASLDPLKPCSPTKEAPTGEQATPAPPQPSCGSEGLLKAIGIPEQTVMQPVSPSRSFPIFQILTSFPVRHKIASGNRQQQRKSQLFWGLPSLHSESLEAIFLSSGGPSPLKWSVCSSVFFNKLAFLPRSNLLLPQYHSSAQFSTHGAHTMEDLEGMAPDPQLLPPPSSPSVSSLLLHLRPFPVDHKGVLSGAEAPTQSPGTSPLEVLPGYETHLETTGHKKMPQAFEPPMPPPCQSPASLSEPRKVSPEGGLAISKDFWGTVGYREKPQASESSMPVPCPPLDSLPELQRESSLEDPSRYKPQWECRENSGNLWAFESPVLDLNPELSGTSPECVPPASETPWKGMQSRENIWVPADPVSPPSLPSVPLLESLVMGPQGVLSESKALWETMGQKENLWASDSPDPVHSTPPTTLMEPHRINPGECLATSEATWKDTEHSRNSSASRSPSLALSPPPALAPELLRVRSMGVLSDSEARCGDIQKTKNSWASKHPACNLPQDLHGASPLGVLSDSQSIVGEMEQKENCVPVFPGRGSSPSSNSVSKSHVSEPIADQSNYKPDGEAVEQRKNHWATELPAPSSLSTPLPEPHIDLELVWRNVQQREVPQGPSPLAVDPLHPVPQPPTLAEAVKIERTHPGLPKGVTCPGVKAEAPLSQRWTVPELLTHPGIHAWQWSRELKLRLKKLRQSPASRAPGPSQSFCSSPILSSTIPDFWGLPSCPPQQIYPPNPCPHSSSCHPQEVQRTVPQPVQSSHCHHFQSSSQLQPQESGRAEQGSQRGEKMKGKMVSQVPSQGPCVHMEAGVDYLSPGPGEPSNSKVLVSGKRKDKASASSSAKKREHPRKPKAGDHRRGTARLGLSTVTGKNHPAQARSLVEAPVSTFPQRSQHRGQSSQHTALPQLLLPKASGPQDQPEAGRRASDILTPRHCKHCPWAHMEKYLSFPTLKASLTRGLQKVLAKCLDNHRPLPTKSSQ

SEQ ID NO: 13796 - protein, 1031 aa, Homo sapiens
MLRKIQRWWQLGRLRQLHPWCSGNMVQGKELPLLHRVAFLDHLCKQKSEVEEEGEEEEEGEDEASLDPLKPCSPTKEAPTGEQATPAPPQPSCGSEGLLKAIGIPEQTVMQPVSPSRSFPIFQILTSFPVRHKIASGNRQQQRKSQLFWGLPSLHSESLEAIFLSSGGPSPLKWSVCSSVFFNKLAFLPRSNLLLPQYHSSAQFSTHGAHTMEDLEGMAPDPQLLPPPSSPSVSSLLLHLRPFPVDHKGVLSGAEAPTQSPGTSPLEVLPGYETHLETTGHKKMPQAFEPPMPPPCQSPASLSEPRKVSPEGGLAISKDFWGTVGYREKPQASESSMPVPCPPLDSLPELQRESSLEDPSRYKPQWECRENSGNLWAFESPVLDLNPELSGTSPECVPPASETPWKGMQSRENIWVPADPVSPPSLPSVPLLESLVMGPQGVLSESKALWETMGQKENLWASDSPDPVHSTPPTTLMEPHRINPGECLATSEATWKDTEHSRNSSASRSPSLALSPPPALAPELLRVRSMGVLSDSEARCGDIQKTKNSWASKHPACNLPQDLHGASPLGVLSDSQSIVGEMEQKENCVPVFPGRGSSPSSNSVSKSHVSEPIADQSNYKPDGEAVEQRKNHWATELPAPSSLSTPLPEPHIDLELVWRNVQQREVPQGPSPLAVDPLHPVPQPPTLAEAVKIERTHPGLPKGVTCPGVKAEAPLSQRWTVPELLTHPGIHAWQWSRELKLRLKKLRQSPASRAPGPSQSFCSSPILSSTIPDFWGLPSCPPQQIYPPNPCPHSSSCHPQEVQRTVPQPVQSSHCHHFQSSSQLQPQESGRAEQGSQRGEKMKGKMVSQVPSQGPCVHMEAGVDYLSPGPGEPSNSKVLVSGKRKDKASASSSAKKREHPRKPKAGDHRRGTARLGLSTVTGKNHPAQARSLVEAPVSTFPQRSQHRGQSSQHTALPQLLLPKASGPQDQPEAGRRASDILTPRHCKHCPWAHMEKYLSFPTLKASLTRGLQKVLAKCLDNHRPLPTKSSQ

SEQ ID NO: 13797 - protein, 1006 aa, Homo sapiens
MLRKELPLLHRVAFLDHLCKQKSEVEEEGEEEEEGEDEASLDPLKPCSPTKEAPTGEQATPAPPQPSCGSEGLLKAIGIPEQTVMQPVSPSRSFPIFQILTSFPVRHKIASGNRQQQRKSQLFWGLPSLHSESLEAIFLSSGGPSPLKWSVCSSVFFNKLAFLPRSNLLLPQYHSSAQFSTHGAHTMEDLEGMAPDPQLLPPPSSPSVSSLLLHLRPFPVDHKGVLSGAEAPTQSPGTSPLEVLPGYETHLETTGHKKMPQAFEPPMPPPCQSPASLSEPRKVSPEGGLAISKDFWGTVGYREKPQASESSMPVPCPPLDSLPELQRESSLEDPSRYKPQWECRENSGNLWAFESPVLDLNPELSGTSPECVPPASETPWKGMQSRENIWVPADPVSPPSLPSVPLLESLVMGPQGVLSESKALWETMGQKENLWASDSPDPVHSTPPTTLMEPHRINPGECLATSEATWKDTEHSRNSSASRSPSLALSPPPALAPELLRVRSMGVLSDSEARCGDIQKTKNSWASKHPACNLPQDLHGASPLGVLSDSQSIVGEMEQKENCVPVFPGRGSSPSSNSVSKSHVSEPIADQSNYKPDGEAVEQRKNHWATELPAPSSLSTPLPEPHIDLELVWRNVQQREVPQGPSPLAVDPLHPVPQPPTLAEAVKIERTHPGLPKGVTCPGVKAEAPLSQRWTVPELLTHPGIHAWQWSRELKLRLKKLRQSPASRAPGPSQSFCSSPILSSTIPDFWGLPSCPPQQIYPPNPCPHSSSCHPQEVQRTVPQPVQSSHCHHFQSSSQLQPQESGRAEQGSQRGEKMKGKMVSQVPSQGPCVHMEAGVDYLSPGPGEPSNSKVLVSGKRKDKASASSSAKKREHPRKPKAGDHRRGTARLGLSTVTGKNHPAQARSLVEAPVSTFPQRSQHRGQSSQHTALPQLLLPKASGPQDQPEAGRRASDILTPRHCKHCPWAHMEKYLSFPTLKASLTRGLQKVLAKCLDNHRPLPTKSSQ

SEQ ID NO: 13798 - protein, 2263 aa, Homo sapiens
MMLLILFLVIICSHISVNQDSGPEYADVVFLVDSSDRLGSKSFPFVKMFITKMISSLPIEADKYRVALAQYSDKLHSEFHLSTFKGRSPMLNHLRKNFGFIGGSLQIGKALQEAHRTYFSAPANGRDKKQFPPILVVLASSESEDNVEEASKALRKDGVKIISVGVQKASEENLKAMATSQFHFNLRTVRDLSMFSQNMTHIIKDVIKYKEGAVDDIFVEACQGPSMADVVFLLDMSINGSEENFDYLKGFLEESVSALDIKENCMRVGLVAYSNETKVINSLSMGINKSEVLQHIQNLSPRTGKAYTGAAIKKLRKEVFSARNGSRKNQGVPQIAVLVTHRDSEDNVTKAAVNLRREGVTIFTLGIEGASDTQLEKIASHPAEQYVSKLKTFADLAAHNQTFLKKLRNQITHTVSVFSERTETLKSGCVDTEEADIYLLIDGSGSTQATDFHEMKTFLSEVVGMFNIAPHKVRVGAVQYADSWDLEFEINKYSNKQDLGKAIENIRQMGGNTNTGAALNFTLSLLQKAKKQRGNKVPCHLVVLTNGMSKDSILEPANRLREEHIRVYAIGIKEANQTQLREIAGEEKRVYYVHDFDALKDIRNQVVQEICTEEACKEMKADIMFLVDSSGSIGPENFSKMKTFMKNLVSKSQIGPDRVQIGVVQFSDINKEEFQLNRFMSQSDISNAIDQMAHIGQTTLTGSALSFVSQYFSPTKGARPNIRKFLILITDGEAQDIVKEPAVVLRQEGVIIYSVGVFGSNVTQLEEISGRPEMVFYVENFDILQRIEDDLVFGICSPREECKRIEVLDVVFVIDSSGSIDYDEYNIMKDFMIGLVKKADVGKNQVRFGALKYADDPEVLFYLDDFGTKLEVISVLQNDQAMGGSTYTAEALGFSDHMFTEARGSRLNKGVPQVLIVITDGESHDADKLNATAKALRDKGILVLAVGIDGANPVELLAMAGSSDKYFFVETFGGLKGIFSDVTASVCNSSKVDCEIDKVDLVFLMDGSTSIQPNDFKKMKEFLASVVQDFDVSLNRVRIGAAQFSDTYHPEFPLGTFIGEKEISFQIENIKQIFGNTHIGAALREVEHYFRPDMGSRINTGTPQVLLVLTDGQSQDEVAQAAEALRHRGIDIYSVGIGDVDDQQLIQITGTAEKKLTVHNFDELKKVNKRIVRNICTTAGESNCFVDVVVGFDVSTQEKGQTLLEGQPWMETYLQDILRAISSLNGVSCEVGTETQVSVAFQVTNAMEKYSPKFEIYSENILNSLKDITVKGPSLLNANLLDSLWDTFQNKSAARGKVVLLFSDGLDDDVEKLEQKSDELRKEGLNALITVALDGPADSSDLADLPYIEFGKGFEYRTQLSIGMRELGSRLSKQLVNVAERTCCCLFCKCIGGDGTMGDPGPPGKRGPPGFKGSEGYLGEEGIAGERGAPGPVGEQGTKGCYGTKGPKGNRGLNGQEGEVGENGIDGLNGEQGDNGLPGRKGEKGDEGSQGSPGKRGTPGDRGAKGLRGDPGAPGVDSSIEGPTGLKGERGRQGRRGWPGPPGTPGSRRKTAAHGRRGHTGPQGTAGIPGPDGLEGSLGLKGPQGPRGEAGVKGEKGGVGSKGPQGPPGPGGEAGNQGRLGSQGNKGEPGDLGEKGAVGFPGPRGLQGNDGSPGYGSVGRKGAKGQEGFPGESGPKGEIGDPGGPGETGLKGARGKMISAGLPGEMGSPGEPGPPGRKGVKGAKGLASFSTCELIQYVRDRSPGRHGKPECPVHPTELVFALDHSRDVTEQEFERMKEMMAFLVRDIKVRENSCPVGAHIAILSYNSHARHLVRFSDAYKKSQLLREIETIPYERSSASREIGRAMRFISRNVFKRTLPGAHTRKIATFFSSGQSADAHSITTAAMEFGALEIIPVVITFSNVPSVRRAFAIDDTGTFQVIVVPSGADYIPALERLQRCTFCYDVCKPDASCDQARPPPVQSYMDAAFLLDASRNMGSAEFEDIRAFLGALLDHFEITPEPETSVTGDRVALLSHAPPDFLPNTQKSPVRAEFNLTTYRSKRLMKRHVHESVKQLNGDAFIGHALQWTLDNVFLSTPNLRRNKVIFVISAGETSHLDGEILKKESLRAKCQGYALFVFSLGPIWDDKELEDLASHPLDHHLVQLGRIHKPDHSYGVKFVKSFINSIRRAINKYPPINLKIKCNRLNSIDPKQPPRPFRSFVPGPLKATLKEDVLQKAKFFQDKKYLSRVARSGRDDAIQNFMRSTSHTFKNGRMIESAPKQHD

SEQ ID NO: 13799 - protein, 1520 aa, Homo sapiens
MMLLILFLVIICSHISVNQDSGPEYADVVFLVDSSDRLGSKSFPFVKMFITKMISSLPIEADKYRVALAQYSDKLHSEFHLSTFKGRSPMLNHLRKNFGFIGGSLQIGKALQEAHRTYFSAPANGRDKKQFPPILVVLASSESEDNVEEASKALRKDGVKIISVGVQKASEENLKAMATSQFHFNLRTVRDLSMFSQNMTHIIKDVIKYKEGAVDDIFVEACQGPSMADVVFLLDMSINGSEENFDYLKGFLEESVSALDIKENCMRVGLVAYSNETKVINSLSMGINKSEVLQHIQNLSPRTGKAYTGAAIKKLRKEVFSARNGSRKNQGVPQIAVLVTHRDSEDNVTKAAVNLRREGVTIFTLGIEGASDTQLEKIASHPAEQYVSKLKTFADLAAHNQTFLKKLRNQITHTVSVFSERTETLKSGCVDTEEADIYLLIDGSGSTQATDFHEMKTFLSEVVGMFNIAPHKVRVGAVQYADSWDLEFEINKYSNKQDLGKAIENIRQMGGNTNTGAALNFTLSLLQKAKKQRGNKVPCHLVVLTNGMSKDSILEPANRLREEHIRVYAIGIKEANQTQLREIAGEEKRVYYVHDFDALKDIRNQVVQEICTEEACKEMKADIMFLVDSSGSIGPENFSKMKTFMKNLVSKSQIGPDRVQIGVVQFSDINKEEFQLNRFMSQSDISNAIDQMAHIGQTTLTGSALSFVSQYFSPTKGARPNIRKFLILITDGEAQDIVKEPAVVLRQEGVIIYSVGVFGSNVTQLEEISGRPEMVFYVENFDILQRIEDDLVFGICSPREECKRIEVLDVVFVIDSSGSIDYDEYNIMKDFMIGLVKKADVGKNQVRFGALKYADDPEVLFYLDDFGTKLEVISVLQNDQAMGGSTYTAEALGFSDHMFTEARGSRLNKGVPQVLIVITDGESHDADKLNATAKALRDKGILVLAVGIDGANPVELLAMAGSSDKYFFVETFGGLKGIFSDVTASVCNSSKVDCEIDKVDLVFLMDGSTSIQPNDFKKMKEFLASVVQDFDVSLNRVRIGAAQFSDTYHPEFPLGTFIGEKEISFQIENIKQIFGNTHIGAALREVEHYFRPDMGSRINTGTPQVLLVLTDGQSQDEVAQAAEALRHRGIDIYSVGIGDVDDQQLIQITGTAEKKLTVHNFDELKKVNKRIVRNICTTAGESNCFVDVVVGFDVSTQEKGQTLLEGQPWMETYLQDILRAISSLNGVSCEVGTETQVSVAFQVTNAMEKYSPKFEIYSENILNSLKDITVKGPSLLNANLLDSLWDTFQNKSAARGKVVLLFSDGLDDDVEKLEQKSDELRKEGLNALITVALDGPADSSDLADLPYIEFGKGFEYRTQLSIGMRELGSRLSKQLVNVAERTCCCLFCKCIGGDGTMGDPGPPGKRGPPGFKGSEGYLGEEGIAGERGAPGPVGEQGTKGCYGTKGPKGNRGLNGQEGEVGENGIDGLNGEQGDNGLPGRKGEKGDEGSQGSPGKRGTPGDRGAKGLRGDPVSARAANWS

SEQ ID NO: 13800 - protein, 289 aa, Homo sapiens
MWRSCLRLRDGGRRLLNRPAGGPSASMSPGPTIPSPARAYAPPTERKRFYQNVSITQGEGGFEINLDHRKLKTPQAKLFTVPSEALAIAVATEWDSQQDTIKYYTMHLTTLCNTSLDNPTQRNKDQLIRAAVKFLDTDTICYRVEEPETLVELQRNEWDPIIEWAEKRYGVEISSSTSIMGPSIPAKTREVLVSHLASYNTWALQGIEFVAAQLKSMVLTLGLIDLRLTVEQAVLLSRLEEEYQIQKWGNIEWAHDYELQELRARTAAGTLFIHLCSESTTVKHKLLKE

SEQ ID NO: 13801 - protein, 221 aa, Homo sapiens
MGEKSRRKGPAPRHADGKLGRTCDHPYAPWSFTPSSRAPTAWVRPPCPVWASRLQEHSPEPRRARAPPTRRAQAALYAPALRLRDHLDRFSILMTSCTSWLQAPQAPGLCRDEQSSRISVPQLSGAPILLPDLEGTKLSNFQESSPLPHKHERKDKRSTPEEEGRSAPEKIIQSLKLCPGGHRPASLSSGCPAGCRLSFNLPPSMLLSVQKCCMPSSLKTC

SEQ ID NO: 13802 - protein, 238 aa, Homo sapiens
MAARTGHTALRRVVSGCRPKSATAAGAQAPVRNGRYLASCGILMSRTLPLHTSILPKEICARTFFKITAPLINKRKEYSERRILGYSMQEMYDVVSGVEDYKHFVPWCKKSDVISKRSGYCKTRLEIGFPPVLERYTSVVTLVKPHLVKASCTDGRLFNHLETIWRFSPGLPGYPRTCTLDFSISFEFRSLLHSQLATLFFDEVVKQMVAAFERRACKLYGPETNIPRELMLHEVHHT

SEQ ID NO: 13803 - protein, 195 aa, Homo sapiens
MSRTLPLHTSILPKEICARTFFKITAPLINKRKEYSERRILGYSMQEMYDVVSGVEDYKHFVPWCKKSDVISKRSGYCKTRLEIGFPPVLERYTSVVTLVKPHLVKASCTDGRLFNHLETIWRFSPGLPGYPRTCTLDFSISFEFRSLLHSQLATLFFDEVVKQMVAAFERRACKLYGPETNIPRELMLHEVHHT

SEQ ID NO: 13804 - protein, 114 aa, Homo sapiens
MYTSLKSTFVAFADGRGTTESMPSPPLANSNHESPVNQLGNMQNMRLGPSFILTGIFLGNGRTEASPFFTDEFALSKIFPEYKRNLFGKFQTNMAFSLELDPPSLLLSVVLFMF

SEQ ID NO: 13805 - protein, 78 aa, Homo sapiens
MSATTACWPAFTVLGEARGDQVDWSRLYRDTGLVKMSRKPRASSPFSNNHPSTPKRFPRQPRREKGPVKEVPGTKGSP

SEQ ID NO: 13806 - protein, 73 aa, Homo sapiens
MSATTACWPAFTVLGEARGDQVDWSRLYRDTGLVKMSRKPRASSPFSNNHPSTPKRRGRGKHPLIPGPEALSK

SEQ ID NO: 13807 - protein, 178 aa, Homo sapiens
MERIVHCEGIVSWDNLYREYNTMASTFGPKDILVLPLATDSFFVIGKVTSSLWASVSSFLNNKKIPHGAWLLSPCLHFLQALLVCAQVYLPLPVRSLLCICTCPPFVCSLSDTGLPLFPPTASLNPAMCHNGVELSFWMMWRDLTLMPFPSHQANLASSSTHGISQNAESGREIEHQG

SEQ ID NO: 13808 - protein, 1233 aa, Homo sapiens
MGTRAFSHDSIFIPDGGAESEQTVQAMSQDNILGKVKTLQQQLGKNIKFGQRSPNAIPMNKANSGEASLEEDLFLTSPMEIVTQQDIVLSDAENKSSDTPSSLSPLNLPGAGSEMEEKVAPVKPSRPKRHFSSAGTIESVNLDAIPLAIARLDNSAAKHKLAVKPKKQRVSKKHRRLAQDPQHEQGGLESRPCLDQNGHPGEDKPTWHEEEPNPLDSEEERRRQEDYWRELEAKCKRQKAEAAEKRRLEEQRLQALERRLWEENRRQELLEEEGEGQEPPLEAERAPREEQQRSLEAPGWEDAERREREERERLEAEEERRRLQAQAQAEERRRLEEDARLEERRRQEEEEGRCAEELKRQEEEEAEGWEELEQQEAEVQGPPEALEETGEGRRGAEEEDLGEEEEEGQAHLEDWRGQLSELLNDFEERLEDQERLKPEGQREHSEEPGICEEQNPEAERRREQQGRSGDFQGADRPGPEEKREEGDTEPLLKQEGPVEAAQPPVERKEAAALEQGRKVEELRWQEVDERQTMPRPYTFQVSSGGKQILFPKVNLSPVTPAKDTGLTAAPQEPKAPKASPVQHALPSSLSVPHTAILVTGAQLCGPAVNLSQIKDTACKSLLGLEEKKHAEAPAGENPPRGPGDARAGSGKAKPRQESPSSASALAEWASIRSRILKNAESDPRSSERDQLRPGDESTPRGRCDSRGNQRKTPPVNAKFSIMPAWQKFSDGGTETSKQSTEAESIRKRPMLGPSEETAPQPPPAGVRELGKGPEKSEMHREPADTTEGCKFAKDLPSFLVPSLPYPPQKVVAHTEFTTSSDSETANGIAKPDPVMPGGEEKASPFGIKLRRTNYSLRFNCDQQAEQKKKKRHSSTGDSADAGPPAAGSARGEKEMEGVALKHGPSLPQERKQAPSTRRDSAEPSSSRSVPVAHPGPPPASSQTPAPEHDKAANKMPLAQKPALAPKPTSQTPPASPLSKLSRPYLVELLSRRAGRPDPEPSEPSKEDQESSDRRPPSPPGPEERKGQKRDEEEEATERKPASPPLPATQQEKPSQTPEAGRKEKPMLQSRHSLDGSKLTEKVETAQPLWITLALQKQKGFREQQATREERKQAREAKQAEKLSKENVSVSVQPGSSSVSRAGSLHKSTALPEEKRPETAVSRLERREQLKKANTLPTSVTVEISDSAPPAPLVKEVTKRFSTPDAAPVSTEPAWLALAKRKAKAWSDCPQIIK

SEQ ID NO: 13809 - protein, 519 aa, Homo sapiens
MSVSVLSPSRLLGDVSGILQAASLLILLLLLIKAVQLYLHRQWLLKALQQFPCPPSHWLFGHIQELQQDQELQRIQKWVETFPSACPHWLWGGKVRVQLYDPDYMKVILGRSDPKSHGSYRFLAPWIGYGLLLLNGQTWFQHRRMLTPAFHYDILKPYVGLMADSVRVMLDKWEELLGQDSPLEVFQHVSLMTLDTIMKCAFSHQGSIQVDRNSQSYIQAISDLNNLVFSRVRNAFHQNDTIYSLTSAGRWTHRACQLAHQHTDQVIQLRKAQLQKEGELEKIKRKRHLDFLDILLLAKMENGSILSDKDLRAEVDTFMFEGHDTTASGISWILYALATHPKHQERCREEIHSLLGDGASITWNHLDQMPYTTMCIKEALRLYPPVPGIGRELSTPVTFPDGRSLPKGIMVLLSIYGLHHNPKVWPNPEVFDPFRFAPGSAQHSHAFLPFSGGSRNCIGKQFAMNELKVATALTLLRFELLPDPTRIPIPIARLVLKSKNGIHLRLRRLPNPCEDKDQL

SEQ ID NO: 13810 - protein, 355 aa, Homo sapiens
MSVSVLSPSRLLGDVSGILQAASLLILLLLLIKAVQLYLHRQWLLKALQQFPCPPSHWLFGHIQELQQDQELQRIQKWVETFPSACPHWLWGGKVRVQLYDPDYMKVILGRSDPKSHGSYRFLAPWIGYGLLLLNGQTWFQHRRMLTPAFHYDILKPYVGLMADSVRVMLDKWEELLGQDSPLEVFQHVSLMTLDTIMKCAFSHQGSIQVDRNSQSYIQAISDLNNLVFSRVRNAFHQNDTIYSLTSAGRWTHRACQLAHQHTDQVIQLRKAQLQKEGELEKIKRKRHLDFLDILLLAKMENGSILSDKDLRAEVDTFMFEGHDTTASGISWILYALATHPKHQERCREEIHSLL

SEQ ID NO: 13811 - protein, 575 aa, Homo sapiens
MFGIQDTLGRGPTLKEKSLGAEMDSVRSWVRNVGVVDANVAAQSGVALSRAHFEKQPPSNLRKSNFFHFVLALYDRQGQPVEIERTAFVDFVENDKEQGNEKTNNGTHYKLQLLYSNGVRTEQDLYVRLIDSVTKQPIAYEGQNKNPEMCRVLLTHEVMCSRCCEKKSCGNRNETPSDPVIIDRFFLKFFLKCNQNCLKTAGNPRDMRRFQVVLSTTVNVDGHVLAVSDNMFVHNNSKHGRRARRLDPSEATPCIKAISPSEGWTTGGAMVIIIGDNFFDGLQVVFGTMLVWSELITPHAIRVQTPPRHIPGVVEVTLSYKSKQFCKGAPGRFIYTALNEPTIDYGFQRLQKVIPRHPGDPERLAKEMLLKRAADLVEALYGTPHNNQDIILKRAADIAEALYSVPRNPSQLPALSSSPAHSGMMGINSYGSQLGVSISESTQGNNQGYIRNTSSISPRGYSSSSTPQQSNYSTSSNSMNGYSNVPMANLGVPGSPGFLNGSPTGSPYGIMSSSPTVGSSSTSSILPFSSSVFPAVKQKSAFAPVIRPQGSPSPACSSGNGNGFRAMTGLVVPPM

SEQ ID NO: 13812 - protein, 264 aa, Homo sapiens
MVIIIGDNFFDGLQVVFGTMLVWSELITPHAIRVQTPPRHIPGVVEVTLSYKSKQFCKGAPGRFIYTALNEPTIDYGFQRLQKVIPRHPGDPERLAKEMLLKRAADLVEALYGTPHNNQDIILKRAADIAEALYSVPRNPSQLPALSSSPAHSGMMGINSYGSQLGVSISESTQGNNQGYIRNTSSISPRGYSSSSTPQQSNYSTSSNSMNGYSNVPMANLGVPGSPGFLNGSPTGSPYGTGLWLTWLLKAFWGKKRIETIPFL

SEQ ID NO: 13813 - protein, 195 aa, Homo sapiens
MELSESVQKGFQMLADPRSFDSNAFTLLLRAAFQSLLDAQADEAVLDHPDLKHIDPVVLKHCHAAAATYILEAGKHRADKSTLSTYLEDCKFDRERIELFCTEYQNNKNSLEILLGSIGRSLPHITDVSWRLEYQIKTNQLHRMYRPAYLVTLSVQNTDSPSYPEISFSCSMEQLQDLVGKLKDASKSLERATQL

SEQ ID NO: 13814 - protein, 161 aa, Homo sapiens
MAGRKLALKTIDWVAFAEIIPQNQKAIASSLKSWNETLTSRLAALPENPPAIDWAYYKANVAKAGLVDDFEKKFNALKVPVPEDKYTAQVDAEEKEDVKSCAEWVSLSKARIVEYEKEMEKMKNLIPFDQMTIEDLNEAFPETKLDKKKYPYWPHQPIENL

SEQ ID NO: 13815 - protein, 137 aa, Homo sapiens
MAGRKLALKTIDWVAFAEIIPQNQKAIASSLKSWNETLTSRLAALPENPPAIDWAYYKANVAKAGLVDDFEKKVKSCAEWVSLSKARIVEYEKEMEKMKNLIPFDQMTIEDLNEAFPETKLDKKKYPYWPHQPIENL

SEQ ID NO: 13816 - protein, 430 aa, Homo sapiens
MAEGEDVGWWRSWLQQSYQAVKEKSSEALEFMKRDLTEFTQVVQHDTACTIAATASVVKEKLATEGSSGATEKMKKGLSDFLGVISDTFAPSPDKTIDCDVITLMGTPSGTAEPYDGTKARLYSLQSDPATYCNEPDGPPELFDAWLSQFCLEEKKGEISELLVGSPSIRALYTKMVPAAVSHSEFWHRYFYKVHQLEQEQARRDALKQRAEQSISEEPGWEEEEEELMGISPISPKEAKVPVAKISTFPEGEPGPQSPCEENLVTSVEPPAEVTPSESSESISLVTQIANPATAPEARVLPKDLSQKLLEASLEEQGLAVDVGETGPSPPIHSKPLTPAGHTGGPEPRPPARVETLREEAPTDLRVFELNSDSGKSTPSNNGKKGSSTDISEDWEKDFDLDMTEEEVQMALSKVDASGELEDVEWEDWE

SEQ ID NO: 13817 - protein, 428 aa, Homo sapiens
MAEGEDVGWWRSWLQQSYQAVKEKSSEALEFMKRDLTEFTQVVQHDTACTIAATASVVKEKLATEGSSGATEKMKKGLSDFLGVISDTFAPSPDKTIDCDVITLMGTPSGTAEPYDGTKARLYSLQSDPATYCNEPDGPPELFDAWLSQFCLEEKKGEISELLVGSPSIRALYTKMVPAAVSHSEFWHRYFYKVHQLEQEQARRDALKQRAEQSISEEPGWEEEEEELMGISPISPKEAKVPVAKISTFPEGEPGPQSPCEENLVTSVEPPAEVTPSESSESISLVTQIANPATAPEARVLPKDLSQKLLEASLEEQGLAVDVGETGPSPPIHSKPLTPAGHTGGPEPRPPARVETLREEAPTDLRVFELNSDSGKSTPSNNGKKETRSQFTVDFLWKISVTLLEPLGQSASPLFSNLPFPRLKHGHQ

SEQ ID NO: 13818 - protein, 474 aa, Homo sapiens
MAEGEDVGWWRSWLQQSYQAVKEKSSEALEFMKRDLTEFTQVVQHDTACTIAATASVVKEKLAIAACSRGACFLCPFSIQTEGSSGATEKMKKGLSDFLGVISDTFAPSPDKTIDCDVITLMGTPSGTAEPYDGTKARLYSLQSDPATYCNEPDGPPELFDAWLSQFCLEEKKGEISELLVGSPSIRALYTKMVPAAVSHSEFWHRYFYKVHQLEQEQARRDALKQRAEQSISEEPGWEEEEEELMGISPISPKEAKVPVAKISTFPEGEPGPQSPCEENLVTSVEPPAEVTPSESSESISLVTQIANPATAPEARVLPKDLSQKLLEASLEEQGLAVDVGETGPSPPIHSKPLTPAGHTGGPEPRPPARVETLREEAPTDLRVFELNSDSGKSTPSNNGKKGSSTDISEDWEKDFDLDMTEEEVQMALSKVDASGEVSGPGGSEGSEPNGPGCESSPQPAQLSPQEGPCSCLR

SEQ ID NO: 13819 - protein, 353 aa, Homo sapiens
MGTPSGTAEPYDGTKARLYSLQSDPATYCNEPDGPPELFDAWLSQFCLEEKKGEISELLVGSPSIRALYTKMVPAAVSHSEFWHRYFYKVHQLEQEQARRDALKQRAEQSISEEPGWEEEEEELMGISPISPKEAKVPVAKISTFPEGEPGPQSPCEENLVTSVEPPAEVTPSESSESISLVTQIANPATAPEARVLPKDLSQKLLEASLEEQGLAVDVGETGPSPPIHSKPLTPAGHTGGPEPRPPARVETLREEAPTDLRVFELNSDSGKSTPSNNGKKGSSTDISEDWEKDFDLDMTEEEVQMALSKVDASGEVSGPGGSEGSEPNGPGCESSPQPAQLSPQEGPCSCLR

SEQ ID NO: 13820 - protein, 173 aa, Homo sapiens
MAEGEDVGWWRSWLQQSYQAVKEKSSEALEFMKRDLTEFTQVVQHDTACTIAATASVVKEKLATEGSSGATEKMKKGLSDFLGVISDTFAPSPDKTIDCDVITLMGTPSGTAEPYDGTKARLYSLQSDPATYCNEPDGPPELFDACQPELWAQILVAPCWPSWASAHTWEGAL

SEQ ID NO: 13821 - protein, 99 aa, Homo sapiens
MLSPQLHPLQVPLPCLLLLFTLWLVVPGSSTDISEDWEKDFDLDMTEEEVQMALSKVDASGEVSGPGGSEGSEPNGPGCESSPQPAQLSPQEGPCSCLR

SEQ ID NO: 13822 - protein, 447 aa, Homo sapiens
MAEGEDVGWWRSWLQQSYQAVKEKSSEALEFMKRDLTEFTQVVQHDTACTIAATASVVKEKLAIAACSRGACFLCPFSIQTEGSSGATEKMKKGLSDFLGVISDTFAPSPDKTIDCDVITLMGTPSGTAEPYDGTKARLYSLQSDPATYCNEPDGPPELFDAWLSQFCLEEKKGEISELLVGSPSIRALYTKMVPAAVSHSEFWHRYFYKVHQLEQEQARRDALKQRAEQSISEEPGWEEEEEELMGISPISPKEAKVPVAKISTFPEGEPGPQSPCEENLVTSVEPPAEVTPSESSESISLVTQIANPATAPEARVLPKDLSQKLLEASLEEQGLAVDVGETGPSPPIHSKPLTPAGHTGGPEPRPPARVETLREEAPTDLRVFELNSDSGKSTPSNNGKKGSSTDISEDWEKDFDLDMTEEEVQMALSKVDASGELEDVEWEDWE

SEQ ID NO: 13823 - protein, 374 aa, Homo sapiens
MAEGEDVGWWRSWLQQSYQAVKEKSSEALEFMKRDLTEFTQVVQHDTACTIAATASVVKEKLAARLYSLQSDPATYCNEPDGPPELFDAWLSQFCLEEKKGEISELLVGSPSIRALYTKMVPAAVSHSEFWHRYFYKVHQLEQEQARRDALKQRAEQSISEEPGWEEEEEELMGISPISPKEAKVPVAKISTFPEGEPGPQSPCEENLVTSVEPPAEVTPSESSESISLVTQIANPATAPEARVLPKDLSQKLLEASLEEQGLAVDVGETGPSPPIHSKPLTPAGHTGGPEPRPPARVETLREEAPTDLRVFELNSDSGKSTPSNNGKKGSSTDISEDWEKDFDLDMTEEEVQMALSKVDASGELEDVEWEDWE

SEQ ID NO: 13824 - protein, 335 aa, Homo sapiens
MAEGEDVGWWRSWLQQSYQAVKEKARLYSLQSDPATYCNEPDGPPELFDAWLSQFCLEEKKGEISELLVGSPSIRALYTKMVPAAVSHSEFWHRYFYKVHQLEQEQARRDALKQRAEQSISEEPGWEEEEEELMGISPISPKEAKVPVAKISTFPEGEPGPQSPCEENLVTSVEPPAEVTPSESSESISLVTQIANPATAPEARVLPKDLSQKLLEASLEEQGLAVDVGETGPSPPIHSKPLTPAGHTGGPEPRPPARVETLREEAPTDLRVFELNSDSGKSTPSNNGKKGSSTDISEDWEKDFDLDMTEEEVQMALSKVDASGELEDVEWEDWE

SEQ ID NO: 13825 - protein, 329 aa, Homo sapiens
MEVAEPSSPTEEEEEEEEHSAEPRPRTRSNPEGAEDRAVGAQASVGSRSEGEGEAASADDGSLNTSGAGPKSWQVPPPAPEVQIRTPRVNCPEKVIICLDLSEEMSLPKLESFNGSKTNALNVSQKMIEMFVRTKHKIDKSHEFALVVVNDDTAWLSGLTSDPRELCSCLYDLETASCSTFNLEGLFSLIQQKTELPVTENVQTIPPPYVVRTILVYSRPPCQPQFSLTEPMKKMFQCPYFFFDVVYIHNGTEEKEEEMSWKDMFAFMGSLDTKGTSYKYEVALAGPALELHNCMAKLLAHPLQRPCQSHASYSLLEEEDEAIEVEATV

SEQ ID NO: 13826 - protein, 184 aa, Homo sapiens
MMGASTLQEPALSPGRCPRQPLRSKFGHHGSTVQRKCSKTNALNVSQKMIEMFVRTKHKIDKSHEFALVVVNDDTAWLSGLTSDPRELCSCLYDLETASCSTFNLEGLFSLIQQKTELPVTENVQTIPPPYVVRTILVYSRPPCQPQFSLTEPMKKMFQCPYFFFDVVYIHNGTEEKEEEMSWK

SEQ ID NO: 13827 - protein, 171 aa, Homo sapiens
MEVAEPSSPTEEEEEEEEHSAEPRPRTRSNPEGAEDRAVGAQASVGSRSEGEGEAASADDGSLNTSGAGPKSWQVPPPAPEVQIRTPRVNCPEKVIICLDLSEEMSLPKLESFNGQQKTELPVTENVQTIPPPYVVRTILVYSRPPCQPQFSLTEPMKVGEAWEREGCLQP

SEQ ID NO: 13828 - protein, 363 aa, Homo sapiens
MAPAGRPGAKKGILERLESGEVVIGDGSFLITLEKRGYVKAGLWTPEAVIEHPDAVRQLHMEFLRAGSNVMQTFTFSASEDNMESKWEDVNAAACDLAREVAGKGDALVAGGICQTSIYKYQKDEARIKKLFRQQLEVFAWKNVDFLIAEYFEHVEEAVWAVEVLKESDRPVAVTMCIGPEGDMHDITPGECAVRLVKAGASIVGVNCRFGPDTSLKTMELMKEGLEWAGLKAHLMVQPLGFHAPDCGKEGFVDLPEYPFGLESRVATRWDIQKYAREAYNLGVRYIGGCCGFEPYHIRAIAEELAPERGFLPPASEKHGSWGSGLDMHTKPWIRARARREYWENLLPASGRPFCPSLSKPDF

SEQ ID NO: 13829 - protein, 299 aa, Homo sapiens
MAPAGRPGAKKGILERLESGEVVIGDGSFLITLEKRGYVKAGLWTPEAVIEHPDAVRQLHMEFLRAGSNVMQTFTFSASEDNMESKYFEHVEEAVWAVEVLKESDRPVAVTMCIGPEGDMHDITPGECAVRLVKAGASIVGVNCRFGPDTSLKTMELMKEGLEWAGLKAHLMVQPLGFHAPDCGKEGFVDLPEYPFGLESRVATRWDIQKYAREAYNLGVRYIGGCCGFEPYHIRAIAEELAPERGFLPPASEKHGSWGSGLDMHTKPWIRARARREYWENLLPASGRPFCPSLSKPDF

SEQ ID NO: 13830 - protein, 1417 aa, Homo sapiens
MAAVPQNNLQEQLERHSARTLNNKLSLSKPKFSGFTFKKKTSSDNNVSVTNVSVAKTPVLRNKDVNVTEDFSFSEPLPNTTNQQRVKDFFKNAPAGQETQRGGSKSLLPDFLQTPKEVVCTTQNTPTVKKSRDTALKKLEFSSSPDSLSTINDWDDMDDFDTSETSKSFVTPPQSHFVRVSTAQKSKKGKRNFFKAQLYTTNTVKTDLPPPSSESEQIDLTEEQKDDSEWLSSDVICIDDGPIAEVHINEDAQESDSLKTHLEDERDNSEKKKNLEEAELHSTEKVPCIEFDDDDYDTDFVPPSPEEIISASSSSSKCLSTLKDLDTSDRKEDVLSTSKDLLSKPEKMSMQELNPETSTDCDARQISLQQQLIHVMEHICKLIDTIPDDKLKLLDCGNELLQQRNIRRKLLTEVDFNKSDASLLGSLWRYRPDSLDGPMEGDSCPTGNSMKELNFSHLPSNSVSPGDCLLTTTLGKTGFSATRKNLFERPLFNTHLQKSFVSSNWAETPRLGKKNESSYFPGNVLTSTAVKDQNKHTASINDLERETQPSYDIDNFDIDDFDDDDDWEDIMHNLAASKSSTAAYQPIKEGRPIKSVSERLSSAKTDCLPVSSTAQNINFSESIQNYTDKSAQNLASRNLKHERFQSLSFPHTKEMMKIFHKKFGLHNFRTNQLEAINAALLGEDCFILMPTGGGKSLCYQLPACVSPGVTVVISPLRSLIVDQVQKLTSLDIPATYLTGDKTDSEATNIYLQLSKKDPIIKLLYVTPEKICASNRLISTLENLYERKLLARFVIDEAHCVSQWGHDFRQDYKRMNMLRQKFPSVPVMALTATANPRVQKDILTQLKILRPQVFSMSFNRHNLKYYVLPKKPKKVAFDCLEWIRKHHPYDSGIIYCLSRRECDTMADTLQRDGLAALAYHAGLSDSARDEVQQKWINQDGCQVICATIAFGMGIDKPDVRFVIHASLPKSVEGYYQESGRAGRDGEISHCLLFYTYHDVTRLKRLIMMEKDGNHHTRETHFNNLYSMVHYCENITECRRIQLLAYFGENGFNPDFCKKHPDVSCDNCCKTKDYKTRDVTDDVKSIVRFVQEHSSSQGMRNIKHVGPSGRFTMNMLVDIFLGSKSAKIQSGIFGKGSAYSRHNAERLFKKLILDKILDEDLYINANDQAIAYVMLGNKAQTVLNGNLKVDFMETENSSSVKKQKALVAKVSQREEMVKKCLGELTEVCKSLGKVFGVHYFNIFNTVTLKKLAESLSSDPEVLLQIDGVTEDKLEKYGAEVISVLQKYSEWTSPAEDSSPGISLSSSRGPGRSAAEELDEEIPVSSHYFASKTRNERKRKKMPASQRSKRRKTASSGSKAKGGSATCRKISSKTKSSSIIGSSSASHTSQATSGANSKLGIMAPPKPINRPFLKPSYAFS

SEQ ID NO: 13831 - protein, 185 aa, Homo sapiens
MADGGGGGGTGAVGGGGTSQASAGAATGATGASGGGGPINPASLPPGDPQLIALIVEQLKSRGLFDSFRRDCLADVDTKPAYQNLRQKVDNFVSTHLDKQEWNPTMNKNQLRNGLRQSVVQSGMLEAGVDRIISQVVDPKLNHIFRPQIERAIHEFLAAQKKAAVPAPPPEPEGQDPPAPSQDTS

SEQ ID NO: 13832 - protein, 129 aa, Homo sapiens
MADGGGGGGTGAVGGGGTSQASAGAATGATGASGGGGPINPASLPPGDPQLIALIVEQLKSRGLFDSFRRDCLADVDTKPAYQNLRQKVDNFVSTHLDKQEWNPTMNKNQLRNGLRQSVVQIRQTPFES

SEQ ID NO: 13833 - protein, 233 aa, Homo sapiens
MNLNFTSPLHPASSQRPTSFFIEDILLHKPKPLREVAPDHFASSLASRVPLLDYGYPLMPTPTLLAPHAHHPLHKGDHHHPYFLTTSGMPVPALFPHPQHAELPGKHCRRRKARTVFSDSQLSGLEKRFEIQRYLSTPERVELATALSLSETQVKTWFQNRRMKHKKQLRKSQDEPKAPDGPESPEGSPRGSEAATAAEARLSLPAGPFVLTEPEDEVDIGDEGELGSGPHVL

SEQ ID NO: 13834 - protein, 626 aa, Homo sapiens
MADQRMDISSTISDFMSPGPTDLLSSSLGTSGVDCNRKRKGSSTDYQESMDTDKDDPHGRLEYTEHQGRIKNAREAHSQIEKRRRDKMNSFIDELASLVPTCNAMSRKLDKLTVLRMAVQHMKTLRGATNPYTEANYKPTFLSDDELKHLILRAADGFLFVVGCDRGKILFVSESVFKILNYSQNDLIGQSLFDYLHPKDIAKVKEQLSSSDTAPRERLIDAKTGLPVKTDITPGPSRLCSGARRSFFCRMKCNRPSVKVEDKDFPSTCSKKKADRKSFCTIHSTGYLKSWPPTKMGLDEDNEPDNEGCNLSCLVAIGRLHSHVVPQPVNGEIRVKSMEYVSRHAIDGKFVFVDQRATAILAYLPQELLGTSCYEYFHQDDIGHLAECHRQVLQTREKITTNCYKFKIKDGSFITLRSRWFSFMNPWTKEVEYIVSTNTVVLANVLEGGDPTFPQLTASPHSMDSMLPSGEGGPKRTHPTVPGIPGGTRAGAGKIGRMIAEEIMEIHRIRGSSPSSCGSSPLNITSTPPPDASSPGGKKILNGGTPDIPSSGLLSGQAQENPGYPYSDSSSILGENPHIGIDMIDNDQGSSSPSNDEAAMAVIMSLLEADAGLGGPVDFSDLPWPL

SEQ ID NO: 13835 - protein, 583 aa, Homo sapiens
MINIESMDTDKDDPHGRLEYTEHQGRIKNAREAHSQIEKRRRDKMNSFIDELASLVPTCNAMSRKLDKLTVLRMAVQHMKTLRGATNPYTEANYKPTFLSDDELKHLILRAADGFLFVVGCDRGKILFVSESVFKILNYSQNDLIGQSLFDYLHPKDIAKVKEQLSSSDTAPRERLIDAKTGLPVKTDITPGPSRLCSGARRSFFCRMKCNRPSVKVEDKDFPSTCSKKKADRKSFCTIHSTGYLKSWPPTKMGLDEDNEPDNEGCNLSCLVAIGRLHSHVVPQPVNGEIRVKSMEYVSRHAIDGKFVFVDQRATAILAYLPQELLGTSCYEYFHQDDIGHLAECHRQVLQTREKITTNCYKFKIKDGSFITLRSRWFSFMNPWTKEVEYIVSTNTVVLANVLEGGDPTFPQLTASPHSMDSMLPSGEGGPKRTHPTVPGIPGGTRAGAGKIGRMIAEEIMEIHRIRGSSPSSCGSSPLNITSTPPPDASSPGGKKILNGGTPDIPSSGLLSGQAQENPGYPYSDSSSILGENPHIGIDMIDNDQGSSSPSNDEAAMAVIMSLLEADAGLGGPVDFSDLPWPL

SEQ ID NO: 13836 - protein, 224 aa, Homo sapiens
MADQRMDISSTISDFMSPGPTDLLSSSLGTSGVDCNRKRKGSSTDYQESMDTDKDDPHGRLEYTEHQGRIKNAREAHSQIEKRRRDKMNSFIDELASLVPTCNAMSRKLDKLTVLRMAVQHMKTLRGATNPYTEANYKPTFLSDDELKHLILRAADGFLFVVGCDRGKILFVSESVFKILNYSQNDLIGQSLFDYLHPKDIAKVKEQLSSSDTAPRERLIDAKR

SEQ ID NO: 13837 - protein, 508 aa, Homo sapiens
MADQRMDISSTISDFMSPGPTDLLSSSLGTSGVDCNRKRKGSSTDYQESMDTDKDDPHGRLEYTEHQGRIKNAREAHSQIEKRRRDKMNSFIDELASLVPTCNAMSRKLDKLTVLRMAVQHMKTLRGATNPYTEANYKPTFLSDDELKHLILRAADGFLFVVGCDRGKILFVSESVFKILNYSQNDLIGQSLFDYLHPKDIAKVKEQLSSSDTAPRERLIDAKTGLPVKTDITPGPSRLCSGARRSFFCRMKCNRPSVKVEDKDFPSTCSKKKVLQTREKITTNCYKFKIKDGSFITLRSRWFSFMNPWTKEVEYIVSTNTVVLANVLEGGDPTFPQLTASPHSMDSMLPSGEGGPKRTHPTVPGIPGGTRAGAGKIGRMIAEEIMEIHRIRGSSPSSCGSSPLNITSTPPPDASSPGGKKILNGGTPDIPSSGLLSGQAQENPGYPYSDSSSILGENPHIGIDMIDNDQGSSSPSNDEAAMAVIMSLLEADAGLGGPVDFSDLPWPL

SEQ ID NO: 13838 - protein, 301 aa, Homo sapiens
MADQRMDISSTISDFMSPGPTDLLSSSLGTSGVDCNRKRKGSSTDYQESMDTDKDDPHGRLEYTEHQGRIKNAREAHSQIEKRRRDKMNSFIDELASLVPTCNAMSRKLDKLTVLRMAVQHMKTLRGATNPYTEANYKPTFLSDDELKHLILRAADGFLFVVGCDRGKILFVSESVFKILNYSQNDLIGQSLFDYLHPKDIAKVKEQLSSSDTAPRERLIDAKTGLPVKTDITPGPSRLCSGARRSFFCRMKCNRPSVKVEDKDFPSTCSKKKADRKAFCTIHSTGYFGIFTTRTSRHIVL

SEQ ID NO: 13839 - protein, 526 aa, Homo sapiens
MADQRMDISSTISDFMSPGPTDLLSSSLGTSGVDCNRKRKGSSTDYQESMDTDKDDPHGRLEYTEHQGRIKNAREAHSQIEKRRRDKMNSFIDELASLVPTCNAMSRKLDKLTVLRMAVQHMKTLRGATNPYTEANYKPTFLSDDELKHLILRAADGFLFVVGCDRGKILFVSESVFKILNYSQNDLIGQSLFDYLHPKDIAKVKEQLSSSDTAPRERLIDAKTGLPVKTDITPGPSRLCSGARRSFFCRMKCNRPSVKVEDKDFPSTCSKKKADRKSFCTIHSTGYLKSWPPTKMGLDEDNEPDNEGCNLSCLVAIGRLHSHVVPQPVNGEIRVKSMEYVSRHAIDGKFVFVDQRATAILAYLPQELLGTSCYEYFHQDDIGHLAECHRQVLQTREKITTNCYKFKIKDGSFITLRSRWFSFMNPWTKEVEYIVSTNTVVLSRVDTGHLGQVERCTVLSRPNSRFLIAGMFTEPTSWKAGTQPSHSSQHPPTAWTACCPLEKVAQRGPTPLFQGFQGEPGLGQEK

SEQ ID NO: 13840 - protein, 624 aa, Homo sapiens
MSKEAVSLWALTVSLQPPVPLCVCREMTGSGRRKQQCVTLPFISRELCFYLLLFPPPRLEYTEHQGRIKNAREAHSQIEKRRRDKMNSFIDELASLVPTCNAMSRKLDKLTVLRMAVQHMKTLRGATNPYTEANYKPTFLSDDELKHLILRAADGFLFVVGCDRGKILFVSESVFKILNYSQNDLIGQSLFDYLHPKDIAKVKEQLSSSDTAPRERLIDAKTGLPVKTDITPGPSRLCSGARRSFFCRMKCNRPSVKVEDKDFPSTCSKKKADRKSFCTIHSTGYLKSWPPTKMGLDEDNEPDNEGCNLSCLVAIGRLHSHVVPQPVNGEIRVKSMEYVSRHAIDGKFVFVDQRATAILAYLPQELLGTSCYEYFHQDDIGHLAECHRQVLQTREKITTNCYKFKIKDGSFITLRSRWFSFMNPWTKEVEYIVSTNTVVLANVLEGGDPTFPQLTASPHSMDSMLPSGEGGPKRTHPTVPGIPGGTRAGAGKIGRMIAEEIMEIHRIRGSSPSSCGSSPLNITSTPPPDASSPGGKKILNGGTPDIPSSGLLSGQAQENPGYPYSDSSSILGENPHIGIDMIDNDQGSSSPSNDEAAMAVIMSLLEADAGLGGPVDFSDLPWPL

SEQ ID NO: 13841 - protein, 625 aa, Homo sapiens
MADQRMDISSTISDFMSPGPTDLLSSSLGTSGVDCNRKRKGSSTDYQESMDTDKDDPHGRLEYTEHQGRIKNAREAHSQIEKRRRDKMNSFIDELASLVPTCNAMSRKLDKLTVLRMAVQHMKTLRGATNPYTEANYKPTFLSDDELKHLILRAADGFLFVVGCDRGKILFVSESVFKILNYSQNDLIGQSLFDYLHPKDIAKVKEQLSSSDTAPRERLIDAKTGLPVKTDITPGPSRLCSGARRSFFCRMKCNRPSVKVEDKDFPSTCSKKKDRKSFCTIHSTGYLKSWPPTKMGLDEDNEPDNEGCNLSCLVAIGRLHSHVVPQPVNGEIRVKSMEYVSRHAIDGKFVFVDQRATAILAYLPQELLGTSCYEYFHQDDIGHLAECHRQVLQTREKITTNCYKFKIKDGSFITLRSRWFSFMNPWTKEVEYIVSTNTVVLANVLEGGDPTFPQLTASPHSMDSMLPSGEGGPKRTHPTVPGIPGGTRAGAGKIGRMIAEEIMEIHRIRGSSPSSCGSSPLNITSTPPPDASSPGGKKILNGGTPDIPSSGLLSGQAQENPGYPYSDSSSILGENPHIGIDMIDNDQGSSSPSNDEAAMAVIMSLLEADAGLGGPVDFSDLPWPL

SEQ ID NO: 13842 - protein, 582 aa, Homo sapiens
MINIESMDTDKDDPHGRLEYTEHQGRIKNAREAHSQIEKRRRDKMNSFIDELASLVPTCNAMSRKLDKLTVLRMAVQHMKTLRGATNPYTEANYKPTFLSDDELKHLILRAADGFLFVVGCDRGKILFVSESVFKILNYSQNDLIGQSLFDYLHPKDIAKVKEQLSSSDTAPRERLIDAKTGLPVKTDITPGPSRLCSGARRSFFCRMKCNRPSVKVEDKDFPSTCSKKKDRKSFCTIHSTGYLKSWPPTKMGLDEDNEPDNEGCNLSCLVAIGRLHSHVVPQPVNGEIRVKSMEYVSRHAIDGKFVFVDQRATAILAYLPQELLGTSCYEYFHQDDIGHLAECHRQVLQTREKITTNCYKFKIKDGSFITLRSRWFSFMNPWTKEVEYIVSTNTVVLANVLEGGDPTFPQLTASPHSMDSMLPSGEGGPKRTHPTVPGIPGGTRAGAGKIGRMIAEEIMEIHRIRGSSPSSCGSSPLNITSTPPPDASSPGGKKILNGGTPDIPSSGLLSGQAQENPGYPYSDSSSILGENPHIGIDMIDNDQGSSSPSNDEAAMAVIMSLLEADAGLGGPVDFSDLPWPL

SEQ ID NO: 13843 - protein, 472 aa, Homo sapiens
MAGASRLLFLWLGCFCVSLAQGERPKPPFPELRKAVPGDRTAGGGPDSELQPQDKVSEHMLRLYDRYSTVQAARTPGSLEGGSQPWRPRLLREGNTVRSFRAAAAETLERKGLYIFNLTSLTKSENILSATLYFCIGELGNISLSCPVSGGCSHHAQRKHIQIDLSAWTLKFSRNQSQLLGHLSVDMAKSHRDIMSWLSKDITQLLRKAKENEEFLIGFNITSKGRQLPKRRLPFPEPYILVYANDAAISEPESVVSSLQGHRNFPTGTVPKWDSHIRAALSIERRKKRSTGVLLPLQNNELPGAEYQYKKDEVWEERKPYKTLQAQAPEKSKNKKKQRKGPHRKSQTLQFDEQTLKKARRKQWIEPRNCARRYLKVDFADIGWSEWIISPKSFDAYYCSGACQFPMPKSLKPSNHATIQSIVRAVGVVPGIPEPCCVPEKMSSLSILFFDENKNVVLKVYPNMTVESCACR

SEQ ID NO: 13844 - protein, 160 aa, Homo sapiens
MSEVRPLSRDILMETLLYEQLLEPPTMEVLGMTDSEEDLDPMEDFDSLECMEGSDALALRLACIGDEMDVSLRAPRLAQLSEVAMHSLGLAFIYDQTEDIRDVLRSFMDGFTTLKENIMRFWRSPNPGSWVSCEQVLLALLLLLALLLPLLSGGLHLLLK

SEQ ID NO: 13845 - protein, 253 aa, Homo sapiens
MSWIPFKIGQPKKQIVPKTVERDFEREYGKLQQLEEQTRRLQKDMKKSTDADLAMSKSAVKISLDLLSNPLCEQDQDLLNMVTALDTAMKRMDAFNQEKVNQIQKTVIEPLKKFGSVFPSLNMAVKRREQALQDYRRLQAKVEKYEEKEKTGPVLAKLHQAREELRPVREDFEAKNRQLLEEMPRFYGSRLDYFQPSFESLIRAQVVYYSEMHKIFGDLSHQLDQPGHSDEQRERENEAKLSELRALSIVADD

SEQ ID NO: 13846 - protein, 199 aa, Homo sapiens
MSKSAVKISLDLLSNPLCEQDQDLLNMVTALDTAMKRMDAFNQEKVNQIQKTVIEPLKKFGSVFPSLNMAVKRREQALQDYRRLQAKVEKYEEKEKTGPVLAKLHQAREELRPVREDFEAKNRQLLEEMPRFYGSRLDYFQPSFESLIRAQVVYYSEMHKIFGDLSHQLDQPGHSDEQRERENEAKLSELRALSIVADD

SEQ ID NO: 13847 - protein, 402 aa, Homo sapiens
MAARPGPLWLLGLTLCALGGGGPGLRPPPGCPQRRLGARERRDVQREILAVLGLPGRPRPRAPPAASRLPASAPLFMLDLYHAMAGDDDEDGAPAEQRLGRADLVMSFVNMVERDRALGHQEPHWKEFRFDLTQIPAGEAVTAAEFRIYKVPSIHLLNRTLHVSMFQVVQEQSNRESDLFFLDLQTLRAGDEGWLVLDVTAASDCWLLKRHKDLGLRLYVETEDGHSVDPGLAGLLGQRAPRSQQPFVVTFFRASPSPIRTPRAVRPLRRRQPKKSNELPQANRLPGIFDDVRGSHGRQVCRRHELYVSFQDLGWLDWVIAPQGYSAYYCEGECSFPLDSCMNATNHAILQSLVHLMKPNAVPKACCAPTKLSATSVLYYDSSNNVILRKHRNMVVKACGCH

SEQ ID NO: 13848 - protein, 513 aa, Homo sapiens
MPGLGRRAQWLCWWWGLLCSCCGPPPLRPPLPAAAAAAAGGQLLGDGGSPGRTEQPPPSPQSSSGFLYRRLKTQEKREMQKEILSVLGLPHRPRPLHGLQQPQPPALRQQEEQQQQQQLPRGEPPPGRLKSAPLFMLDLYNALSADNDEDGASEGERQQSWPHEAASSSQRRQPPPGAAHPLNRKSLLAPGSGSGGASPLTSAQDSAFLNDADMVMSFVNLVEYDKEFSPRQRHHKEFKFNLSQIPEGEVVTAAEFRIYKDCVMGSFKNQTFLISIYQVLQEHQHRDSDLFLLDTRVVWASEEGWLEFDITATSNLWVVTPQHNMGLQLSVVTRDGVHVHPRAAGLVGRDGPYDKQPFMVAFFKVSEVHVRTTRSASSRRRQQSRNRSTQSQDVARVSSASDYNSSELKTACRKHELYVSFQDLGWQDWIIAPKGYAANYCDGECSFPLNAHMNATNHAIVQTLVHLMNPEYVPKPCCAPTKLNAISVLYFDDNSNVILKKYRNMVVRACGCH

SEQ ID NO: 13849 - protein, 532 aa, Homo sapiens
MPQLYIYIRLLGAYLFIISRVQGQNLDSMLHGTGMKSDSDQKKSENGVTLAPEDTLPFLKCYCSGHCPDDAINNTCITNGHCFAIIEEDDQGETTLASGCMKYEGSDFQCKDSPKAQLRRTIECCRTNLCNQYLQPTLPPVVIGPFFDGSIRWLVLLISMAVCIIAMIIFSSCFCYKHYCKSISSRRRYNRDLEQDEAFIPVGESLKDLIDQSQSSGSGSGLPLLVQRTIAKQIQMVRQVGKGRYGEVWMGKWRGEKVAVKVFFTTEEASWFRETEIYQTVLMRHENILGFIAADIKGTGSWTQLYLITDYHENGSLYDFLKCATLDTRALLKLAYSAACGLCHLHTEIYGTQGKPAIAHRDLKSKNILIKKNGSCCIADLGLAVKFNSDTNEVDVPLNTRVGTKRYMAPEVLDESLNKNHFQPYIMADIYSFGLIIWEMARRCITGGIVEEYQLPYYNMVPSDPSYEDMREVVCVKRLRPIVSNRWNSDECLRAVLKLMSECWAHNPASRLTALRIKKTLAKMVESQDVKI

SEQ ID NO: 13850 - protein, 233 aa, Homo sapiens
MSQSNRELVVDFLSYKLSQKGYSWSQFSDVEENRTEAPEGTESEMETPSAINGNPSWHLADSPAVNGATGHSSSLDAREVIPMAAVKQALREAGDEFELRYRRAFSDLTSQLHITPGTAYQSFEQVVNELFRDGVNWGRIVAFFSFGGALCVESVDKEMQVLVSRIAAWMATYLNDHLEPWIQENGGWDTFVELYGNNAAAESRKGQERFNRWFLTGMTVAGVVLLGSLFSRK

SEQ ID NO: 13851 - protein, 170 aa, Homo sapiens
MSQSNRELVVDFLSYKLSQKGYSWSQFSDVEENRTEAPEGTESEMETPSAINGNPSWHLADSPAVNGATGHSSSLDAREVIPMAAVKQALREAGDEFELRYRRAFSDLTSQLHITPGTAYQSFEQDTFVELYGNNAAAESRKGQERFNRWFLTGMTVAGVVLLGSLFSRK

SEQ ID NO: 13852 - protein, 227 aa, Homo sapiens
MSQSNRELVVDFLSYKLSQKGYSWSQFSDVEENRTEAPEGTESEMETPSAINGNPSWHLADSPAVNGATGHSSSLDAREVIPMAAVKQALREAGDEFELRYRRAFSDLTSQLHITPGTAYQSFEQVVNELFRDGVNWGRIVAFFSFGGALCVESVDKEMQVLVSRIAAWMATYLNDHLEPWIQENGGWVRTKPLVCPFSLASGQRSPTALLLYLFLLCWVIVGDVDS

SEQ ID NO: 13853 - protein, 1271 aa, Homo sapiens
MVDPVGFAEAWKAQFPDSEPPRMELRSVGDIEQELERCKASIRRLEQEVNQERFRMIYLQTLLAKEKKSYDRQRWGFRRAAQAPDGASEPRASASRPQPAPADGADPPPAEEPEARPDGEGSPGKARPGTARRPGAAASGERDDRGPPASVAALRSNFERIRKGHGQPGADAEKPFYVNVEFHHERGLVKVNDKEVSDRISSLGSQAMQMERKKSQHGAGSSVGDASRPPYRGRSSESSCGVDGDYEDAELNPRFLKDNLIDANGGSRPPWPPLEYQPYQSIYVGGMMEGEGKGPLLRSQSTSEQEKRLTWPRRSYSPRSFEDCGGGYTPDCSSNENLTSSEEDFSSGQSSRVSPSPTTYRMFRDKSRSPSQNSQQSFDSSSPPTPQCHKRHRHCPVVVSEATIVGVRKTGQIWPNDGEGAFHGDADGSFGTPPGYGCAADRAEEQRRHQDGLPYIDDSPSSSPHLSSKGRGSRDALVSGALESTKASELDLEKGLEMRKWVLSGILASEETYLSHLEALLLPMKPLKAAATTSQPVLTSQQIETIFFKVPELYEIHKEFYDGLFPRVQQWSHQQRVGDLFQKLASQLGVYRAFVDNYGVAMEMAEKCCQANAQFAEISENLRARSNKDAKDPTTKNSLETLLYKPVDRVTRSTLVLHDLLKHTPASHPDHPLLQDALRISQNFLSSINEEITPRRQSMTVKKGEHRQLLKDSFMVELVEGARKLRHVFLFTDLLLCTKLKKQSGGKTQQYDCKWYIPLTDLSFQMVDELEAVPNIPLVPDEELDALKIKISQIKNDIQREKRANKGSKATERLKKKLSEQESLLLLMSPSMAFRVHSRNGKSYTFLISSDYERAEWRENIREQQKKCFRSFSLTSVELQMLTNSCVKLQTVHSIPLTINKEDDESPGLYGFLNVIVHSATGFKQSSNLYCTLEVDSFGYFVNKAKTRVYRDTAEPNWNEEFEIELEGSQTLRILCYEKCYNKTKIPKEDGESTDRLMGKGQVQLDPQALQDRDWQRTVIAMNGIEVKLSVKFNSREFSLKRMPSRKQTGVFGVKIAVVTKRERSKVPYIVRQCVEEIERRGMEEVGIYRVSGVATDIQALKAAFDVNNKDVSVMMSEMDVNAIAGTLKLYFRELPEPLFTDEFYPNFAEGIALSDPVAKESCMLNLLLSLPEANLLTFLFLLDHLKRVAEKEAVNKMSLHNLATVFGPTLLRPSEKESKLPANPSQPITMTDSWSLEVMSQVQVLLYFLQLEAIPAPDSKRQSILFSTEV

SEQ ID NO: 13854 - protein, 1227 aa, Homo sapiens
MVDPVGFAEAWKAQFPDSEPPRMELRSVGDIEQELERCKASIRRLEQEVNQERFRMIYLQTLLAKEKKSYDRQRWGFRRAAQAPDGASEPRASASRPQPAPADGADPPPAEEPEARPDGEGSPGKARPGTARRPGAAASGERDDRGPPASVAALRSNFERIRKGHGQPGADAEKPFYVNVEFHHERGLVKVNDKEVSDRISSLGSQAMQMERKKSQHGAGSSVGDASRPPYRGRSSESSCGVDGDYEDAELNPRFLKDNLIDANGGSRPPWPPLEYQPYQSIYVGGMMEGEGKGPLLRSQSTSEQEKRLTWPRRSYSPRSFEDCGGGYTPDCSSNENLTSSEEDFSSGQSSRVSPSPTTYRMFRDKSRSPSQNSQQSFDSSSPPTPQCHKRHRHCPVVVSEATIVGVRKTGQIWPNDGEGAFHGDADGSFGTPPGYGCAADRAEEQRRHQDGLPYIDDSPSSSPHLSSKGRGSRDALVSGALESTKASELDLEKGLEMRKWVLSGILASEETYLSHLEALLLPMKPLKAAATTSQPVLTSQQIETIFFKVPELYEIHKEFYDGLFPRVQQWSHQQRVGDLFQKLASQLGVYRAFVDNYGVAMEMAEKCCQANAQFAEISENLRARSNKDAKDPTTKNSLETLLYKPVDRVTRSTLVLHDLLKHTPASHPDHPLLQDALRISQNFLSSINEEITPRRQSMTVKKGEHRQLLKDSFMVELVEGARKLRHVFLFTDLLLCTKLKKQSGGKTQQYDCKWYIPLTDLSFQMVDELEAVPNIPLVPDEELDALKIKISQIKNDIQREKRANKGSKATERLKKKLSEQESLLLLMSPSMAFRVHSRNGKSYTFLISSDYERAEWRENIREQQKKCFRSFSLTSVELQMLTNSCVKLQTVHSIPLTINKEDDESPGLYGFLNVIVHSATGFKQSSNLYCTLEVDSFGYFVNKAKTRVYRDTAEPNWNELDPQALQDRDWQRTVIAMNGIEVKLSVKFNSREFSLKRMPSRKQTGVFGVKIAVVTKRERSKVPYIVRQCVEEIERRGMEEVGIYRVSGVATDIQALKAAFDVNNKDVSVMMSEMDVNAIAGTLKLYFRELPEPLFTDEFYPNFAEGIALSDPVAKESCMLNLLLSLPEANLLTFLFLLDHLKRVAEKEAVNKMSLHNLATVFGPTLLRPSEKESKLPANPSQPITMTDSWSLEVMSQVQVLLYFLQLEAIPAPDSKRQSILFSTEV

SEQ ID NO: 13855 - protein, 217 aa, Homo sapiens
MAGRTVRAETRSRAKDDIKKVMATIEKVRRWEKRWVTVGDTSLRIFKWVPVVDPQEEERRRAGGGAERSRGRERRGRGASPRGGGPLILLDLNDENSNQSFHSEGSLQKGTEPSPGGTPQPSRPVSPAGPPEGVPEEAQPPRLGQERDPGGITAGSTDEPPMLTKEEPVPELLEAEAPEAYPVFEPVPPVPEAAQGDTEDSEGAPPLKRICPNAPDP

SEQ ID NO: 13856 - protein, 242 aa, Homo sapiens
MAGRTVRAETRSRAKDDIKKVMATIEKVRRWEKRWVTVGDTSLRIFKWVPVVDPQEEERRRAGGGAERSRGRERRGRGASPRGGGPLILLDLNDENSNQSFHSEGSLQKGTEPSPGGTPQPSRPVSPAGPPEGVPEEAQPPRLGQERDPGGITAGSTDEPPMLTKEEPVPELLEAEDSGVRMTRRALHEKGLKTEPLRRLLPRRGLRTNVRPSSMAVPDTRAPGGGSKAPRAPRTIPQGKGR

SEQ ID NO: 13857 - protein, 327 aa, Homo sapiens
MCSTSGCDLEEIPLDDDDLNTIEFKILAYYTRHHVFKSTPALFSPKLLRTRSLSQRGLGNCSANESWTEVSWPCRNSQSSEKAINLGKKKSSWKAFFGVVEKEDSQSTPAKVSAQGQRTLEYQDSHSQQWSRCLSNVEQCLEHEAVDPKVISIANRVAEIVYSWPPPQATQAGGFKSKEIFVTEGLSFQLQGHVPVASSSKKDEEEQILAKIVELLKYSGDQLERKLKKDKALMGHFQDGLSYSVFKTITDQVLMGVDPRGESEVKAQGFKAALVIDVTAKLTAIDNHPMNRVLGFGTKYLKENFSPWIQQHGGWEKILGISHEEVD

SEQ ID NO: 13858 - protein, 252 aa, Homo sapiens
MCSTSGCDLEEIPLDDDDLNTIEFKILAYYTRHHVFKSTPALFSPKLLRTRSLSQRGLGNCSANESWTEVSWPCRNSQSSEKAINLGKKKSSWKAFFGVVEKEDSQSTPAKVSAQGQRTLEYQDSHSQQWSRCLSNVEQCLEHEAVDPKVISIANRVAEIVYSWPPPQATQAGGFKSKEIFVTEGLSFQLQGHVPVASSSKKDEEEQILAKIVELLKYSGDQLERKDTAFIPIPLVDTSIQGFPQDGLMACI

SEQ ID NO: 13859 - protein, 276 aa, Homo sapiens
MCSTSGCDLEEIPLDDDDLNTIEFKILAYYTRHHVFKSTPALFSPKLLRTRSLSQRGLGNCSANESWTEVSWPCRNSQSSEKAINLGKKKSSWKAFFGVVEKEDSQSTPAKVSAQGQRTLEYQDSHSQQWSRCLSNVEQCLEHEAVDPKVISIANRVAEIVYSWPPPQATQAGGFKSKEIFVTEGLSFQLQGHVPVASSSKKDEEEQILAKIVELLKYSGDQLERKEKEWEESAKTKIKMALLWRSSGGGPRVLSIPEAFMKNSFTLTPPGFSEHN

SEQ ID NO: 13860 - protein, 245 aa, Homo sapiens
MGRLDGKVIILTAAAQGIGQAAALAFAREGAKVIATDINESKLQELEKYPGIQTRVLDVTKKKQIDQFANEVERLDVLFNVAGFVHHGTVLDCEEKDWDFSMNLNVRSMYLMIKAFLPKMLAQKSGNIINMSSVASSVKGVVNRCVYSTTKAAVIGLTKSVAADFIQQGIRCNCVCPGTVDTPSLQERIQARGNPEEARNDFLKRQKTGRFATAEEIAMLCVYLASDESAYVTGNPVIIDGGWSL

SEQ ID NO: 13861 - protein, 173 aa, Homo sapiens
MGRLDGKVIILTAAAQGIGQAAALAFAREGAKVIATDINESKLQELEKYPGIQTRVLDVTKKKQIDQFANEVERLDVLFNVAGFVHHGTVLDCEEKDWDFSMNLNVRSMYLMIKAFLPKMLAQKSGNIINMSSVASSVKGGSVSFRGLRCSYTHIIKSSAFGNRHSRDYNFKY

SEQ ID NO: 13862 - protein, 144 aa, Homo sapiens
MNLNVRSMYLMIKAFLPKMLAQKSGNIINMSSVASSVKGVVNRCVYSTTKAAVIGLTKSVAADFIQQGIRCNCVCPGTVDTPSLQERIQARGNPEEARNDFLKRQKTGRFATAEEIAMLCVYLASDESAYVTGNPVIIDGGWSL

SEQ ID NO: 13863 - protein, 228 aa, Homo sapiens
MPRRGLVAGPDLEYFQRRYFTPAEVAQHNRPEDLWVSYLGRVYDLTSLAQEYKGNLLLKPIVEVAGQDISHWFDPKTRDIRKHIDPLTGCLRYCTPRGRFVHVPPQLPCSDWANDFGKPWWQGSYYEVGRLSAKTRSIRIINTLTSQEHTLEVGVLESIWEILHRYLPYNSHAASYTWKYEGKNLNMDFTLEENGIRDEEEEFDYLSMDGTLHTPAILLYFNDDLTEL

SEQ ID NO: 13864 - protein, 157 aa, Homo sapiens
MPRRGLVAGPDLEYFQRRYFTPAEVAQHNRPEDLWVSYLGRVYDLTSLAQEYKGNLLLKPIVEVAGQDISHWFDPKTRDIRKHIDPLTGCLRYCTPRGRFVHVPPQLPCSDWANDFGKPWWQGSYYEVGRLSAKTRSIRIINTLTSQEHTLELHVEI

SEQ ID NO: 13865 - protein, 758 aa, Homo sapiens
MGRDTRSRSRSAGRRGRRRQSQSGSRSRSRSHGRRNRRRREDEGRRRRRRRSRERRSDSEEERWQRSGMRSRSPPRPKWHSRDGSSQSDSGEEQSRGQWARRRRRARSWSPSSSASSSASPGRSQSPRAAAAALSQQQSLQERLRLREERKQQEELMKAFETPEEKRARRLAKKEAKERKKREKMGWGEEYMGYTNTDNPFGDNNLLGTFIWNKALEKKGISHLEEKELKERNKRIQEDNRLELQKVKQLRLEREREKAMREQELEMLQREKEAEHFKTWEEQEDNFHLQQAKLRSKIRIRDGRAKPIDLLAKYISAEDDDLAVEMHEPYTFLNGLTVADMEDLLEDIQVYMELEQGKNADFWRDMTTITEDEISKLRKLEASGKGPGERREGVNASVSSDVQSVFKGKTYNQLQVIFQGIEGKIRAGGPNLDMGYWESLLQQLRAHMARARLRERHQDVLRQKLYKLKQEQGVESEPLFPILKQEPQSPSRSLEPEDAAPTPPGPSSEGGPAEAEVDGATPTEGDGDGDGEGEGEGEAVLMEEDLIQQSLDDYDAGRYSPRLLTAHELPLDAHVLEPDEDLQRLQLSRQQLQVTGDASESAEDIFFRRAKEGMGQDEAQFSVEMPLTGKAYLWADKYRPRKPRFFNRVHTGFEWNKYNQTHYDFDNPPPKIVQGYKFNIFYPDLIDKRSTPEYFLEACADNKDFAILRFHAGPPYEDIAFKIVNREWEYSHRHGFRCQFANGIFQLWFHFKRYRYRR

SEQ ID NO: 13866 - protein, 935 aa, Homo sapiens
MGRDTRSRSRSAGRRGRRRQSQSGSRSRSRSHGRRNRRRREDEGRRRRRRRSRERRSDSEEERWQRSGMRSRSPPRPKWHSRDGSSQSDSGEEQSRGQWARRRRRARSWSPSSSASSSASPGRSQSPRAAAAALSQQQSLQERLRLREERKQQEELMKAFETPEEKRARRLAKKEAKERKKREKMGWGEEYMGYTNTDNPFGDNNLLGTFIWNKALEKKGISHLEEKELKERNKRIQEDNRLELQKVKQLRLEREREKAMREQELEMLQREKEAEHFKTWEEQEDNFHLQQAKLRSKIRIRDGRAKPIDLLAKYISAEDDDLAVEMHEPYTFLNGLTVADMEDLLEDIQVYMELEQGKNADFWRDMTTITEDEISKLRKLEASGKGPGERREGVNASVSSDVQSVFKGKTYNQLQVIFQGIEGKIRAGGPNLDMGYWESLLQQLRAHMARARLRERHQDVLRQKLYKLKQEQGVESEPLFPILKQEPQSPSRSLEPEDAAPTPPGPSSEGGPAEAEVDGATPTEGDGDGDGEGEGEGEAVLMEEDLIQQSLDDYDAGRYSPRLLTAHELPLDAHVLEPDEDLQRLQLSRQQLQVTGDASESAEDIFFRRAKEGMGQDEAQFSVEMPLTGKAYLWADKYRPRKPRFFNRVHTGFEWNKYNQTHYDFDNPPPKIVQGYKFNIFYPDLIDKRSTPEYFLEACADNKDFAILRFHAGPPYEDIAFKIVNREWEYSHRHGFRCQFANGIFQLWFHFKRYRYRRPGPCWRPIRHCRRDPLWTPTLCRDWPPTHPVLAGGVHFPAAGIPPPGLLTGPWSMRPVTPSFAHIRTVAPSHSPFSGQEGRGPHGCHSPGRSGPAGRLVLQHPTGTSPTEAKRKVPPGPPEGHPTSPVTSPRPPTAPPRHPASSGNSSVCFSKKTCRWEKKSFVLMELAYWQDRMFF

SEQ ID NO: 13867 - protein, 413 aa, Homo sapiens
MSFRDLRNFTEMMRALGYPRHISMENFRTPNFGLVSEVLLWLVKRYEPQTDIPPDVDTEQDRVFFIKAIAQFMATKAHIKLNTKKLYQADGYAVKELLKITSVLYNAMKTKGMEGSEIVEEDVNKFKFDLGSKIADLKAARQLASEITSKGASLYDLLGMEVELREMRTEAIARPLEINETEKVMRIAIKEILTQVQKTKDLLNNVASDEANLEAKIEKRKLELERNRKRLETLQSVRPCFMDEYEKTEEELQKQYDTYLEKFQNLTYLEQQLEDHHRMEQERFEEAKNTLCLIQNKLKEEEKRLLKSGSNDDSDIDIQEDDESDSELEERRLPKPQTAMEMLMQGRPGKRIVGTMQGGDSDDNEDSEESEIDMEDDDDEDDDLEDESISLSPTKPNRRVRKSEPLDESDNDF

SEQ ID NO: 13868 - protein, 247 aa, Homo sapiens
MRTEAIARPLEINETEKVMRIAIKEILTQVQKTKDLLNNVASDEANLEAKIEKRKLELERNRKRLETLQSVRPCFMDEYEKTEEELQKQYDTYLEKFQNLTYLEQQLEDHHRMEQERFEEAKNTLCLIQNKLKEEEKRLLKSGSNDDSDIDIQEDDESDSELEERRLPKPQTAMEMLMQGRPGKRIVGTMQGGDSDDNEDSEESEIDMEDDDDEDDDLEDESISLSPTKPNRRVRKSEPLDESDNDF

SEQ ID NO: 13869 - protein, 465 aa, Homo sapiens
MKEPDAIKLFVGQIPRHLEEKDLKPIFEQFGRIFELTVIKDKYTGLHKGCAFLTYCARDSALKAQSALHEQKTLPGMNRPIQVKPADSESRGEDRKLFVGMLGKQQTDEDVRKMFEPFGTIDECTVLRGPDGTSKGCAFVKFQTHAEAQAAINTLHSSRTLPGASSSLVVKFADTEKERGLRRMQQVATQLGMFSPIALQFGAYSAYTQALMQQQAALVAAHSAYLSPMATMAAVQMQHMAAINANGLIATPITPSSGTSTPPAIAATPVSAIPAALGVNGYSPVPTQPTGQPAPDALYPNGVHPYPAQSPAAPVDPLQQAYAGMQHYTAAYPAAYSLVAPAFPQPPALVAQQPPPPPQQQQQQQQQQQQQQQREGPDGCNIFIYHLPQEFTDSEILQMFVPFGHVISAKVFVDRATNQSKCFGFVSFDNPASAQAAIQAMNGFQIGMKRLKVQLKRPKDANRPY

SEQ ID NO: 13870 - protein, 464 aa, Homo sapiens
MKEPDAIKLFVGQIPRHLEEKDLKPIFEQFGRIFELTVIKDKYTGLHKGCAFLTYCARDSALKAQSALHEQKTLPGMNRPIQVKPADSESRGEDRKLFVGMLGKQQTDEDVRKMFEPFGTIDECTVLRGPDGTSKGCAFVKFQTHAEAQAAINTLHSSRTLPGASSSLVVKFADTEKERGLRRMQQVATQLGMFSPIALQFGAYSAYTQALMQQQAALVAAHSAYLSPMATMAAVQMQHMAAINANGLIATPITPSSGTSTPPAIAATPVSAIPAALGVNGYSPVPTQPTGQPAPDALYPNGVHPYPAQSPAAPVDPLQQAYAGMQHYTAYPAAYSLVAPAFPQPPALVAQQPPPPPQQQQQQQQQQQQQQQREGPDGCNIFIYHLPQEFTDSEILQMFVPFGHVISAKVFVDRATNQSKCFGFVSFDNPASAQAAIQAMNGFQIGMKRLKVQLKRPKDANRPY

SEQ ID NO: 13871 - protein, 464 aa, Homo sapiens
MKEPDAIKLFVGQIPRHLEEKDLKPIFEQFGRIFELTVIKDKYTGLHKGCAFLTYCARDSALKAQSALHEQKTLPGMNRPIQVKPADSESRGDRKLFVGMLGKQQTDEDVRKMFEPFGTIDECTVLRGPDGTSKGCAFVKFQTHAEAQAAINTLHSSRTLPGASSSLVVKFADTEKERGLRRMQQVATQLGMFSPIALQFGAYSAYTQALMQQQAALVAAHSAYLSPMATMAAVQMQHMAAINANGLIATPITPSSGTSTPPAIAATPVSAIPAALGVNGYSPVPTQPTGQPAPDALYPNGVHPYPAQSPAAPVDPLQQAYAGMQHYTAAYPAAYSLVAPAFPQPPALVAQQPPPPPQQQQQQQQQQQQQQQREGPDGCNIFIYHLPQEFTDSEILQMFVPFGHVISAKVFVDRATNQSKCFGFVSFDNPASAQAAIQAMNGFQIGMKRLKVQLKRPKDANRPY

SEQ ID NO: 13872 - protein, 415 aa, Homo sapiens
MKEPDAIKLFVGQIPRHLEEKDLKPIFEQFGRIFELTVIKDKYTGLHKGCAFLTYCARDSALKAQSALHEQKTLPGMNRPIQVKPADSESRGEDRKLFVGMLGKQQTDEDVRKMFEPFGTIDECTVLRGPDGTSKGCAFVKFQTHAEAQAAINTLHSSRTLPGASSSLVVKFADTEKERGLRRMQQVATQLGMFSPIALQFGAYSAYTQALMQQQAALVAAHSAYLSPMATMAAVQMQHMAAINANGLIATPITPSSAQSPAAPVDPLQQAYAGMQHYTAAYPAAYSLVAPAFPQPPALVAQQPPPPPQQQQQQQQQQQQQQQREGPDGCNIFIYHLPQEFTDSEILQMFVPFGHVISAKVFVDRATNQSKCFGFVSFDNPASAQAAIQAMNGFQIGMKRLKVQLKRPKDANRPY

SEQ ID NO: 13873 - protein, 234 aa, Homo sapiens
MEPSKTFMRNLPITPGYSGFVPFLSCQGMSKEDDMNHCVKTFQEKTQRYKEQLRELCCAVATAPKLKPVNSEETVLQALHQYNLQYHPLILECKYVKKPLQEPPIPGWAGYLPRAKVTEFGCGTRYTVMAKNCYKDFLEITERAKKAHLKPYEEIYGVSSTKTSAPSPKVLQHEELLPKYPDFSIPDGSCPALGRPLREDPKTPLTCGCAQRPSIPCSGKMYLEPLSSAKYAEG

SEQ ID NO: 13874 - protein, 154 aa, Homo sapiens
MEPSKTFMRNLPITPGYSGFVPFLSCQGMSKEDDMNHCVKTFQEKTQRYKEQLRELCCAVATAPKLKPVNSEETVLQALHQYNLQYHPLILECKYVKKPLQEPPIPGWAGYLPRAKVTEFGCGTRYTVMAKNCYKDFLEITERAKKAHLKPYEE

SEQ ID NO: 13875 - protein, 110 aa, Homo sapiens
MEPSKTFMRNLPITPGYSGFVPFLSCQGMSKEDDMNHCVKTFQEKTQRYKEQLRELCCAVATAPKLKPVNSEETVLQALHQYNLQYHPLILGSSALKPFPLTPGHPCRFS

SEQ ID NO: 13876 - protein, 521 aa, Homo sapiens
MLAKGLPPRSVLVKGCQTFLSAPREGLGRLRVPTGEGAGISTRSPRPFNEIPSPGDNGWLNLYHFWRETGTHKVHLHHVQNFQKYGPIYREKLGNVESVYVIDPEDVALLFKSEGPNPERFLIPPWVAYHQYYQRPIGVLLKKSAAWKKDRVALNQEVMAPEATKNFLPLLDAVSRDFVSVLHRRIKKAGSGNYSGDISDDLFRFAFESITNVIFGERQGMLEEVVNPEAQRFIDAIYQMFHTSVPMLNLPPDLFRLFRTKTWKDHVAAWDVIFSKADIYTQNFYWELRQKGSVHHDYRGILYRLLGDSKMSFEDIKANVTEMLAGGVDTTSMTLQWHLYEMARNLKVQDMLRAEVLAARHQAQGDMATMLQLVPLLKASIKETLRLHPISVTLQRYLVNDLVLRDYMIPAKTLVQVAIYALGREPTFFFDPENFDPTRWLSKDKNITYFRNLGFGWGVRQCLGRRIAELEMTIFLINMLENFRVEIQHLSDVGTTFNLILMPEKPISFTFWPFNQEATQQ

SEQ ID NO: 13877 - protein, 363 aa, Homo sapiens
MAPEATKNFLPLLDAVSRDFVSVLHRRIKKAGSGNYSGDISDDLFRFAFESITNVIFGERQGMLEEVVNPEAQRFIDAIYQMFHTSVPMLNLPPDLFRLFRTKTWKDHVAAWDVIFSKADIYTQNFYWELRQKGSVHHDYRGILYRLLGDSKMSFEDIKANVTEMLAGGVDTTSMTLQWHLYEMARNLKVQDMLRAEVLAARHQAQGDMATMLQLVPLLKASIKETLRLHPISVTLQRYLVNDLVLRDYMIPAKTLVQVAIYALGREPTFFFDPENFDPTRWLSKDKNITYFRNLGFGWGVRQCLGRRIAELEMTIFLINMLENFRVEIQHLSDVGTTFNLILMPEKPISFTFWPFNQEATQQ

SEQ ID NO: 13878 - protein, 520 aa, Homo sapiens
MSQLSLSWLGLWPVAASPWLLLLLVGASWLLAHVLAWTYAFYDNCRRLRCFPQPPRRNWFWGHQGMVNPTEEGMRVLTQLVATYPQGFKVWMGPISPLLSLCHPDIIRSVINASAAIAPKDKFFYSFLEPWLGDGLLLSAGDKWSRHRRMLTPAFHFNILKPYMKIFNESVNIMHAKWQLLASEGSACLDMFEHISLMTLDSLQKCVFSFDSHCQEKPSEYIAAILELSALVSKRHHEILLHIDFLYYLTPDGQRFRRACRLVHDFTDAVIQERRRTLPSQGVDDFLQAKAKSKTLDFIDVLLLSKDEDGKKLSDEDIRAEADTFMFEGHDTTASGLSWVLYHLAKHPEYQERCRQEVQELLKDREPKEIEWDDLAHLPFLTMCMKESLRLHPPVPVISRHVTQDIVLPDGRVIPKGIICLISVFGTHHNPAVWPDPEVYDPFRFDPENIKERSPLAFIPFSAGPRNCIGQTFAMAEMKVVLALTLLRFRVLPDHTEPRRKPELVLRAEGGLWLRVEPLS

SEQ ID NO: 13879 - protein, 190 aa, Homo sapiens
MLTPAFHFNILKPYMKIFNESVNIMHAKWQLLASEGSACLDMFEHISLMTLDSLQKCVFSFDSHCQEKPSEYIAAILELSALVSKRHHEILLHIDFLYYLTPDGQRFRRACRLVHDFTDAVIQERRRTLPSQGVDDFLQAKAKSKTLDFIDVLLLSKAMTPRPVVSPGSCTTLQSTQNTRSAAGRRCKNF

SEQ ID NO: 13880 - protein, 239 aa, Homo sapiens
MPLGHIMRLDLEKIALEYIVPCLHEVGFCYLDNFLGEVVGDCVLERVKQLHCTGALRDGQLAGPRAGVSKRHLRGDQITWIGGNEEGCEAISFLLSLIDRLVLYCGSRLGKYYVKERSKAMVACYPGNGTGYVRHVDNPNGDGRCITCIYYLNKNWDAKLHGGILRIFPEGKSFIADVEPIFDRLLFFWSDRRNPHEVQPSYATRYAMTVWYFDAEERAEAKKKFRNLTRKTESALTED

SEQ ID NO: 13881 - protein, 557 aa, Homo sapiens
MSDPEMGWVPEPPTMTLGASRVELRVSCHGLLDRDTLTKPHPCVLLKLYSDEQWVEVERTEVLRSCSSPVFSRVLALEYFFEEKQPLQFHVFDAEDGATSPRNDTFLGSTECTLGQIVSQTKVTKPLLLKNGKTAGKSTITIVAEEVSGTNDYVQLTFRAYKLDNKDLFSKSDPFMEIYKTNEDQSDQLVWRTEVVKNNLNPSWEPFRLSLHSLCSCDVHRPLKFLVYDYDSSGKHDFIGEFTSTFQEMQEGTANPGQEMQWDCINPKYRDKKKNYKSSGTVVLAQCTVEKVHTFLDYIMGGCQISFTVAIDFTASNGDPRSSQSLHCLSPRQPNHYLQALRAVGGICQDYDSDKRFPAFGFGARIPPNFEVSHDFAINFDPENPECEEISGVIASYRRCLPQIQLYGPTNVAPIINRVAEPAQREQSTGQATKYSVLLVLTDGVVSDMAETRTAIVRASRLPMSIIIVGVGNADFSDMRLLDGDDGPLRCPRGVPAARDIVQFVPFRDFKDAAPSALAKCVLAEVPRQVVEYYASQGISPGAPRPCTLATTPSPSP

SEQ ID NO: 13882 - protein, 612 aa, Homo sapiens
MAFKEHGKITSCCIPGPINSSRAGAGAGASGWSSKGVRARAREPERGAPDREPSDMSDPEMGWVPEPPTMTLGASRVELRVSCHGLLDRDTLTKPHPCVLLKLYSDEQWVEVERTEVLRSCSSPVFSRVLALEYFFEEKQPLQFHVFDAEDGATSPRNDTFLGSTECTLGQIVSQTKVTKPLLLKNGKTAGKSTITIVAEEVSGTNDYVQLTFRAYKLDNKDLFSKSDPFMEIYKTNEDQSDQLVWRTEVVKNNLNPSWEPFRLSLHSLCSCDVHRPLKFLVYDYDSSGKHDFIGEFTSTFQEMQEGTANPGQEMQWDCINPKYRDKKKNYKSSGTVVLAQCTVEKVHTFLDYIMGGCQISFTVAIDFTASNGDPRSSQSLHCLSPRQPNHYLQALRAVGGICQDYDSDKRFPAFGFGARIPPNFEVSHDFAINFDPENPECEEISGVIASYRRCLPQIQLYGPTNVAPIINRVAEPAQREQSTGQATKYSVLLVLTDGVVSDMAETRTAIVRASRLPMSIIIVGVGNADFSDMRLLDGDDGPLRCPRGVPAARDIVQFVPFRDFKDAAPSALAKCVLAEVPRQVVEYYASQGISPGAPRPCTLATTPSPSP

SEQ ID NO: 13883 - protein, 1140 aa, Homo sapiens
MTTAVERKYINIRKRLDQLGYRQTLTVECLPLVEKLFSDLVHTTESLRQSKLSAVKAEKESANFDFVLEPYKLENARLSRENNELYLELMKLREHSDQHVKELKTSLKKCARETADLKFLNNQYAHKLKLLEKESKAKNERIQQLQEKNLHAVVQTPGGKKRSIAFRRQRMQIDEPVPPSEVSSYPVPQPDDPYIADLLQVADNRIQELQQEVHQLQEKLAMMESGVRDYSKQIELREREIERLSVALDGGRSPDVLSLESRNKTNEKLIAHLNIQVDFLQQANKDLEKRIRELMETKETVTSEVVNLSNKNEKLCQELTEIDQLAQQLERHKEEVLETADKELGEAKKEIKRKLSEMQDLEETMAKLQLELNLCQKEKERLSDELLVKSDLETVVHQLEQEKQRLSKKVESFAVTERQLTLEVERMRLEHGIKRRDRSPSRLDTFLKGIEEERDYYKKELERLQHIIQRRSCSTSYSAREKSSIFRTPEKGDYNSEIHQITRERDELQRMLERFEKYMEDIQSNVKLLTAERDKLSVLYNEAQEELSALRKESTQTTAPHNIVSLMEKEKELALSDLRRIMAEKEALREKLEHIEEVSLFGKSELEKTIEHLTCVNHQLESEKYELKSKVLIMKETIESLENKLKVQAQKFSHVAGDSSHQKTEVNSLRIVNEQLQRSVDDYQHRLSIKRGELESAQAQIKILEEKIDELNLKMTSQDEEAHVMKKTIGVIDKEKDFLQETVDEKTEKIANLQENLANKEKAVAQMKIMISECESSVNQLKETLVNRDREINSLRRQLDAAHKELDEVGRSREIAFKENRRLQDDLATMARENQEISLELEAAVQEKEEMKSRVHKYITEVSRWESLMAAKEKENQDLLDRFQMLHNRAEDWEVKAHQAEGESSSVRLELLSIDTERRHLRERVELLEKEIQEHINAHHAYESQISSMAKAMSRLEEELRHQEDEKATVLNDLSSLRELCIKLDSGKDIMTQQLNSKNLEFERVVVELENVKSESDLLKKQLSNERHTVKNLESLLATNRDKEFHSHLTSHEKDTEIQLLKEKLTLSESKLTSQSRENTMLRAKVAQLQTDYDALKRQISTERYERERAIQEMRRHGLATPPLSSTLRSPSHSPEHRNV

SEQ ID NO: 13884 - protein, 249 aa, Homo sapiens
MTTAVERKYINIRKRLDQLGYRQTLTVECLPLVEKLFSDLVHTTESLRQSKLSAVKAEKESANFDFVLEPYKLENARLSRENNELYLELMKLREHSDQHVKELKTSLKKCARETADLKFLNNQYAHKLKLLEKESKAKNERIQQLQEKNLHAVVQTPGGKKRSIAFRRQRMQIDEPVPPSEVSSYPVPQPDDPYIADLLQVADNRIQELQQEVHQLQEKLAMMESGVRDYSKQVGFLFTCIVGIEIGML

SEQ ID NO: 13885 - protein, 545 aa, Homo sapiens
MLPGAWLLWTSLLLLARPAQPCPMGCDCFVQEVFCSDEELATVPLDIPPYTKNIIFVETSFTTLETRAFGSNPNLTKVVFLNTQLCQFRPDAFGGLPRLEDLEVTGSSFLNLSTNIFSNLTSLGKLTLNFNMLEALPEGLFQHLAALESLHLQGNQLQALPRRLFQPLTHLKTLNLAQNLLAQLPEELFHPLTSLQTLKLSNNALSGLPQGVFGKLGSLQELFLDSNNISELPPQVFSQLFCLERLWLQRNAITHLPLSIFASLGNLTFLSLQWNMLRVLPAGLFAHTPCLVGLSLTHNQLETVAEGTFAHLSNLRSLMLSYNAITHLPAGIFRDLEELVKLYLGSNNLTALHPALFQNLSKLELLSLSKNQLTTLPEGIFDTNYNLFNLALHGNPWQCDCHLAYLFNWLQQYTDRLLNIQTYCAGPAYLKGQVVPALNEKQLVCPVTRDHLGFQVTWPDESKAGGSWDLAVQERAARSQCTYSNPEGTVVLACDQAQCRWLNVQLSPQQGSLGLQYNASQEWDLRSSCGSLRLTVSIEARAAGP

SEQ ID NO: 13886 - protein, 271 aa, Homo sapiens
MPEAPPLLLAAVLLGLVLLVVLLLLLRHWGWGLCLIGWNEFILQPIHNLLMGDTKEQRILNHVLQHAEPGNAQSVLEAIDTYCEQKEWAMNVGDKKGKIVDAVIQEHQPSVLLELGAYCGYSAVRMARLLSPGARLITIEINPDCAAITQRMVDFAGVKDKVTLVVGASQDIIPQLKKKYDVDTLDMVFLDHWKDRYLPDTLLLEECGLLRKGTVLLADNVICPGAPDFLAHVRGSSCFECTHYQSFLEYREVVDGLEKAIYKGPGSEAGP

SEQ ID NO: 13887 - protein, 221 aa, Homo sapiens
MGDTKEQRILNHVLQHAEPGNAQSVLEAIDTYCEQKEWAMNVGDKKGKIVDAVIQEHQPSVLLELGAYCGYSAVRMARLLSPGARLITIEINPDCAAITQRMVDFAGVKDKVTLVVGASQDIIPQLKKKYDVDTLDMVFLDHWKDRYLPDTLLLEECGLLRKGTVLLADNVICPGAPDFLAHVRGSSCFECTHYQSFLEYREVVDGLEKAIYKGPGSEAGP

SEQ ID NO: 13888 - protein, 256 aa, Homo sapiens
MDPTCSSECIYNLIPSDLKEPPQPPRYISIFKATVKDDMQKAKTAMKTMGPAKVEVPSPKDFLKKHSKEKTLPPKKNFDRNVPKKPAVPLKTDHPVMGIQSGKNFINTNAADIIMGVAKKPKPIYVDKRTGDKHDLEPSGLVPKYINKKDYGVTPEYICKRNEEIKKAQEDYDRYIQENLKKAAMKRLSDEEREAVLQGLKKNWEEVHKEFQSLSVFIDSIPKKIRKQRLEEEMKQLEHDIGIIEKHKIIYIANNA

SEQ ID NO: 13889 - protein, 346 aa, Homo sapiens
MARPGQRWLGKWLVAMVVWALCRLATPLAKNLEPVSWSSLNPKFLSGKGLVIYPKIGDKLDIICPRAEAGRPYEYYKLYLVRPEQAAACSTVLDPNVLVTCNRPEQEIRFTIKFQEFSPNYMGLEFKKHHDYYITSTSNGSLEGLENREGGVCRTRTMKIIMKVGQDPNAVTPEQLTTSRPSKEADNTVKMATQAPGSRGSLGDSDGKHETVNQEEKSGPGASGGSSGDPDGFFNSKVALFAAVGAGCVIFLLIIIFLTVLLLKLRKRHRKHTQQRAAALSLSTLASPKGGSGTAGTEPSDIIIPLRTTENNYCPHYEKVSGDYGHPVYIVQEMPPQSPANIYYKV

SEQ ID NO: 13890 - protein, 468 aa, Homo sapiens
MAARLVSRCGAVRAAPHSGPLVSWRRWSGASTDTVYDVVVSGGGLVGAAMACALGYDIHFHDKKILLLEAGPKKVLEKLSETYSNRVSSISPGSATLLSSFGAWDHICNMRYRAFRRMQVWDACSEALIMFDKDNLDDMGYIVENDVIMHALTKQLEAVSDRVTVLYRSKAIRYTWPCPFPMADSSPWVHITLGDGSTFQTKLLIGADGHNSGVRQAVGIQNVSWNYDQSAVVATLHLSEATENNVAWQRFLPSGPIALLPLSDTLSSLVWSTSHEHAAELVSMDEEKFVDAVNSAFWSDADHTDFIDTAGAMLQYAVSLLKPTKVSARQLPPSVARVDAKSRVLFPLGLGHAAEYVRPRVALIGDAAHRVHPLAGQGVNMGFGDISSLAHHLSTAAFNGKDLGSVSHLTGYETERQRHNTALLAATDLLKRLYSTSASPLVLLRTWGLQATNAVSPLKEQIMAFASK

SEQ ID NO: 13891 - protein, 391 aa, Homo sapiens
MIFTFMTRKSCCSKQVQRKYWRNCQKLTATGSAPFPLALQRFSVVWDACSEALIMFDKDNLDDMGYIVENDVIMHALTKQLEAVSDRVTVLYRSKAIRYTWPCPFPMADSSPWVHITLGDGSTFQTKLLIGADGHNSGVRQAVGIQNVSWNYDQSAVVATLHLSEATENNVAWQRFLPSGPIALLPLSDTLSSLVWSTSHEHAAELVSMDEEKFVDAVNSAFWSDADHTDFIDTAGAMLQYAVSLLKPTKVSARQLPPSVARVDAKSRVLFPLGLGHAAEYVRPRVALIGDAAHRVHPLAGQGVNMGFGDISSLAHHLSTAAFNGKDLGSVSHLTGYETERQRHNTALLAATDLLKRLYSTSASPLVLLRTWGLQATNAVSPLKIMAFASK

SEQ ID NO: 13892 - protein, 443 aa, Homo sapiens
MRGQGPPLSSFGVWLASRAASDPSRPRRQGYDIHFHDKKILLLEAGPKKVLEKLSETYSNRVSSISPGSATLLSSFGAWDHICNMRYRAFRRMQVWDACSEALIMFDKDNLDDMGYIVENDVIMHALTKQLEAVSDRVTVLYRSKAIRYTWPCPFPMADSSPWVHITLGDGSTFQTKLLIGADGHNSGVRQAVGIQNVSWNYDQSAVVATLHLSEATENNVAWQRFLPSGPIALLPLSDTLSSLVWSTSHEHAAELVSMDEEKFVDAVNSAFWSDADHTDFIDTAGAMLQYAVSLLKPTKVSARQLPPSVARVDAKSRVLFPLGLGHAAEYVRPRVALIGDAAHRVHPLAGQGVNMGFGDISSLAHHLSTAAFNGKDLGSVSHLTGYETERQRHNTALLAATDLLKRLYSTSASPLVLLRTWGLQATNAVSPLKEQIMAFASK

SEQ ID NO: 13893 - protein, 1714 aa, Homo sapiens
MHLRAHRTRRGKVSPTAKTKSLLHFIVLCVAGVVVHAQEQGIDILHQLGLGGKDVRHSSPATAVPSASTPLPQGVHLTESGVIFKNDAYIETPFVKILPVNLGQPFTILTGLQSHRVNNAFLFSIRNKNRLQLGVQLLPKKLVVHIRGKQPAVFNYSVHDEQWHSFAITIRNQSVSMFVECGKKYFSTETIPEVQTFDSNSVFTLGSMNNNSIHFEGIVCQLDIIPSAEASADYCRYVKQQCRQADKYQPETSIPCTTLIPTKIPEHSPPPKLFAEKVLSEDTFTEGKSIPNIIKNDSETVYKRQEHQISRSQLSSLQSGNVSAVDLTNHGIQAKEMITEEDTQTNFSLSVTTHRISEAKMNTKEKFSSLLNMSDNITQHDDRVTGLSLFKKMPSILPQIKQDTITNLKKAITANLHTNELMEMQPILNTSLHRVTNEPSVDNHLDLRKEGEFYPDATYPIENSYETELYDYYYYEDLNTMLEMEYLRGPKGDTGPPGPPGPAGIPGPSGKRGPRGIPGPHGNPGLPGLPGPKGPKGDPGFSPGQPVPGEKGDQGLSGLMGPPGMQGDKGLKGHPGLPGLPGEQGIPGFAGNIGSPGYPGRQGLAGPEGNPGPKGAQGFIGSPGEAGQLGPEGERGIPGIRGKKGFKGRQGFPGDFGDRGPAGLDGSPGLVGGTGPPGFPGLRGSVGPVGPIGPAGIPGPMGLSGNKGLPGIKGDKGEQGTAGELGEPGYPGDKGAVGLPGPPGMRGKSGPSGQTGDPGLQGPSGPPGPEGFPGDIGIPGQNGPEGPKGLLGNRGPPGPPGLKGTQGEEGPIGAFGELGPRGKPGQKGYAGEPGPEGLKGEVGDQGNIGKIGETGPVGLPGEVGMTGSIGEKGERGSPGPLGPQGEKGVMGYPGPPGVPGPIGPLGLPGHVGARGPPGSQGPKGQRGSRGPDGLLGEQGIQGAKGEKGDQGKRGPHGLIGKTGNPGERGFQGKPGLQGLPGSTGDRGLPGEPGLRGLQGDVGPPGEMGMEGPPGTEGESGLQGEPGAKGDVGTAGSVGGTGEPGLRGEPGAPGEEGLQGKDGLKGVPGGRGLPGEDGEKGEMGLPGIIGPLGRSGQTGLPGPEGIVGIPGQRGRPGKKGDKGQIGPTGEVGSRGPPGKIGKSGPKGARGTRGAVGHLGLMGPDGEPGIPGYRGHQGQPGPSGLPGPKGEKGYPGEDSTVLGPPGPRGEPGPVGDQGERGEPGAEGYKGHVGVPGLRGATGQQGPPGEPGDQGEQGLKGERGSEGNKGKKGAPGPSGKPGIPGLQGLLGPKGIQGYHGADGISGNPGKIGPPGKQGLPGIRGGPGRTGLAGAPGPPGVKGSSGLPGSPGIQGPKGEQGLPGQPGIQGKRGHRGAQGDQGPCGDPGLKGQPGEYGVQGLTGFQGFPGPKGPEGDAGIVGISGPKGPIGHRGNTGPLGREGIIGPTGRTGPRGEKGFRGETGPQGPRGQPGPPGPPGAPGPRKQMDINAAIQALIESNTALQMESYQNTEVTLIDHSEEIFKTLNYLSNLLHSIKNPLGTRDNPARICKDLLNCEQKVSDGKYWIDPNLGCPSDAIEVFCNFSAGGQTCLPPVSVTKLEFGVGKVQMNFLHLLSSEATHIITIHCLNTPRWTSTQTSGPGLPIGFKGWNGQIFKVNTLLEPKVLSDDCKIQDGSWHKATFLFHTQEPNQLPVIEVQKLPHLKTERKYYIDSSSVCFL

SEQ ID NO: 13894 - protein, 1693 aa, Homo sapiens
MHLRAHRTRRGKVSPTAKTKSLLHFIVLCVAGVVVHAQEQGIDILHQLGLGGKDVRHSSPATAVPSASTPLPQGVHLTESGVIFKNDAYIETPFVKILPVNLGQPFTILTGLQSHRVNNAFLFSIRNKNRLQLGVQLLPKKLVVHIRGKQPAVFNYSVHDEQWHSFAITIRNQSVSMFVECGKKYFSTETIPEVQTFDSNSVFTLGSMNNNSIHFEGIVCQLDIIPSAEASADYCRYVKQQCRQADKYQPETSIPCTTLIPTKIPEHSPPPKLFAEKVLSEDTFTEGKSIPNIIKNDSETVYKRQEHQISRSQLSSLQSGNVSAVDLTNHGIQAKEMITEEDTQTNFSLSVTTHRISEAKMNTKEKFSSLLNMSDNITQHDDRVTGLSLFKKMPSILPQIKQDTITNLKKAITANLHTNELMEMQPILNTSLHRVTNEPSVDNHLDLRKEGEFYPDATYPIENSYETELYDYYYYEDLNTMLEMEYLRGPKGDTGPPGPPGPAGIPGPSGKRGPRGIPGPHGNPGLPGLPGPKGPKGDPGFSPGQPVPGEKGDQGLSGLMGPPGMQGDKGLKGHPGLPGLPGEQGIPGFAGNIGSPGYPGRQGLAGPEGNPGPKGAQGFIGSPGEAGQLGPEGERGIPGIRGKKGFKGRQGFPGDFGDRGPAGLDGSPGLVGGTGPPGFPGLRGSVGPVGPIGPAGIPGPMGLSGNKGLPGIKGDKGEQGTAGELGEPGYPGDKGAVGLPGPPGMRGKSGPSGQTGDPGLQGPSGPPGPEGFPGDIGIPGQNGPEGPKGLLGNRGPPGPPGLKGTQGEEGPIGAFGELGPRGKPGQKGYAGEPGPEGLKGEVGDQGNIGKIGETGPVGLPGEVGMTGSIGEKGERGSPGPLGPQGEKGVMGYPGPPGVPGPIGPLGLPGHVGARGPPGSQGPKGQRGSRGPDGLLGEQGIQGAKGEKGDQGKRGPHGLIGKTGNPGERGFQGKPGLQGLPGSTGDRGLPGEPGLRGLQGDVGPPGEMGMEGPPGTEGESGLQGEPGAKGDVGTAGSVGGTGEPGLRGEPGAPGEEGLQGKDGLKGVPGGRGLPGEDGEKGEMGLPGIIGPLGRSGQTGLPGPEGIVGIPGQRGRPGKKGDKGQIGPTGEVGSRGPPGKIGKSGPKGARGTRGAVGHLGLMGPDGEPGIPGYRGHQGQPGPSGLPGPKGEKGYPGEDSTVLGPPGPRGEPGPVGDQGERGEPGAEGYKGHVGVPGLRGATGQQGPPGEPGDQGEQGLKGERGSEGNKGKKGAPGPSGKPGIPGLQGLLGPKGIQGYHGADGISGNPGKIGPPGKQGLPGIRGGPGRTGLAGAPGPPGVKGSSGLPGSPGIQGPKGEQGLPGQPGIQGKRGHRGAQGDQGPCGDPGLKGQPGEYGVQGLTGFQGFPGPKGPEGDAGIVGISGPKGPIGHRGNTGPLGREGIIGPTGRTGPRGEKGFRGETKQMDINAAIQALIESNTALQMESYQNTEVTLIDHSEEIFKTLNYLSNLLHSIKNPLGTRDNPARICKDLLNCEQKVSDGKYWIDPNLGCPSDAIEVFCNFSAGGQTCLPPVSVTKLEFGVGKVQMNFLHLLSSEATHIITIHCLNTPRWTSTQTSGPGLPIGFKGWNGQIFKVNTLLEPKVLSDDCKIQDGSWHKATFLFHTQEPNQLPVIEVQKLPHLKTERKYYIDSSSVCFL

SEQ ID NO: 13895 - protein, 249 aa, Homo sapiens
MEIKHLLFLVAAACLLPMLSMKKKSARDQFNKLVTDLPNVQEEIVNIHNALRRRVVPPASNMLKMSWSEEAAQNARIFSKYCDMTESNPLERRLPNTFCGENMHMTSYPVSWSSVIGVWYSESTSFKHGEWTTTDDDITTDHYTQIVWATSYLIGCAIASCRQQGSPRYLYVCHYCHEGNDPETKNEPYKTGVPCEACPSNCEDKLCTNPCIYYDEYFDCDIQVHYLGCNHSTTILFCKATCLCDTEIK

SEQ ID NO: 13896 - protein, 178 aa, Homo sapiens
MEIKHLLFLVAAACLLPMLSMKKKSARDQFNKLVTDLPNVQEEIVNIHNALRRRVVPPASNMLKMSWSEEAAQNARIFSKYCDMTESNPLERRLPNTFCGENMHMTSYPVSWSSVIGVWYSESTSFKHGEWTTTDDDITTDHYTQIVWATSYLIGCAIASCRQQGSPRYLYVCHYCHD

SEQ ID NO: 13897 - protein, 327 aa, Homo sapiens
MTMESGAENQQSGDAAVTEAENQQMTVQAQPQIATLAQVSMPAAHATSSAPTVTLVQLPNGQTVQVHGVIQAAQPSVIQSPQVQTVQISTIAESEDSQESVDSVTDSQKRREILSRRPSYRKILNDLSSDAPGVPRIEEEKSEEETSAPAITTVTVPTPIYQTSSGQYIAITQGGAIQLANNGTDGVQGLQTLTMTNAAATQPGTTILQYAQTTDGQQILVPSNQVVVQAASGDVQTYQIRTAPTSTIAPGVVMASSPALPTQPAEEAARKREVRLMKNREAARECRRKKKEYVKCLENRVAVLENQNKTLIEELKALKDLYCHKSD

SEQ ID NO: 13898 - protein, 341 aa, Homo sapiens
MTMESGAENQQSGDAAVTEAENQQMTVQAQPQIATLAQVSMPAAHATSSAPTVTLVQLPNGQTVQVHGVIQAAQPSVIQSPQVQTVQSSCKDLKRLFSGTQISTIAESEDSQESVDSVTDSQKRREILSRRPSYRKILNDLSSDAPGVPRIEEEKSEEETSAPAITTVTVPTPIYQTSSGQYIAITQGGAIQLANNGTDGVQGLQTLTMTNAAATQPGTTILQYAQTTDGQQILVPSNQVVVQAASGDVQTYQIRTAPTSTIAPGVVMASSPALPTQPAEEAARKREVRLMKNREAARECRRKKKEYVKCLENRVAVLENQNKTLIEELKALKDLYCHKSD

SEQ ID NO: 13899 - protein, 230 aa, Homo sapiens
MTMESGAENQQSGDAAVTEAENQQMTVQAQPQIATLAQVSMPAAHATSSAPTVTLVQLPNGQTVQVHGVIQAAQPSVIQSPQVQTVQSSCKDLKRLFSGTQISTIAESEDSQESVDSVTDSQKRREILSRRPSYRKILNDLSSDAPGVPRIEEEKSEEETSALPTQPAEEAARKREVRLMKNREAARECRRKKKEYVKCLENRVAVLENQNKTLIEELKALKDLYCHKSD

SEQ ID NO: 13900 - protein, 639 aa, Homo sapiens
MPQPSVSGMDPPFGDAFRSHTFSEQTLMSTDLLANSSDPDFMYELDREMNYQQNPRDNFLSLEDCKDIENLESFTDVLDNEGALTSNWEQWDTYCEDLTKYTKLTSCDIWGTKEVDYLGLDDFSSPYQDEEVISKTPTLAQLNSEDSQSVSDSLYYPDSLFSVKQNPLPSSFPGKKITSRAAAPVCSSKTLQAEVPLSDCVQKASKPTSSTQIMVKTNMYHNEKVNFHVECKDYVKKAKVKINPVQQSRPLLSQIHTDAAKENTCYCGAVAKRQEKKGMEPLQGHATPALPFKETQELLLSPLPQEGPGSLAAGESSSLSASTSVSDSSQKKEEHNYSLFVSDNLGEQPTKCSPEEDEEDEEDVDDEDHDEGFGSEHELSENEEEEEEEEDYEDDKDDDISDTFSEPGYENDSVEDLKEVTSISSRKRGKRRYFWEYSEQLTPSQQERMLRPSEWNRDTLPSNMYQKNGLHHGKYAVKKSRRTDVEDLTPNPKKLLQIGNELRKLNKVISDLTPVSELPLTARPRSRKEKNKLASRACRLKKKAQYEANKVKLWGLNTEYDNLLFVINSIKQEIVNRVQNPRDERGPNMGQKLEILIKDTLGLPVAGQTSEFVNQVLEKTAEGNPTGGLVGLRIPTSKV

SEQ ID NO: 13901 - protein, 417 aa, Homo sapiens
MPQPSVSGMDPPFGDAFRSHTFSEQTLMSTDLLANSSDPDFMYELDREMNYQQNPRDNFLSLEDCKDIENLESFTDVLDNEGALTSNWEQWDTYCEDLTKYTKLTSCDIWGTKEVDYLGLDDFSSPYQDEEVISKTPTLAQLNSEDSQSVSDSLYYPDSLFSVKQNPLPSSFPGKKITSRAAAPVCSSKTLQAEVPLSDCVQKASKPTSSTQIMVKTNMYHNEKVNFHVECKDYVKKAKVKINPVQQSRPLLSQIHTDAAKENTCYCGAVAKRQEKKGMEPLQGHATPALPFKETQELLLSPLPQEGPGSLAAGESSSLSASTSVSDSSQKKEEHNYSLFVSDNLGEQPTKCSPEEDEEDEEDVDDEDHDEGFGSEHELSENEEEEEEEEDYEDDKDDDISDTFSEPGIIMLASLPD

SEQ ID NO: 13902 - protein, 641 aa, Homo sapiens
MPQPSVSGMDPPFGDAFRSHTFSEQTLMSTDLLANSSDPDFMYELDREMNYQQNPRDNFLSLEDCKDIENLESFTDVLDNEGALTSNWEQWDTYCEDLTKYTKLTSCDIWGTKEVDYLGLDDFSSPYQDEEVISKTPTLAQLNSEDSQSVSDSLYYPDSLFSVKQNPLPSSFPGKKITSRAAAPVCSSKTLQAEVPLSDCVQKASKPTSSTQIMVKTNMYHNEKVNFHVECKDYVKKAKVKINPVQQSRPLLSQIHTDAAKENTCYCGAVAKRQEKKGMEPLQGHATPALPFKETQELLLSPLPQEGPGSLAAGESSSLSASTSVSDSSQKKEEHNYSLFVSDNLGEQPTKCSPEEDEEDEEDVDDEDHDEGFGSEHELSENEEEEEEEEDYEDDKDDDISDTFSEPGYENDSVEDLKEVTSISSRKRGKRRYFWEYSEQLTPSQQERMLRPSEWNRDTLPSNMYQKNGLHHGKGKYAVKKSRRTDVEDLTPNPKKLLQIGNELRKLNKVISDLTPVSELPLTARPRSRKEKNKLASRACRLKKKAQYEANKVKLWGLNTEYDNLLFVINSIKQEIVNRVQNPRDERGPNMGQKLEILIKDTLGLPVAGQTSEFVNQVLEKTAEGNPTGGLVGLRIPTSKV

SEQ ID NO: 13903 - protein, 420 aa, Homo sapiens
MAPWPPKGLVPAMLWGLSLFLNLPGPIWLQPSPPPQSSPPPQPHPCHTCRGLVDSFNKGLERTIRDNFGGGNTAWEEENLSKYKDSETRLVEVLEGVCSKSDFECHRLLELSEELVESWWFHKQQEAPDLFQWLCSDSLKLCCPAGTFGPSCLPCPGGTERPCGGYGQCEGEGTRGGSGHCDCQAGYGGEACGQCGLGYFEAERNASHLVCSACFGPCARCSGPEESNCLQCKKGWALHHLKCVDIDECGTEGANCGADQFCVNTEGSYECRDCAKACLGCMGAGPGRCKKCSPGYQQVGSKCLDVDECETEVCPGENKQCENTEGGYRCICAEGYKQMEGICVKEQIPESAGFFSEMTEDELVVLQQMFFGIIICALATLAAKGDLVFTAIFIGAVAAMTGYWLSERSDRVLEGFIKGR

SEQ ID NO: 13904 - protein, 422 aa, Homo sapiens
MAPWPPKGLVPAMLWGLSLFLNLPGPIWLQPSPPPQSSPPPQPHPCHTCRGLVDSFNKGLERTIRDNFGGGNTAWEEENLSKYKDSETRLVEVLEGVCSKSDFECHRLLELSEELVESWWFHKQQEAPDLFQWLCSDSLKLCCPAGTFGPSCLPCPGGTERPCGGYGQCEGEGTRGGSGHCDCQAGYGGEACGQCGLGYFEAERNASHLVCSACFGPCARCSGPEESNCLQCKKGWALHHLKCVDIDECGTEGANCGADQFCVNTEGSYECRDCAKACLGCMGAGPGRCKKCSPGYQQVGSKCLDVDECETEVCPGENKQCENTEGGYRCICAEGYKQMEGICVKEQIPGAFPILTDLTPETTRRWKLGSHPHSTYVKMKMQRDEATFPGLYGKQVAKLGSQSRQSDRGTRLIHSQQASSQR

SEQ ID NO: 13905 - protein, 148 aa, Homo sapiens
MAESDWDTVTVLRKKGPTAAQAKSKQAILAAQRRGEDVETSKKWAAGQNKQHSITKNTAKLDRETEELHHDRVTLEVGKVIQQGRQSKGLTQKDLATKINEKPQVIADYESGRAIPNNQVLGKIERAIGLKLRGKDIGKPIEKGPRAK

SEQ ID NO: 13906 - protein, 139 aa, Homo sapiens
MAESDWDTVTVLRKKGPTAAQAKSKQAILAAQRRGEDVETSKKWAAGQNKQHSITKNTAKLDRETEELHHDRVTLEVGKVIQQGRQSKGLTQKDLATKINEKPQVIADYESGRAIPNNQVLGKIERAIGECPSTLRRVR

SEQ ID NO: 13907 - protein, 141 aa, Homo sapiens
MAESDWDTVTVLRKKGPTAAQAKSKQAILAAQRRGEDVETSKKWAAGQNKQHSITKNTAKLDRETEELHHDRVTLEVGKVIQQGRQSKGLTQKDLATKINEKPQVIADYESGRAIPNNQVLGKIERAIDVGTRSARVLRAQ

SEQ ID NO: 13908 - protein, 271 aa, Homo sapiens
MEHGSIITQARREDALVLTKQGLVSKSSPKKPRGRNIFKALFCCFRAQHVGQSSSSTELAAYKEEANTIAKSDLLQCLQYQFYQIPGTCLLPEVTEEDQGRICVVIDLDETLVHSSFKPINNADFIVPIEIEGTTHQVYVLKRPYVDEFLRRMGELFECVLFTASLAKYADPVTDLLDRCGVFRARLFRESCVFHQGCYVKDLSRLGRDLRKTLILDNSPASYIFHPENAVPVQSWFDDMADTELLNLIPIFEELSGAEDVYTSLGQLRAP

SEQ ID NO: 13909 - protein, 150 aa, Homo sapiens
MSGSMATAEASGSDGKGQEVETSVTYYRLEEVAKRNSLKELWLVIHGRVYDVTRFLNEHPGGEEVLLEQAGVDASESFEDVGHSSDAREMLKQYYIGDIHPSDLKPESGSKDPSKNDTCKSCWAYWILPIIGAVLLGFLYRYYTSESKSS

SEQ ID NO: 13910 - protein, 781 aa, Homo sapiens
MATQADLMELDMAMEPDRKAAVSHWQQQSYLDSGIHSGATTTAPSLSGKGNPEEEDVDTSQVLYEWEQGFSQSFTQEQVADIDGQYAMTRAQRVRAAMFPETLDEGMQIPSTQFDAAHPTNVQRLAEPSQMLKHAVVNLINYQDDAELATRAIPELTKLLNDEDQVVVNKAAVMVHQLSKKEASRHAIMRSPQMVSAIVRTMQNTNDVETARCTAGTLHNLSHHREGLLAIFKSGGIPALVKMLGSPVDSVLFYAITTLHNLLLHQEGAKMAVRLAGGLQKMVALLNKTNVKFLAITTDCLQILAYGNQESKLIILASGGPQALVNIMRTYTYEKLLWTTSRVLKVLSVCSSNKPAIVEAGGMQALGLHLTDPSQRLVQNCLWTLRNLSDAATKQEGMEGLLGTLVQLLGSDDINVVTCAAGILSNLTCNNYKNKMMVCQVGGIEALVRTVLRAGDREDITEPAICALRHLTSRHQEAEMAQNAVRLHYGLPVVVKLLHPPSHWPLIKATVGLIRNLALCPANHAPLREQGAIPRLVQLLVRAHQDTQRRTSMGGTQQQFVEGVRMEEIVEGCTGALHILARDVHNRIVIRGLNTIPLFVQLLYSPIENIQRVAAGVLCELAQDKEAAEAIEAEGATAPLTELLHSRNEGVATYAAAVLFRMSEDKPQDYKKRLSVELTSSLFRTEPMAWNETADLGLDIGAQGEPLGYRQDDPSYRSFHSGGYGQDALGMDPMMEHEMGGHHPGADYPVDGLPDLGHAQDLMDGLPPGDSNQLAWFDTDL

SEQ ID NO: 13911 - protein, 97 aa, Homo sapiens
MALPLRPLTRGLASAAKGGHGGAGARTWRLLTFVLALPSVALCTFNSYLHSGHRPRPEFRPYQHLRIRTKPYPWGDGNHTLFHNSHVNPLPTGYEHP

SEQ ID NO: 13912 - protein, 88 aa, Homo sapiens
MLDVEAQEPPKGKWSTPPFDPRFPSQNQIRNCYQNFLDYHRCLKTRTRRGKSTQPCEYYFRVYHSLCPISWVESWNEQIKNGIFAGKI

SEQ ID NO: 13913 - protein, 295 aa, Homo sapiens
MPVHTLSPGAPSAPALPCRLRTRVPGYLLRGPADGGARKPSAVERLEADKAKYVKSLHVANTRQEPVQPLLSKQPLFSPETRRTVLTPSRRALPGPCRRPQLDLDILSSLIDLCDSPVSPAEASRTPGRAEGAGRPPPATPPRPPPSTSAVRRVDVRPLPASPARPCPSPGPAAASSPARPPGLQRSKSDLSERFSRAAADLERFFNFCGLDPEEARGLGVAHLARASSDIVSLAGPSAGPGSSEGGCSRRSSVTVEERARERVPYGVSVVERNARVIKWLYGLRQARESPAAEG

SEQ ID NO: 13914 - protein, 283 aa, Homo sapiens
MNWTGLYTLLSGVNRHSTAIGRVWLSVIFIFRIMVLVVAAESVWGDEKSSFICNTLQPGCNSVCYDQFFPISHVRLWSLQLILVSTPALLVAMHVAHQQHIEKKMLRLEGHGDPLHLEEVKRHKVHISGTLWWTYVISVVFRLLFEAVFMYVFYLLYPGYAMVRLVKCDVYPCPNTVDCFVSRPTEKTVFTVFMLAASGICIILNVAEVVYLIIRACARRAQRRSNPPSRKGSGFGHRLSPEYKQNEINKLLSEQDGSLKDILRRSPGTGAGLAEKSDRCSAC

SEQ ID NO: 13915 - protein, 102 aa, Homo sapiens
MADFLKGLPVYNKSNFSRFHADSVCKASNRRPSVYLPTREYPSEQIIVTEKTNILLRYLHQQWDKKNAAKKRDQEQVELEGESSAPPRKVARTDSPDMHEDT

SEQ ID NO: 13916 - protein, 1078 aa, Homo sapiens
MAPRKRGGRGISFIFCCFRNNDHPEITYRLRNDSNFALQTMEPALPMPPVEELDVMFSELVDELDLTDKHREAMFALPAEKKWQIYCSKKKDQEENKGATSWPEFYIDQLNSMAARKSLLALEKEEEEERSKTIESLKTALRTKPMRFVTRFIDLDGLSCILNFLKTMDYETSESRIHTSLIGCIKALMNNSQGRAHVLAHSESINVIAQSLSTENIKTKVAVLEILGAVCLVPGGHKKVLQAMLHYQKYASERTRFQTLINDLDKSTGRYRDEVSLKTAIMSFINAVLSQGAGVESLDFRLHLRYEFLMLGIQPVIDKLREHENSTLDRHLDFFEMLRNEDELEFAKRFELVHIDTKSATQMFELTRKRLTHSEAYPHFMSILHHCLQMPYKRSGNTVQYWLLLDRIIQQIVIQNDKGQDPDSTPLENFNIKNVVRMLVNENEVKQWKEQAEKMRKEHNELQQKLEKKERECDAKTQEKEEMMQTLNKMKEKLEKETTEHKQVKQQVADLTAQLHELSRRAVCASIPGGPSPGAPGGPFPSSVPGSLLPPPPPPPLPGGMLPPPPPPLPPGGPPPPPGPPPLGAIMPPPGAPMGLALKKKSIPQPTNALKSFNWSKLPENKLEGTVWTEIDDTKVFKILDLEDLERTFSAYQRQQDFFVNSNSKQKEADAIDDTLSSKLKVKELSVIDGRRAQNCNILLSRLKLSNDEIKRAILTMDEQEDLPKDMLEQLLKFVPEKSDIDLLEEHKHELDRMAKADRFLFEMSRINHYQQRLQSLYFKKKFAERVAEVKPKVEAIRSGSEEVFRSGALKQLLEVVLAFGNYMNKGQRGNAYGFKISSLNKIADTKSSIDKNITLLHYLITIVENKYPSVLNLNEELRDIPQAAKVNMTELDKEISTLRSGLKAVETELEYQKSQPPQPGDKFVSVVSQFITVASFSFSDVEDLLAEAKDLFTKAVKHFGEEAGKIQPDEFFGIFDQFLQAVSEAKQENENMRKKKEEEERRARMEAQLKEQRERERKMRKAKENSEESGEFDDLVSALRSGEVFDKDLSKLKRNRKRITNQMTDSSRERPITKLNF

SEQ ID NO: 13917 - protein, 1068 aa, Homo sapiens
MAPRKRGGRGISFIFCCFRNNDHPEITYRLRNDSNFALQTMEPALPMPPVEELDVMFSELVDELDLTDKHREAMFALPAEKKWQIYCSKKKDQEENKGATSWPEFYIDQLNSMAARKSLLALEKEEEEERSKTIESLKTALRTKPMRFVTRFIDLDGLSCILNFLKTMDYETSESRIHTSLIGCIKALMNNSQGRAHVLAHSESINVIAQSLSTENIKTKVAVLEILGAVCLVPGGHKKVLQAMLHYQKYASERTRFQTLINDLDKSTGRYRDEVSLKTAIMSFINAVLSQGAGVESLDFRLHLRYEFLMLGIQPVIDKLREHENSTLDRHLDFFEMLRNEDELEFAKRFELVHIDTKSATQMFELTRKRLTHSEAYPHFMSILHHCLQMPYKRSGNTVQYWLLLDRIIQQIVIQNDKGQDPDSTPLENFNIKNVVRMLVNENEVKQWKEQAEKMRKEHNELQQKLEKKERECDAKTQEKEEMMQTLNKMKEKLEKETTEHKQVKQQVADLTAQLHELSRRAVCASIPGGPSPGAPGGPFPSSVPGSLLPPPPPPPLPGGMLPPPPPPLPPGGPPPPPGPPPLGAIMPPPGAPMGLALKKKSIPQPTNALKSFNWSKLPENKLEGTVWTEIDDTKVFKILDLEDLERTFSAYQRQQKEADAIDDTLSSKLKVKELSVIDGRRAQNCNILLSRLKLSNDEIKRAILTMDEQEDLPKDMLEQLLKFVPEKSDIDLLEEHKHELDRMAKADRFLFEMSRINHYQQRLQSLYFKKKFAERVAEVKPKVEAIRSGSEEVFRSGALKQLLEVVLAFGNYMNKGQRGNAYGFKISSLNKIADTKSSIDKNITLLHYLITIVENKYPSVLNLNEELRDIPQAAKVNMTELDKEISTLRSGLKAVETELEYQKSQPPQPGDKFVSVVSQFITVASFSFSDVEDLLAEAKDLFTKAVKHFGEEAGKIQPDEFFGIFDQFLQAVSEAKQENENMRKKKEEEERRARMEAQLKEQRERERKMRKAKENSEESGEFDDLVSALRSGEVFDKDLSKLKRNRKRITNQMTDSSRERPITKLNF

SEQ ID NO: 13918 - protein, 882 aa, Homo sapiens
MAPRKRGGRGISFIFCCFRNNDHPEITYRLRNDSNFALQTMEPALPMPPVEELDVMFSELVDELDLTDKHREAMFALPAEKKWQIYCSKKKDQEENKGATSWPEFYIDQLNSMAARKSLLALEKEEEEERSKTIESLKTALRTKPMRFVTRFIDLDGLSCILNFLKTMDYETSESRIHTSLIGCIKALMNNSQGRAHVLAHSESINVIAQSLSTENIKTKVAVLEILGAVCLVPGGHKKVLQAMLHYQKYASERTRFQTLINDLDKSTGRYRDEVSLKTAIMSFINAVLSQGAGVESLDFRLHLRYEFLMLGIQPVIDKLREHENSTLDRHLDFFEMLRNEDELEFAKRFELVHIDTKSATQMFELTRKRLTHSEAYPHFMSILHHCLQMPYKRSGNTVQYWLLLDRIIQQIVIQNDKGQDPDSTPLENFNIKNVVRMLVNENEVKQWKEQAEKMRKEHNELQQKLEKKERECDAKTQEKEEMMQTLNKMKEKLEKETTEHKQVKQQVADLTAQLHELSRRAVCASIPGGPSPGAPGGPFPSSVPGSLLPPPPPPPLPGGMLPPPPPPLPPGGPPPPPGPPPLGAIMPPPGAPMGLALKKKSIPQPTNALKSFNWSKLPENKLEGTVWTEIDDTKVFKILDLEDLERTFSAYQRQQDFFVNSNSKQKEADAIDDTLSSKLKVKELSVIDGRRAQNCNILLSRLKLSNDEIKRAILTMDEQEDLPKDMLEQLLKFVPEKSDIDLLEEHKHELDRMAKADRFLFEMSRINHYQQRLQSLYFKKKFAERVAFGNYMNKGQRGNAYGFKISSLNKIADTKSSIDKNITLLHYLITIVENKYPSVLNLNEELRDIPQAAKVKSWNIRSLSPHSPEISLCLLSASSSQ

SEQ ID NO: 13919 - protein, 163 aa, Homo sapiens
MHSLPRSGSIRRTHSDTQATGWPPPQRIGDSPGPSPAFLSCPPSLCGGAAQTGDPVALPHGPEKWVWGGGLSPRNPHSWGIKAHGLRPPWAPRLERCMVPESEWAPWQPQLPCEPKWLGSRKSKPHRESGLRGGGPSRCAKRGTHSCGPRESGGPDTCHLPCH

SEQ ID NO: 13920 - protein, 79 aa, Homo sapiens
MKLHSLISVLLLFVTLIPKGKTGVIPGQKQCIALKGVCRDKLCSTLDDTIGICNEGKKCCRRWWILEPYPTPVPKGKSP

SEQ ID NO: 13921 - protein, 447 aa, Homo sapiens
MPDIIWVFPPQAEAEEDCHSDTVRADDDEENESPAETDLQAQLQMFRAQWMFELAPGVSSSNLENRPCRAARGSLQKTSADTKGKQEQAKEEKARELFLKAVEEEQNGALYEAIKFYRRAMQLVPDIEFKITYTRSPDGDGVGNSYIEDNDDDSKMADLLSYFQQQLTFQESVLKLCQPELESSQIHISVLPMEVLMYIFRWVVSSDLDLRSLEQLSLVCRGFYICARDPEIWRLACLKVWGRSCIKLVPYTSWREMFLERPRVRFDGVYISKTTYIRQGEQSLDGFYRAWHQVEYYRYIRFFPDGHVMMLTTPEEPQSIVPRLRTRNTRTDAILLGHYRLSQDTDNQTKVFAVITKKKEEKPLDYKYRYFRRVPVQEADQSFHVGLQLCSSGHQRFNKLIWIHHSCHITYKSTGETAVSAFEIDKMYTPLFFARVRSYTAFSERPL

SEQ ID NO: 13922 - protein, 437 aa, Homo sapiens
MAEAEEDCHSDTVRADDDEENESPAETDLQAQLQMFRAQWMFELAPGVSSSNLENRPCRAARGSLQKTSADTKGKQEQAKEEKARELFLKAVEEEQNGALYEAIKFYRRAMQLVPDIEFKITYTRSPDGDGVGNSYIEDNDDDSKMADLLSYFQQQLTFQESVLKLCQPELESSQIHISVLPMEVLMYIFRWVVSSDLDLRSLEQLSLVCRGFYICARDPEIWRLACLKVWGRSCIKLVPYTSWREMFLERPRVRFDGVYISKTTYIRQGEQSLDGFYRAWHQVEYYRYIRFFPDGHVMMLTTPEEPQSIVPRLRTRNTRTDAILLGHYRLSQDTDNQTKVFAVITKKKEEKPLDYKYRYFRRVPVQEADQSFHVGLQLCSSGHQRFNKLIWIHHSCHITYKSTGETAVSAFEIDKMYTPLFFARVRSYTAFSERPL

SEQ ID NO: 13923 - protein, 403 aa, Homo sapiens
MFRAQWMFELAPGVSSSNLENRPCRAARGSLQKTSADTKGKQEQAKEEKARELFLKAVEEEQNGALYEAIKFYRRAMQLVPDIEFKITYTRSPDGDGVGNSYIEDNDDDSKMADLLSYFQQQLTFQESVLKLCQPELESSQIHISVLPMEVLMYIFRWVVSSDLDLRSLEQLSLVCRGFYICARDPEIWRLACLKVWGRSCIKLVPYTSWREMFLERPRVRFDGVYISKTTYIRQGEQSLDGFYRAWHQVEYYRYIRFFPDGHVMMLTTPEEPQSIVPRLRTRNTRTDAILLGHYRLSQDTDNQTKVFAVITKKKEEKPLDYKYRYFRRVPVQEADQSFHVGLQLCSSGHQRFNKLIWIHHSCHITYKSTGETAVSAFEIDKMYTPLFFARVRSYTAFSERPL

SEQ ID NO: 13924 - protein, 551 aa, Homo sapiens
MSGGEQKPERYYVGVDVGTGSVRAALVDQSGVLLAFADQPIKNWEPQFNHHEQSSEDIWAACCVVTKKVVQGIDLNQIRGLGFDATCSLVVLDKQFHPLPVNQEGDSHRNVIMWLDHRAVSQVNRINETKHSVLQYVGGVMSVEMQAPKLLWLKENLREICWDKAGHFFDLPDFLSWKATGVTARSLCSLVCKWTYSAEKGWDDSFWKMIGLEDFVADNYSKIGNQVLPPGASLGNGLTPEAARDLGLLPGIAVAASLIDAHAGGLGVIGADVRGHGLICEGQPVTSRLAVICGTSSCHMGISKDPIFVPGVWGPYFSAMVPGFWLNEGGQSVTGKLIDHMVQGHAAFPELQVKATARCQSIYAYLNSHLDLIKKAQPVGFLTVDLHVWPDFHGNRSPLADLTLKGMVTGLKLSQDLDDLAILYLATVQAIALGTRFIIEAMEAAGHSISTLFLCGGLSKNPLFVQMHADITGMPVVLSQEVESVLVGAAVLGACASGDFASVQEAMAKMSKVGKVVFPRLQDKKYYDKKYQVFLKLVEHQKEYLAIMNDD

SEQ ID NO: 13925 - protein, 246 aa, Homo sapiens
MWLDHRAVSQVNRINETKHSVLQYVGGVMSVEMQAPKLLWLKENLREICWDKAGHFFDLPDFLSWKATGVTARSLCSLVCKWTYSAEKGWDDSFWKMIGLEDFVADNYSKIGNQVLPPGASLGNGLTPEAARDLGLLPGIAVAASLIDAHAGGLGVIGADVRGHGLICEGQPVTSRLAVICGTSSCHMGISKDPIFVPGVWGPYFSAMVPGFWLNEGGQSVTGKLIDHMVQGHAAFPELQVKATAR

SEQ ID NO: 13926 - protein, 439 aa, Homo sapiens
MWLDHRAVSQVNRINETKHSVLQYVGGVMSVEMQAPKLLWLKENLREICWDKAGHFFDLPDFLSWKATGVTARSLCSLVCKWTYSAEKGWDDSFWKMIGLEDFVADNYSKIGNQVLPPGASLGNGLTPEAARDLGLLPGIAVAASLIDAHAGGLGVIGADVRGHGLICEGQPVTSRLAVICGTSSCHMGISKDPIFVPGVWGPYFSAMVPGFWLNEGGQSVTGKLIDHMVQGHAAFPELQVKATARCQSIYAYLNSHLDLIKKAQPVGFLTVDLHVWPDFHGNRSPLADLTLKGMVTGLKLSQDLDDLAILYLATVQAIALGTRFIIEAMEAAGHSISTLFLCGGLSKNPLFVQMHADITGMPVVLSQEVESVLVGAAVLGACASGDFASVQEAMAKMSKVGKVVFPRLQDKKYYDKKYQVFLKLVEHQKEYLAIMNDD

SEQ ID NO: 13927 - protein, 575 aa, Homo sapiens
MSGGEQKPERYYVGVDVGTGSVRAALVDQSGVLLAFADQPIKNWEPQFNHHEQSSEDIWAACCVVTKKVVQGIDLNQIRGLGFDATCSLVVLDKQFHPLPVNQEGDSHRNVIMWLDHRAVSQVNRINETKHSVLQYVGGVMSVEMQAPKLLWLKENLREICWDKAGHFFDLPDFLSWKATGVTARSLCSLVCKWTYSAEKGWDDSFWKMIGLEDFVADNYSKIGNQVLPPGASLGNGLTPEAARDLGLLPGIAVAASLIDAHAGGLGVIGADVRGHGLICEGQPVTSRLAVICGTSSCHMGISKDPIFVPGVWGPYFSAMVPGFWLNEGGQSVTGKLIDHMVQGHAAFPELQVKATARCQSIYAYLNSHLDLIKKAQPVGFLTVDLHVWPDFHGNRSPLADLTLKGMRTTGYLYIPALAALHSPSSLLSPQVTGLKLSQDLDDLAILYLATVQAIALGTRFIIEAMEAAGHSISTLFLCGGLSKNPLFVQMHADITGMPVVLSQEVESVLVGAAVLGACASGDFASVQEAMAKMSKVGKVVFPRLQDKKYYDKKYQVFLKLVEHQKEYLAIMNDD

SEQ ID NO: 13928 - protein, 463 aa, Homo sapiens
MSGGEQKPERYYVGVDVGTGSVRAALVDQSGVLLAFADQPIKNWEPQFNHHEQSSEDIWAACCVVTKNLREICWDKAGHFFDLPDFLSWKATGVTARSLCSLVCKWTYSAEKGWDDSFWKMIGLEDFVADNYSKIGNQVLPPGASLGNGLTPEAARDLGLLPGIAVAASLIDAHAGGLGVIGADVRGHGLICEGQPVTSRLAVICGTSSCHMGISKDPIFVPGVWGPYFSAMVPGFWLNEGGQSVTGKLIDHMVQGHAAFPELQVKATARCQSIYAYLNSHLDLIKKAQPVGFLTVDLHVWPDFHGNRSPLADLTLKGMVTGLKLSQDLDDLAILYLATVQAIALGTRFIIEAMEAAGHSISTLFLCGGLSKNPLFVQMHADITGMPVVLSQEVESVLVGAAVLGACASGDFASVQEAMAKMSKVGKVVFPRLQDKKYYDKKYQVFLKLVEHQKEYLAIMNDD

SEQ ID NO: 13929 - protein, 252 aa, Homo sapiens
MGISKDPIFVPGVWGPYFSAMVPGFWLNEGGQSVTGKLIDHMVQGHAAFPELQVKATARCQSIYAYLNSHLDLIKKAQPVGFLTVDLHVWPDFHGNRSPLADLTLKGMVTGLKLSQDLDDLAILYLATVQAIALGTRFIIEAMEAAGHSISTLFLCGGLSKNPLFVQMHADITGMPVVLSQEVESVLVGAAVLGACASGDFASVQEAMAKMSKVGKVVFPRLQDKKYYDKKYQVFLKLVEHQKEYLAIMNDD

SEQ ID NO: 13930 - protein, 466 aa, Homo sapiens
MGWITEDLIRRNAEHNDCVIFSLEELSLHQQEIERLEHIDKWCRDLKILYLQNNLIGKIENVSKLKKLEYLNLALNNIEKIENLEGCEELAKLDLTVNFIGELSSIKNLQHNIHLKELFLMGNPCASFDHYREFVVATLPQLKWLDGKEIEPSERIKALQDYSVIEPQIREQEKDHCLKRAKLKEEAQRKHQEEDKNEDKRSNAGFDGRWYTDINATLSSLESKDHLQAPDTEEHNTKKLDNSEDDLEFWNKPCLFTPESRLETLRHMEKQRKKQEKLSEKKKKVKPPRTLITEDGKALNVNEPKIDFSLKDNEKQIILDLAVYRYMDTSLIDVDVQPTYVRVMIKGKPFQLVLPAEVKPDSSSAKRSQTTGHLVICMPKVGEVITGGQRAFKSMKTTSDRSREQTNTRSKHMEKLEVDPSKHSFPDVTNIVQEKKHTPRRRPEPKIIPSEEDPTFEDNPEVPPLI

SEQ ID NO: 13931 - protein, 414 aa, Homo sapiens
MGWITEDLIRRNAEHNDCVIFSLEELSLHQQEIERLEHIDKWCRDLKILYLQNNLIGKIENVSKLKKLEYLNLALNNIEKIENLEGCEELAKLDLTVNFIGELSSIKNLQHNIHLKELFLMGNPCASFDHYREFVVATLPQLKWLDGKEIEPSERIKALQDYSVIEPQIREQEKDHCLKRAKLKEEAQRKHQEEDKNEDKRSNAGFDGRWYTDINATLSSLESKDHLQAPDTEEHNTKKLDNSEDDLEFWNKPCLFTPESRLETLRHMEKQRKKQEKLSEKKKKVKPPRTLITEDGKALNVNEPKIDFSLKDNEKQIILDLAVYRYMDTSLIDVDVQPTYVRVMIKGKPFQLVLPAEVKPDSSSAKRSQTTGHLVICMPKVGEVITGGQRAFKSMKTTSDRSREQTNTSYSTGF

SEQ ID NO: 13932 - protein, 141 aa, Homo sapiens
MAQYLSTLLLLLATLAVALAWSPKEEDRIIPGGIYNADLNDEWVQRALHFAISEYNKATKDDYYRRPLRVLRARQQTVGGVNYFFDVEVGRTICTKSQPNLDTCAFHEQPELQKKQLCSFEIYEVPWENRRSLVKSRCQES

SEQ ID NO: 13933 - protein, 141 aa, Homo sapiens
MAWPLCTLLLLLATQAVALAWSPQEEDRIIEGGIYDADLNDERVQRALHFVISEYNKATEDEYYRRLLRVLRAREQIVGGVNYFFDIEVGRTICTKSQPNLDTCAFHEQPELQKKQLCSFQIYEVPWEDRMSLVNSRCQEA

SEQ ID NO: 13934 - protein, 600 aa, Homo sapiens
MSHQEGSTGGLPDLVTESLFSSPEEQSGVAAVTAASSDIEMAATEPSTGDGGDTRDGGFLNDASTENQNTDSESSSEDVELESMGEGLFGYPLVGEETEREEEEEEMEEEGEEEEQPRMCPRCGGTNHDQCLLDEDQALEEWISSETSALPRSRWQVLTALRQRQLGSSARFVYEACGARTFVQRFRLQYLLGSHAGSVSTIHFNQRGTRLASSGDDLRVIVWDWVRQKPVLNFESGHDINVIQAKFFPNCGDSTLAMCGHDGQVRVAELINASYCENTKRVAKHRGPAHELALEPDSPYKFLTSGEDAVVFTIDLRQDRPASKVVVTRENDKKVGLYTISMNPANIYQFAVGGHDQFVRIYDQRRIDKKENNGVLKKFTPHHLVYCDFPTNITCVVYSHDGTELLASYNDEDIYLFNSSLSDGAQYVKRYKGHRNNDTIKCVNFYGPRSEFVVSGSDCGHVFFWEKSSSQIIQFMEGDRGDIVNCLEPHPYLPVLATSGLDQHVRIWTPTAKTATELTGLKDVIKKNKQERDEDNLNYTDSFDNRMLRFFVRHLLQRAHQPGWRDHGAEFPDEEELDESSSTSDTSEEEGQDRVQCIPS

SEQ ID NO: 13935 - protein, 289 aa, Homo sapiens
MTGVFDRRVPSIRSGDFQAPFQTSAAMHHPSQESPTLPESSATDSDYYSPTGGAPHGYCSPTSASYGKALNPYQYQYHGVNGSAGSYPAKAYADYSYASSYHQYGGAYNRVPSATNQPEKEVTEPEVRMVNGKPKKVRKPRTIYSSFQLAALQRRFQKTQYLALPERAELAASLGLTQTQVKIWFQNKRSKIKKIMKNGEMPPEHSPSSSDPMACNSPQSPAVWEPQGSSRSLSHHPHAHPPTSNQSPASSYLENSASWYTSAASSINSHLPPPGSLQHPLALASGTLY

SEQ ID NO: 13936 - protein, 191 aa, Homo sapiens
MTGVFDRRVPSIRSGDFQAPFQTSAAMHHPSQESPTLPESSATDSDYYSPTGGAPHGYCSPTSASYGKALNPYQYQYHGVNGSAGSYPAKAYADYSYASSYHQYGGAYNRVPSATNQPEKEVTEPEVRMVNGKPKKVRKPRTIYSSFQLAALQRRFQKTQYLALPERAELAASLGLTQTQVNTALPCTRPA

SEQ ID NO: 13937 - protein, 175 aa, Homo sapiens
MSHSQHSPYLQSYHNSSAAAQTRGDDTDQQKTTVIENGEIRFNGKGKKIRKPRTIYSSLQLQALNHRFQQTQYLALPERAELAASLGLTQTQVKIWFQNKRSKFKKLLKQGSNPHESDPLQGSAALSPRSPALPPVWDVSASAKGVSMPPNSYMPGYSHWYSSPHQDTMQRPQMM

SEQ ID NO: 13938 - protein, 265 aa, Homo sapiens
MMTMTTMADGLEGQDSSKSAFMEFGQQQQQQHSPAMAGAHYPLHCLHSAAAAAAAGSHHHHHHQHHHHGSPYASGGGNSYNHRSLAAYPYMSHSQHSPYLQSYHNSSAAAQTRGDDTDQQKTTVIENGEIRFNGKGKKIRKPRTIYSSLQLQALNHRFQQTQYLALPERAELAASLGLTQTQVKIWFQNKRSKFKKLLKQGSNPHESDPLQGSAALSPRSPALPPVWDVSASAKGVSMPPNSYMPGYSHWYSSPHQDTMQRPQMM

SEQ ID NO: 13939 - protein, 293 aa, Homo sapiens
MMTMTTMADGLEGQDSSKSAFMEFGQQQQQQQQQQQQQQQQQQQPPPPPPPPPQPHSQQSSPAMAGAHYPLHCLHSAAAAAAAGSHHHHHHQHHHHGSPYASGGGNSYNHRSLAAYPYMSHSQHSPYLQSYHNSSAAAQTRGDDTDQQKTTVIENGEIRFNGKGKKIRKPRTIYSSLQLQALNHRFQQTQYLALPERAELAASLGLTQTQVKIWFQNKRSKFKKLLKQGSNPHESDPLQGSAALSPRSPALPPVWDVSASAKGVSMPPNSYMPGYSHWYSSPHQDTMQRPQMM

SEQ ID NO: 13940 - protein, 160 aa, Homo sapiens
MGKIALQLKATLENITNLRPVGEDFRWYLKMKCGNCGEISDKWQYIRLMDSVALKGGRGSASMVQKCKLCARENSIEILSSTIKPYNAEDNENFKTIVEFECRGLEPVDFQPQAGFAAEGVESGTAFSDINLQEKDWTDYDEKAQESVGIYEVTHQFVKC

SEQ ID NO: 13941 - protein, 328 aa, Homo sapiens
MTGVFDSLVADMHSTQIAASSTYHQHQQPPSGGGAGPGGNSSSSSSLHKPQESPTLPVSTATDSSYYTNQQHPAGGGGGGGSPYAHMGSYQYQASGLNNVPYSAKSSYDLGYTAAYTSYAPYGTSSSPANNEPEKEDLEPEIRIVNGKPKKVRKPRTIYSSFQLAALQRRFQKTQYLALPERAELAASLGLTQTQVKIWFQNRRSKFKKMWKSGEIPSEQHPGASASPPCASPPVSAPASWDFGVPQRMAGGGGPGSGGSGAGSSGSSPSSAASAFLGNYPWYHQTSGSASHLQATAPLLHPTQTPQPHHHHHHHGGGGAPVSAGTIF

SEQ ID NO: 13942 - protein, 217 aa, Homo sapiens
MTGVFDSLVADMHSTQIAASSTYHQHQQPPSGGGAGPGGNSSSSSSLHKPQESPTLPVSTATDSSYYTNQQHPAGGGGGGGSPYAHMGSYQYQASGLNNVPYSAKSSYDLGYTAAYTSYAPYGTSSSPANNEPEKEDLEPEIRIVNGKPKKVRKPRTIYSSFQLAALQRRFQKTQYLALPERAELAASLGLTQTQVGLAPCRGEESAGLRWLGSRRV

SEQ ID NO: 13943 - protein, 183 aa, Homo sapiens
MATAQPSQVRQKYDTNCDAAINSHITLELYTSYLYLSMAFYFNRDDVALENFFRYFLRLSDDKMEHAQKLMRLQNLRGGHICLHDIRKPECQGWESGLVAMESAFHLEKNVNQSLLDLYQLAVEKGDPQLCHFLESHYLHEQVKTIKELGGYVSNLRKICSPEAGLAEYLFDKLTLGGRVKET

SEQ ID NO: 13944 - protein, 2240 aa, Homo sapiens
MDDKGDPSNEEAPKAIKPTSKEFRKTWGFRRTTIAKREGAGDAEADPLEPPPPQQQLGLSLRRSGRQPKRTERVEQFLTIARRRGRRSMPVSLEDSGEPTSCPATDAETASEGSVESASETRSGPQSASTAVKERPASSEKVKGGDDHDDTSDSDSDGLTLKELQNRLRRKREQEPTERPLKGIQSRLRKKRREEGPAETVGSEASDTVEGVLPSKQEPENDQGVVSQAGKDDRESKLEGKAAQDIKDEEPGDLGRPKPECEGYDPNALYCICRQPHNNRFMICCDRCEEWFHGDCVGISEARGRLLERNGEDYICPNCTILQVQDETHSETADQQEAKWRPGDADGTDCTSIGTIEQKSSEDQGIKGRIEKAANPSGKKKLKIFQPVIEAPGASKCIGPGCCHVAQPDSVYCSNDCILKHAAATMKFLSSGKEQKPKPKEKMKMKPEKPSLPKCGAQAGIKISSVHKRPAPEKKETTVKKAVVVPARSEALGKEAACESSTPSWASDHNYNAVKPEKTAAPSPSLLYKSTKEDRRSEEKAAAMAASKKTAPPGSAVGKQPAPRNLVPKKSSFANVAAATPAIKKPPSGFKGTIPKRPWLSATPSSGASAARQAGPAPAAATAASKKFPGSAALVGAVRKPVVPSVPMASPAPGRLGAMSAAPSQPNSQIRQNIRRSLKEILWKRVNDSDDLIMTENEVGKIALHIEKEMFNLFQVTDNRYKSKYRSIMFNLKDPKNQGLFHRVLREEISLAKLVRLKPEELVSKELSTWKERPARSVMESRTKLHNESKKTAPRQEAIPDLEDSPPVSDSEEQQESARAVPEKSTAPLLDVFSSMLKDTTSQHRAHLFDLNCKICTGQVPSAEDEPAPKKQKLSASVKKEDLKSKHDSSAPDPAPDSADEVMPEAVPEVASEPGLESASHPNVDRTYFPGPPGDGHPEPSPLEDLSPCPASCGSGVVTTVTVSGRDPRTAPSSSCTAVASAASRPDSTHMVEARQDVPKPVLTSVMVPKSILAKPSSSPDPRYLSVPPSPNISTSESRSPPEGDTTLFLSRLSTIWKGFINMQSVAKFVTKAYPVSGCFDYLSEDLPDTIHIGGRIAPKTVWDYVGKLKSSVSKELCLIRFHPATEEEEVAYISLYSYFSSRGRFGVVANNNRHVKDLYLIPLSAQDPVPSKLLPFEGPGLESPRPNIILGLVICQKIKRPANSGELDKMDEKRTRLQPEEADVPAYPKVATVPQSEKKPSKYPLCSADAAVSTTPPGSPPPPPPLPEPPVLKVLSSLKPAAPSPATAATTAAAASTAASSTASSASKTASPLEHILQTLFGKKKSFDPSAREPPGSTAGLPQEPKTTAEDGVPAPPLLDPIVQQFGQFSKDKALEEEEDDRPYDPEEEYDPERAFDTQLVERGRRHEVERAPEAAAAEREEVAYDPEDETILEEAKVTVDDLPNRMCADVRRNSVERPAEPVAGAATPSLVEQQKMLEELNKQIEEQKRQLEEQEEALRQQRAAVGVSMAHFSVSDALMSPPPKSSLPKAELFQQEQQSADKPASLPPASQASNHRDPRQARRLATETGEGEGEPLSRLSARGAQGALPERDASRGGLVGQAPMPVPEEKEPASSPWASGEKPPAGSEQDGWKAEPGEGTRPATVGDSSARPARRVLLPTPPCGALQPGFPLQHDGERDPFTCPGFASQDKALGSAQYEDPRNLHSAGRSSSPAGETEGDREPQARPGEGTAPLPPPGQKVGGSQPPFQGQREPGPHALGMSGLHGPNFPGPRGPAPPFPEENIASNDGPRGPPPARFGAQKGPIPSLFSGQHGPPPYGDSRGPSPSYLGGPRGVAPSQFEERKDPHGEKREFQDAPYNEVTGAPAQFEGTEQAPFLGSRGGAPFQFGGQRRPLLSQLKGPRGGPPPSQFGGQRGPPPGHFVGPRGPHPSQFETARGPHPNQFEGPRGQAPNFMPGPRGIQPQQFEDQRVHSPPRFTNQRAPAPLQFGGLRGSAPFSEKNEQTPSRFHFQGQAPQVMKPGPRPLLELPSHPPQHRKDRWEEAGPPSALSSSAPGQGPEADGQWASADFREGKGHEYRNQTFEGRQRERFDVGPKEKPLEEPDAQGRASEDRRRERERGRNWSRERDWDRPREWDRHRDKDSSRDWDRNRERSANRDREREADRGKEWDRSRERSRNRERERDRRRDRDRSRSRERDRDKARDRERGRDRKDRSKSKESARDPKPEASRASDAGTASQA

SEQ ID NO: 13945 - protein, 1189 aa, Homo sapiens
MDDKGDPSNEEAPKAIKPTSKEFRKTWGFRRTTIAKREGAGDAEADPLEPPPPQQQLGLSLRRSGRQPKRTERVEQFLTIARRRGRRSMPVSLEDSGEPTSCPATDAETASEGSVESASETRSGPQSASTAVKERPASSEKVKGGDDHDDTSDSDSDGLTLKELQNRLRRKREQEPTERPLKGIQSRLRKKRREEGPAETVGSEASDTVEGVLPSKQEPENDQGVVSQAGKDDRESKLEGKAAQDIKDEEPGDLGRPKPECEGYDPNALYCICRQPHNNRFMICCDRCEEWFHGDCVGISEARGRLLERNGEDYICPNCTILQVQDETHSETADQQEAKWRPGDADGTDCTSIGTIEQKSSEDQGIKGRIEKAANPSGKKKLKIFQPVIEAPGASKCIGPGCCHVAQPDSVYCSNDCILKHAAATMKFLSSGKEQKPKPKEKMKMKPEKPSLPKCGAQAGIKISSVHKRPAPEKKETTVKKAVVVPARSEALGKEAACESSTPSWASDHNYNAVKPEKTAAPSPSLLYKSTKEDRRSEEKAAAMAASKKTAPPGSAVGKQPAPRNLVPKKSSFANVAAATPAIKKPPSGFKGTIPKRPWLSATPSSGASAARQAGPAPAAATAASKKFPGSAALVGAVRKPVVPSVPMASPAPGRLGAMSAAPSQPNSQIRQNIRRSLKEILWKRVNDSDDLIMTENEVGKIALHIEKEMFNLFQVTDNRYKSKYRSIMFNLKDPKNQGLFHRVLREEISLAKLVRLKPEELVSKELSTWKERPARSVMESRTKLHNESKKTAPRQEAIPDLEDSPPVSDSEEQQESARAVPEKSTAPLLDVFSSMLKDTTSQHRAHLFDLNCKICTGQVPSAEDEPAPKKQKLSASVKKEDLKSKHDSSAPDPAPDSADEVMPEAVPEVASEPGLESASHPNVDRTYFPGPPGDGHPEPSPLEDLSPCPASCGSGVVTTVTVSGRDPRTAPSSSCTAVASAASRPDSTHMVEARQDVPKPVLTSVMVPKSILAKPSSSPDPRYLSVPPSPNISTSESRSPPEGDTTLFLSRLSTIWKGFINMQSVAKFVTKAYPVSGCFDYLSEDLPDTIHIGGRIAPKTVWDYVGKLKSSVSKELCLIRFHPATEEEEVAYISLYSYFSSRGRFGVVANNNRHVKDLYLIPLSAQDPVPSKLLPFEGPGKRRLSGWR

SEQ ID NO: 13946 - protein, 544 aa, Homo sapiens
MDDKGDPSNEEAPKAIKPTSKEFRKTWGFRRTTIAKREGAGDAEADPLEPPPPQQQLGLSLRRSGRQPKRTERVEQFLTIARRRGRRSMPVSLEDSGEPTSCPATDAETASEGSVESASETRSGPQSASTAVKERPASSEKVKGGDDHDDTSDSDSDGLTLKELQNRLRRKREQEPTERPLKGIQSRLRKKRREEGPAETVGSEASDTVEGVLPSKQEPENDQGVVSQAGKDDRESKLEGKAAQDIKDEEPGDLGRPKPECEGYDPNALYCICRQPHNNRFMICCDRCEEWFHGDCVGISEARGRLLERNGEDYICPNCTILQVQDETHSETADQQEAKWRPGDADGTDCTSIGTIEQKSSEDQGIKGRIEKAANPSGKKKLKIFQPVIEAPGASKCIGPGCCHVAQPDSVYCSNDCILKHAAATMKFLSSGKEQKPKPKEKMKMKPEKPSLPKCGAQAGIKISSVHKRPAPEKKETTVKKAVVVPARSEALGKEAACESSTPSWASDHNYNAVKPEKTAAPSPSLLYKCSGKYSYSLHPSLIA

SEQ ID NO: 13947 - protein, 562 aa, Homo sapiens
MDDKGDPSNEEAPKAIKPTSKEFRKTWGFRRTTIAKREGAGDAEADPLEPPPPQQQLGLSLRRSGRQPKRTERVEQFLTIARRRGRRSMPVSLEDSGEPTSCPATDAETASEGSVESASETRSGPQSASTAVKERPASSEKVKGGDDHDDTSDSDSDGLTLKELQNRLRRKREQEPTERPLKGIQSRLRKKRREEGPAETVGSEASDTVEGVLPSKQEPENDQGVVSQAGKDDRESKLEGKAAQDIKDEEPGDLGRPKPECEGYDPNALYCICRQPHNNRFMICCDRCEEWFHGDCVGISEARGRLLERNGEDYICPNCTILQVQDETHSETADQQEAKWRPGDADGTDCTSIGTIEQKSSEDQGIKGRIEKAANPSGKKKLKIFQPVIEAPGASKCIGPGCCHVAQPDSVYCSNDCILKHAAATMKFLSSGKEQKPKPKEKMKMKPEKPSLPKCGAQAGIKISSVHKRPAPEKKETTVKKAVVVPARSEALGKEAACESSTPSWASDHNYNAVKPEKTAAPSPSLLYKCMYHLGVGLLDPSRSFWIAIPWACPGLGVAALC

SEQ ID NO: 13948 - protein, 419 aa, Homo sapiens
MARAAGARGPAGWCRRRGRCGRGTLLAFAAWTAGWVLAAALLLRAHPGVLSERCTDEKSRRILAALCQDYQGGTLAGDLCEDLCVAGELLFQRCLHYNRGKKVLQADWRGRPVVLKSKEEAFSSFPPLSLLEEEAGEGGQDMPEAELLLMVAGEVKSALGLELSNSSLGPWWPGRRGPRWRGQLASLWALLQQEEYVYFSLLQDLSPHVLPVLGSCGHFYAVEFLAAGSPHHRALFPLDRAPGAPGGGQAKAISDIALSFLDMVNHFDSDFSHRLHLCDIKPENFAIRSDFTVVAIDVDMAFFEPKMREILEQNCTGDEDCNFFDCFSRCDLRVNKCGAQRVNNNLQVICDKIFRHWFSAPLKSSAVSFQLQLQLQEAVQECADPGVPSGNTRRAASSVFWKLRQLLQATLRELQEAEK

SEQ ID NO: 13949 - protein, 120 aa, Homo sapiens
MAFFEPKMREILEQNCTGDEDCNFFDCFSRCDLRVNKCGAQRVNNNLQVICDKIFRHWFSAPLKSSAVSFQLQLQLQEAVQECADPGVPSGNTRRAASSVFWKLRQLLQATLRELQEAEK

SEQ ID NO: 13950 - protein, 223 aa, Homo sapiens
MATPQSIFIFAICILMITELILASKSYYDILGVPKSASERQIKKAFHKLAMKYHPDKNKSPDAEAKFREIAEAYETLSDANRRKEYDTLGHSAFTSGKGQRGSGSSFEQSFNFNFDDLFKDFGFFGQNQNTGSKKRFENHFQTRQDGGSSRQRHHFQEFSFGGGLFDDMFEDMEKMFSFSGFDSTNQHTVQTENRFHGSSKHCRTVTQRRGNMVTTYTDCSGQ

SEQ ID NO: 13951 - protein, 328 aa, Homo sapiens
MARTVVLITGCSSGIGLHLAVRLASDPSQSFKVYATLRDLKTQGRLWEAARALACPPGSLETLQLDVRDSKSVAAARERVTEGRVDVLVCNAGLGLLGPLEALGEDAVASVLDVNVVGTVRMLQAFLPDMKRRGSGRVLVTGSVGGLMGLPFNDVYCASKFALEGLCESLAVLLLPFGVHLSLIECGPVHTAFMEKVLGSPEEVLDRTDIHTFHRFYQYLAHSKQVFREAAQNPEEVAEVFLTALRAPKPTLRYFTTERFLPLLRMRLDDPSGSNYVTAMHREVFGDVPAKAEAGAEAGGGAGPGAEDEAGRGAVGDPELGDPPAAPQ

SEQ ID NO: 13952 - protein, 241 aa, Homo sapiens
MPPLLPLRLCRLWPRNPPSRLLGAAAGQRSRPSTYYELLGVHPGASTEEVKRAFFSKSKELHPDRDPGNPSLHSRFVELSEAYRVLSREQSRRSYDDQLRSGSPPKSPRTTVHDKSAHQTHSSWTPPNAQYWSQFHSVRPQGPQLRQQQHKQNKQVLGYCLLLMLAGMGLHYIAFRKVKQMHLNFMDEKDRIITAFYNEARARARANRGILQQERQRLGQRQPPPSEPTQGPEIVPRGAGP

SEQ ID NO: 13953 - protein, 629 aa, Homo sapiens
MSAEVRLRRLQQLVLDPGFLGLEPLLDLLLGVHQELGASELAQDKYVADFLQWAEPIVVRLKEVRLQRDDFEILKVIGRGAFSEVAVVKMKQTGQVYAMKIMNKWDMLKRGEVSCFREERDVLVNGDRRWITQLHFAFQDENYLYLVMEYYVGGDLLTLLSKFGERIPAEMARFYLAEIVMAIDSVHRLGYVHRDIKPDNILLDRCGHIRLADFGSCLKLRADGTVRSLVAVGTPDYLSPEILQAVGGGPGTGSYGPECDWWALGVFAYEMFYGQTPFYADSTAETYGKIVHYKEHLSLPLVDEGVPEEARDFIQRLLCPPETRLGRGGAGDFRTHPFFFGLDWDGLRDSVPPFTPDFEGATDTCNFDLVEDGLTAMVSGGGETLSDIREGAPLGVHLPFVGYSYSCMALRDSEVPGPTPMELEAEQLLEPHVQAPSLEPSVSPQDETAEVAVPAAVPAAEAEAEVTLRELQEALEEEVLTRQSLSREMEAIRTDNQNFASQLREAEARNRDLEAHVRQLQERMELLQAEGATAVTGVPSPRATDPPSHLDGPPAVAVGQCPLVGPGPMHRRHLLLPARVPRPGLSEALSLLLFAVVLSRAAALGCIGLVAHAGQLTAVWRRPGAARAP

SEQ ID NO: 13954 - protein, 624 aa, Homo sapiens
MSAEVRLRRLQQLVLDPGFLGLEPLLDLLLGVHQELGASELAQDKYVADFLQWAEPIVVRLKEVRLQRDDFEILKVIGRGAFSEVAVVKMKQTGQVYAMKIMNKWDMLKRGEVSCFREERDVLVNGDRRWITQLHFAFQDENYLYLVMEYYVGGDLLTLLSKFGERIPAEMARFYLAEIVMAIDSVHRLGYVHRDIKPDNILLDRCGHIRLADFGSCLKLRADGTVRSLVAVGTPDYLSPEILQAVGGGPGTGSYGPECDWWALGVFAYEMFYGQTPFYADSTAETYGKIVHYKEHLSLPLVDEGVPEEARDFIQRLLCPPETRLGRGGAGDFRTHPFFFGLDWDGLRDSVPPFTPDFEGATDTCNFDLVEDGLTAMETLSDIREGAPLGVHLPFVGYSYSCMALRDSEVPGPTPMELEAEQLLEPHVQAPSLEPSVSPQDETAEVAVPAAVPAAEAEAEVTLRELQEALEEEVLTRQSLSREMEAIRTDNQNFASQLREAEARNRDLEAHVRQLQERMELLQAEGATAVTGVPSPRATDPPSHLDGPPAVAVGQCPLVGPGPMHRRHLLLPARVPRPGLSEALSLLLFAVVLSRAAALGCIGLVAHAGQLTAVWRRPGAARAP

SEQ ID NO: 13955 - protein, 630 aa, Homo sapiens
MSAEVRLRRLQQLVLDPGFLGLEPLLDLLLGVHQELGASELAQDKYVADFLQWAEPIVVRLKEVRLQRDDFEILKVIGRGAFSEVAVVKMKQTGQVYAMKIMNKWDMLKRGEVSCFREERDVLVNGDRRWITQLHFAFQDENYLYLVMEYYVGGDLLTLLSKFGERIPAEMARFYLAEIVMAIDSVHRLGYVHRDIKPDNILLDRCGHIRLADFGSCLKLRADGTVRSLVAVGTPDYLSPEILQAVGGGPGTGSYGPECDWWALGVFAYEMFYGQTPFYADSTAETYGKIVHYKEHLSLPLVDEGVPEEARDFIQRLLCPPETRLGRGGAGDFRTHPFFFGLDWDGLRDSVPPFTPDFEGATDTCNFDLVEDGLTAMVSGGGETLSDIREGAPLGVHLPFVGYSYSCMALRDSEVPGPTPMELEAEQLLEPHVQAPSLEPSVSPQDETAEVAVPAAVPAAEAEAEVTLRELQEALEEEVLTRQSLSREMEAIRTDNQNFASQLREAEARNRDLEAHVRQLQERMELLQAEGATAVTGVPSPRATDPPSHMAPRPWLWASARWWGQAPCTAATCCSLPGSLGLAYRRRFPCSCSPLFCLVPPPWAALGWWPTPANSPQSGAAQEPPALPEP

SEQ ID NO: 13956 - protein, 625 aa, Homo sapiens
MSAEVRLRRLQQLVLDPGFLGLEPLLDLLLGVHQELGASELAQDKYVADFLQWAEPIVVRLKEVRLQRDDFEILKVIGRGAFSEVAVVKMKQTGQVYAMKIMNKWDMLKRGEVSCFREERDVLVNGDRRWITQLHFAFQDENYLYLVMEYYVGGDLLTLLSKFGERIPAEMARFYLAEIVMAIDSVHRLGYVHRDIKPDNILLDRCGHIRLADFGSCLKLRADGTVRSLVAVGTPDYLSPEILQAVGGGPGTGSYGPECDWWALGVFAYEMFYGQTPFYADSTAETYGKIVHYKEHLSLPLVDEGVPEEARDFIQRLLCPPETRLGRGGAGDFRTHPFFFGLDWDGLRDSVPPFTPDFEGATDTCNFDLVEDGLTAMETLSDIREGAPLGVHLPFVGYSYSCMALRDSEVPGPTPMELEAEQLLEPHVQAPSLEPSVSPQDETAEVAVPAAVPAAEAEAEVTLRELQEALEEEVLTRQSLSREMEAIRTDNQNFASQLREAEARNRDLEAHVRQLQERMELLQAEGATAVTGVPSPRATDPPSHMAPRPWLWASARWWGQAPCTAATCCSLPGSLGLAYRRRFPCSCSPLFCLVPPPWAALGWWPTPANSPQSGAAQEPPALPEP

SEQ ID NO: 13957 - protein, 535 aa, Homo sapiens
MSAEVRLRRLQQLVLDPGFLGLEPLLDLLLGVHQELGASELAQDKYVADFLQWAEPIVVRLKEVRLQRDDFEILKVIGRGAFSEVAVVKMKQTGQVYAMKIMNKWDMLKRGEVSCFREERDVLVNGDRRWITQLHFAFQDENYLYLVMEYYVGGDLLTLLSKFGERIPAEMARFYLAEIVMAIDSVHRLGYVHRDIKPDNILLDRCGHIRLADFGSCLKLRADGTVRSLVAVGTPDYLSPEILQAVGGGPGTGSYGPECDWWALGVFAYEMFYGQTPFYADSTAETYGKIVHYKEHLSLPLVDEGVPEEARDFIQRLLCPPETRLGRGGAGDFRTHPFFFGLDWDGLRDSVPPFTPDFEGATDTCNFDLVEDGLTAMVSGGGETLSDIREGAPLGVHLPFVGYSYSCMALRDSEVPGPTPMELEAEQLLEPHVQAPSLEPSVSPQDETAEVAVPAAVPAAEAEAEVTLRELQEALEEEVLTRQSLSREMEAIRTDNQNFASQLREAEARNRDLEAHVRQLQERMELLQAEGATGP

SEQ ID NO: 13958 - protein, 530 aa, Homo sapiens
MSAEVRLRRLQQLVLDPGFLGLEPLLDLLLGVHQELGASELAQDKYVADFLQWAEPIVVRLKEVRLQRDDFEILKVIGRGAFSEVAVVKMKQTGQVYAMKIMNKWDMLKRGEVSCFREERDVLVNGDRRWITQLHFAFQDENYLYLVMEYYVGGDLLTLLSKFGERIPAEMARFYLAEIVMAIDSVHRLGYVHRDIKPDNILLDRCGHIRLADFGSCLKLRADGTVRSLVAVGTPDYLSPEILQAVGGGPGTGSYGPECDWWALGVFAYEMFYGQTPFYADSTAETYGKIVHYKEHLSLPLVDEGVPEEARDFIQRLLCPPETRLGRGGAGDFRTHPFFFGLDWDGLRDSVPPFTPDFEGATDTCNFDLVEDGLTAMETLSDIREGAPLGVHLPFVGYSYSCMALRDSEVPGPTPMELEAEQLLEPHVQAPSLEPSVSPQDETAEVAVPAAVPAAEAEAEVTLRELQEALEEEVLTRQSLSREMEAIRTDNQNFASQLREAEARNRDLEAHVRQLQERMELLQAEGATGP

SEQ ID NO: 13959 - protein, 639 aa, Homo sapiens
MGGHFWPPEPYTVFMWGSPWEADSPRVKLRGREKGRQTEGGAFPLVSSALSGDPRFFSPTTPPAEPIVVRLKEVRLQRDDFEILKVIGRGAFSEVAVVKMKQTGQVYAMKIMNKWDMLKRGEVSCFREERDVLVNGDRRWITQLHFAFQDENYLYLVMEYYVGGDLLTLLSKFGERIPAEMARFYLAEIVMAIDSVHRLGYVHRDIKPDNILLDRCGHIRLADFGSCLKLRADGTVRSLVAVGTPDYLSPEILQAVGGGPGTGSYGPECDWWALGVFAYEMFYGQTPFYADSTAETYGKIVHYKEHLSLPLVDEGVPEEARDFIQRLLCPPETRLGRGGAGDFRTHPFFFGLDWDGLRDSVPPFTPDFEGATDTCNFDLVEDGLTAMVSGGGETLSDIREGAPLGVHLPFVGYSYSCMALRDSEVPGPTPMELEAEQLLEPHVQAPSLEPSVSPQDETAEVAVPAAVPAAEAEAEVTLRELQEALEEEVLTRQSLSREMEAIRTDNQNFASQLREAEARNRDLEAHVRQLQERMELLQAEGATAVTGVPSPRATDPPSHLDGPPAVAVGQCPLVGPGPMHRRHLLLPARVPRPGLSEALSLLLFAVVLSRAAALGCIGLVAHAGQLTAVWRRPGAARAP

SEQ ID NO: 13960 - protein, 540 aa, Homo sapiens
MKQTGQVYAMKIMNKWDMLKRGEVSCFREERDVLVNGDRRWITQLHFAFQDENYLYLVMEYYVGGDLLTLLSKFGERIPAEMARFYLAEIVMAIDSVHRLGYVHRDIKPDNILLDRCGHIRLADFGSCLKLRADGTVRSLVAVGTPDYLSPEILQAVGGGPGTGSYGPECDWWALGVFAYEMFYGQTPFYADSTAETYGKIVHYKEHLSLPLVDEGVPEEARDFIQRLLCPPETRLGRGGAGDFRTHPFFFGLDWDGLRDSVPPFTPDFEGATDTCNFDLVEDGLTAMVSGGGETLSDIREGAPLGVHLPFVGYSYSCMALRDSEVPGPTPMELEAEQLLEPHVQAPSLEPSVSPQDETAEVAVPAAVPAAEAEAEVTLRELQEALEEEVLTRQSLSREMEAIRTDNQNFASQLREAEARNRDLEAHVRQLQERMELLQAEGATAVTGVPSPRATDPPSHLDGPPAVAVGQCPLVGPGPMHRRHLLLPARVPRPGLSEALSLLLFAVVLSRAAALGCIGLVAHAGQLTAVWRRPGAARAP

SEQ ID NO: 13961 - protein, 589 aa, Homo sapiens
MGGHFWPPEPYTVFMWGSPWEADSPRVKLRGREKGRQTEGGAFPLVSSALSGDPRFFSPTTPPAEPIVVRLKEVRLQRDDFEILKVIGRGAFSEVAVVKMKQTGQVYAMKIMNKWDMLKRGEVSCFREERDVLVNGDRRWITQLHFAFQDENYLYLVMEYYVGGDLLTLLSKFGERIPAEMARFYLAEIVMAIDSVHRLGYVHRDIKPDNILLDRCGHIRLADFGSCLKLRADGTTPFYADSTAETYGKIVHYKEHLSLPLVDEGVPEEARDFIQRLLCPPETRLGRGGAGDFRTHPFFFGLDWDGLRDSVPPFTPDFEGATDTCNFDLVEDGLTAMVSGGGETLSDIREGAPLGVHLPFVGYSYSCMALRDSEVPGPTPMELEAEQLLEPHVQAPSLEPSVSPQDETAEVAVPAAVPAAEAEAEVTLRELQEALEEEVLTRQSLSREMEAIRTDNQNFASQLREAEARNRDLEAHVRQLQERMELLQAEGATAVTGVPSPRATDPPSHLDGPPAVAVGQCPLVGPGPMHRRHLLLPARVPRPGLSEALSLLLFAVVLSRAAALGCIGLVAHAGQLTAVWRRPGAARAP

SEQ ID NO: 13962 - protein, 634 aa, Homo sapiens
MGGHFWPPEPYTVFMWGSPWEADSPRVKLRGREKGRQTEGGAFPLVSSALSGDPRFFSPTTPPAEPIVVRLKEVRLQRDDFEILKVIGRGAFSEVAVVKMKQTGQVYAMKIMNKWDMLKRGEVSCFREERDVLVNGDRRWITQLHFAFQDENYLYLVMEYYVGGDLLTLLSKFGERIPAEMARFYLAEIVMAIDSVHRLGYVHRDIKPDNILLDRCGHIRLADFGSCLKLRADGTVRSLVAVGTPDYLSPEILQAVGGGPGTGSYGPECDWWALGVFAYEMFYGQTPFYADSTAETYGKIVHYKEHLSLPLVDEGVPEEARDFIQRLLCPPETRLGRGGAGDFRTHPFFFGLDWDGLRDSVPPFTPDFEGATDTCNFDLVEDGLTAMETLSDIREGAPLGVHLPFVGYSYSCMALRDSEVPGPTPMELEAEQLLEPHVQAPSLEPSVSPQDETAEVAVPAAVPAAEAEAEVTLRELQEALEEEVLTRQSLSREMEAIRTDNQNFASQLREAEARNRDLEAHVRQLQERMELLQAEGATAVTGVPSPRATDPPSHLDGPPAVAVGQCPLVGPGPMHRRHLLLPARVPRPGLSEALSLLLFAVVLSRAAALGCIGLVAHAGQLTAVWRRPGAARAP

SEQ ID NO: 13963 - protein, 609 aa, Homo sapiens
MGGHFWPPEPYTVFMWGSPWEADSPRVKLRGREKGRQTEGGAFPLVSSALSGDPRFFSPTTPPAEPIVVRLKEVRLQRDDFEILKVIGRGAFSEVAVVKMKQTGQVYAMKIMNKWDMLKRGEVSCFREERDVLVNGDRRWITQLHFAFQDENYLYLVMEYYVGGDLLTLLSKFGERIPAEMARFYLAEIVMAIDSVHRLGYVHRDIKPDNILLDRCGHIRLADFGSCLKLRADGTVRSLVAVGTPDYLSPEILQAVGGGPGTGSYGPECDWWALGVFAYEMFYGQTPFYADSTAETYGKIVHYKEHLSLPLVDEGVPEEARDFIQRLLCPPETRLGRGGAGDFRTHPFFFGLDWDGLRDSVPPFTPDFEGATDTCNFDLVEDGLTAMVSGGGETLSDIREGAPLGVHLPFVGYSYSCMALRDSEVPGPTPMELEAEQLLEPHVQAPSLEPSVSPQDETAEVAVPAAVPAAEAEAEVTLRELQEALEEEVLTRQSLSREMEAIRTDNQNFASQLREAEARNRDLEAHVRQLQERMELLQAEGATAVTGVPSPRATDPPSHVPRPGLSEALSLLLFAVVLSRAAALGCIGLVAHAGQLTAVWRRPGAARAP

SEQ ID NO: 13964 - protein, 545 aa, Homo sapiens
MGGHFWPPEPYTVFMWGSPWEADSPRVKLRGREKGRQTEGGAFPLVSSALSGDPRFFSPTTPPAEPIVVRLKEVRLQRDDFEILKVIGRGAFSEVAVVKMKQTGQVYAMKIMNKWDMLKRGEVSCFREERDVLVNGDRRWITQLHFAFQDENYLYLVMEYYVGGDLLTLLSKFGERIPAEMARFYLAEIVMAIDSVHRLGYVHRDIKPDNILLDRCGHIRLADFGSCLKLRADGTVRSLVAVGTPDYLSPEILQAVGGGPGTGSYGPECDWWALGVFAYEMFYGQTPFYADSTAETYGKIVHYKEHLSLPLVDEGVPEEARDFIQRLLCPPETRLGRGGAGDFRTHPFFFGLDWDGLRDSVPPFTPDFEGATDTCNFDLVEDGLTAMVSGGGETLSDIREGAPLGVHLPFVGYSYSCMALRDSEVPGPTPMELEAEQLLEPHVQAPSLEPSVSPQDETAEVAVPAAVPAAEAEAEVTLRELQEALEEEVLTRQSLSREMEAIRTDNQNFASQLREAEARNRDLEAHVRQLQERMELLQAEGATGP

SEQ ID NO: 13965 - protein, 334 aa, Homo sapiens
MALRWGIVSVGLISSDFTAVLQTLPRSEHQVVAVAARDLSRAKEFAQKHDIPKAYGSYEELAKDPSVEVAYIGTQHPQHKAAVMLCLAAGKAVLCEKPTGVNAAEVREMVAEARSRALFLMEAIWTRFFPASEALRSVLAQGTLGDLRVARAEFGKNLIHVPRAVDRAQAGGALLDIGIYCVQFTSMVFGGQKPEKISVVGRRHETGVDDTVTVLLQYPGEVHGSFTCSITVQLSNTASVSGTKGMVQLLNPCWCPTELVVKGEHKEFPLPPVPKDCNFDNGAGMSYEAKHVWECLRKGMKESPVIPLSESELLADILEEVRKAIGVTFPQDKR

SEQ ID NO: 13966 - protein, 1401 aa, Homo sapiens
MDGDSSSSSGGSGPAPGPGPEGEQRPEGEPLAPDGGSPDSTQTKAVPPEASPERSCSLHSCPLEDPSSSSGPPPTTSTLQPVGPSSPLAPAHFTYPRALQEYQGGSSLPGLGDRAALCSHGSSLSPSPAPSQRDGTWKPPAVQHHVVSVRQERAFQMPKSYSQLIAEWPVAVLMLCLAVIFLCTLAGLLGARLPDFSKPLLGFEPRDTDIGSKLVVWRALQALTGPRKLLFLSPDLELNSSSSHNTLRPAPRGSAQESAVRPRRMVEPLEDRRQENFFCGPPEKSYAKLVFMSTSSGSLWNLHAIHSMCRMEQDQIRSHTSFGALCQRTAANQCCPSWSLGNYLAVLSNRSSCLDTTQADAARTLALLRTCALYYHSGALVPSCLGPGQNKSPRCAQVPTKCSQSSAIYQLLHFLLDRDFLSPQTTDYQVPSLKYSLLFLPTPKGASLMDIYLDRLATPWGLADNYTSVTGMDLGLKQELLRHFLVQDTVYPLLALVAIFFGMALYLRSLFLTLMVLLGVLGSLLVAFFLYQVAFRMAYFPFVNLAALLLLSSVCANHTLIFFDLWRLSKSQLPSGGLAQRVGRTMHHFGYLLLVSGLTTSAAFYASYLSRLPAVRCLALFMGTAVLVHLALTLVWLPASAVLHERYLARGCARRARGRWEGSAPRRLLLALHRRLRGLRRAAAGTSRLLFQRLLPCGVIKFRYIWICWFAALAAGGAYIAGVSPRLRLPTLPPPGGQVFRPSHPFERFDAEYRQLFLFEQLPQGEGGHMPVVLVWGVLPVDTGDPLDPRSNSSLVRDPAFSASGPEAQRWLLALCHRARNQSFFDTLQEGWPTLCFVETLQRWMESPSCARLGPDLCCGHSDFPWAPQFFLHCLKMMALEQGPDGTQDLGLRFDAHGSLAALVLQFQTNFRNSPDYNQTQLFYNEVSHWLAAELGMAPPGLRRGWFTSRLELYSLQHSLSTEPAVVLGLALALAFATLLLGTWNVPLSLFSVAAVAGTVLLTVGLLVLLEWQLNTAEALFLSASVGLSVDFTVNYCISYHLCPHPDRLSRVAFSLRQTSCATAVGAAALFAAGVLMLPATVLLYRKLGIILMMVKCVSCGFASFFFQSLCCFFGPEKNCGQILWPCAHLPWDAGTGDPGGEKAGRPRPGSVGGMPGSCSEQYELQPLARRRSPSFDTSTATSKLSHRPSVLSEDLQLHDGPCCSRPPPAPASPRELLLDHQAVFSQCPALQTSSPYKQAGPSPKTRARQDSQGEEAEPLPASPEAPAHSPKAKAADPPDGFCSSASTLEGLSVSDETCLSTSEPSARVPDSVGVSPDDLDDTGQPVLERGQLNGKRDTLWLALRETVYDPSLPASHHSSLSWKGRGGPGDGSPVVLPNSQPDLPDVWLRRPSTHTSGYSS

SEQ ID NO: 13967 - protein, 405 aa, Homo sapiens
MERWPWPSGGAWLLVAARALLQLLRSDLRLGRPLLAALALLAALDWLCQRLLPPPAALAVLAAAGWIALSRLARPQRLPVATRAVLITGCDSGFGKETAKKLDSMGFTVLATVLELNSPGAIELRTCCSPRLRLLQMDLTKPGDISRVLEFTKAHTTSTGLWGLVNNAGHNEVVADAELSPVATFRSCMEVNFFGALELTKGLLPLLRSSRGRIVTVGSPAGDMPYPCLGAYGTSKAAVALLMDTFSCELLPWGVKVSIIQPGCFKTESVRNVGQWEKRKQLLLANLPQELLQAYGKDYIEHLHGQFLHSLRLAMSDLTPVVDAITDALLAARPRRRYYPGQGLGLMYFIHYYLPEGLRRRFLQAFFISHCLPRALQPGQPGTTPPQDAAQDPNLSPGPSPAVAR

SEQ ID NO: 13968 - protein, 559 aa, Homo sapiens
MATALSEEELDNEDYYSLLNVRREASSEELKAAYRRLCMLYHPDKHRDPELKSQAERLFNLVHQAYEVLSDPQTRAIYDIYGKRGLEMEGWEVVERRRTPAEIREEFERLQREREERRLQQRTNPKGTISVGVDATDLFDRYDEEYEDVSGSSFPQIEINKMHISQSIEAPLTATDTAILSGSLSTQNGNGGGSINFALRRVTSAKGWGELEFGAGDLQGPLFGLKLFRNLTPRCFVTTNCALQFSSRGIRPGLTTVLARNLDKNTVGYLQWRWGIQSAMNTSIVRDTKTSHFTVALQLGIPHSFALISYQHKFQDDDQTRVKGSLKAGFFGTVVEYGAERKISRHSVLGAAVSVGVPQGVSLKVKLNRASQTYFFPIHLTDQLLPSAMFYATVGPLVVYFAMHRLIIKPYLRAQKEKELEKQRESAATDVLQKKQEAESAVRLMQESVRRIIEAEESRMGLIIVNAWYGKFVNDKSRKSEKVKVIDVTVPLQCLVKDSKLILTEASKAGLPGFYDPCVGEEKNLKVLYQFRGVLHQVMVLDSEALRIPKQSHRIDTDG

SEQ ID NO: 13969 - protein, 521 aa, Homo sapiens
MATALSEEELDNEDYYSLLNVRREASSEELKAAYRRLCMLYHPDKHRDPELKSQAERLFNLVHQAYEVLSDPQTRAIYDIYGKRGLEMEGWEVVERRRTPAEIREEFERLQREREERRLQQRTNPKGTISVGVDATDLFDRYDEEYEDVSGSSFPQIEINKMHISQSIEAPLTATDTAILSGSLSTQNGNGGGSINFALRRVTSAKGWGELEFGAGDLQGPLFGLKLFRNLTPRCFVTTNCALQFSSRGIRPGLTTVLARNLDKNTVGYLQWRWGIQSAMNTSIVRDTKTSHFTVALQLGIPHSFALISYQHKFQDDDQTRVKGSLKAGFFGTVVEYGAERKISRHSVLGAAVSVGVPQGVSLKVKLNRASQTYFFPIHLTDQLLPSAMFYATVGPLVVYFAMHRLIIKPYLRAQKEKELEKQRESAATDVLQKKQEAESAVRLMQESVRRIIEAEESRMGLIILTEASKAGLPGFYDPCVGEEKNLKVLYQFRGVLHQVMVLDSEALRIPKQSHRIDTDG

SEQ ID NO: 13970 - protein, 507 aa, Homo sapiens
MATALSEEELDNEDYYSLLNVRREASSEELKAAYRRLCMLYHPDKHRDPELKSQAERLFNLVHQAYEVLSDPQTRAIYDIYGKRGLEMEGWEVVERRRTPAEIREEFERLQREREERRLQQRTNPKGTISVGVDATDLFDRYDEEYEDVSGSSFPQIEINKMHISQSIEAPLTATDTAILSGSLSTQNGNGGGSINFALRRVTSAKGWGELEFGAGDLQGPLFGLKLFRNLTPRCFVTTNCALQFSSRGIRPGLTTVLARNLDKNTVGYLQWRWGIQSAMNTSIVRDTKTSHFTVALQLGIPHSFALISYQHKFQDDDQTRVKGSLKAGFFGTVVEYGAERKISRHSVLGAAVSVGVPQGVSLKVKELEKQRESAATDVLQKKQEAESAVRLMQESVRRIIEAEESRMGLIIVNAWYGKFVNDKSRKSEKVKVIDVTVPLQCLVKDSKLILTEASKAGLPGFYDPCVGEEKNLKVLYQFRGVLHQVMVLDSEALRIPKQSHRIDTDG

SEQ ID NO: 13971 - protein, 621 aa, Homo sapiens
MAELTVEVRGSNGAFYKGFIKDVHEDSLTVVFENNWQPERQVPFNEVRLPPPPDIKKEISEGDEVEVYSRANDQEPCGWWLAKVRMMKGEFYVIEYAACDATYNEIVTFERLRPVNQNKTVKKNTFFKCTVDVPEDLREACANENAHKDFKKAVGACRIFYHPETTQLMILSASEATVKRVNILSDMHLRSIRTKLMLMSRNEEATKHLECTKQLAAAFHEEFVVREDLMGLAIGTHGSNIQQARKVPGVTAIELDEDTGTFRIYGESADAVKKARGFLEFVEDFIQVPRNLVGKVIGKNGKVIQEIVDKSGVVRVRIEGDNENKLPREDGMVPFVFVGTKESIGNVQVLLEYHIAYLKEVEQLRMERLQIDEQLRQIGSRSYSGRGRGRRGPNYTSGYGTNSELSNPSETESERKDELSDWSLAGEDDRDSRHQRDSRRRPGGRGRSVSGGRGRGGPRGGKSSISSVLKDPDSNPYSLLDNTESDQTADTDASESHHSTNRRRRSRRRRTDEDAVLMDGMTESDTASVNENGLVTVADYISRAESQSRQRNLPRETLAKNKKEMAKDVIEEHGPSEKAINGPTSASGDDISKLQRTPGEEKINTLKEENTQEAAVLNGVS

SEQ ID NO: 13972 - protein, 539 aa, Homo sapiens
MAELTVEVRGSNGAFYKGFIKDVHEDSLTVVFENNWQPERQVPFNEVRLPPPPDIKKEISEGDEVEVYSRANDQEPCGWWLAKVRMMKGEFYVIEYAACDATYNEIVTFERLRPVNQNKTVKKNTFFKCTVDVPEDLREACANENAHKDFKKAVGACRIFYHPETTQLMILSASEATVKRVNILSDMHLRSIRTKLMLMSRNEEATKHLECTKQLAAAFHEEFVVREDLMGLAIGTHGSNIQQARKVPGVTAIELDEDTGTFRIYGESADAVKKARGFLEFVEDFIQVPRNLVGKVIGKNGKVIQEIVDKSGVVRVRIEGDNENKLPREDGMVPFVFVGTKESIGNVQVLLEYHIAYLKEVEQLRMERLQIDEQLRQIGSRSYSGRGRGRRGPNYTSGYGTNSELSNPSETESERKDELSDWSLAGEDDRDSRHQRDSRRRPGGRGRSVSGGRGRGGPRGGKSSISSVLKDPDSNPYSLLDNTESDQTADTDASESHHSTNRRRRSRRRRTDEDAVLMDGMTESDTASVNENGLGKRCD

SEQ ID NO: 13973 - protein, 536 aa, Homo sapiens
MMKGEFYVIEYAACDATYNEIVTFERLRPVNQNKTVKKNTFFKCTVDVPEDLREACANENAHKDFKKAVGACRIFYHPETTQLMILSASEATVKRVNILSDMHLRSIRTKLMLMSRNEEATKHLECTKQLAAAFHEEFVVREDLMGLAIGTHGSNIQQARKVPGVTAIELDEDTGTFRIYGESADAVKKARGFLEFVEDFIQVPRNLVGKVIGKNGKVIQEIVDKSGVVRVRIEGDNENKLPREDGMVPFVFVGTKESIGNVQVLLEYHIAYLKEVEQLRMERLQIDEQLRQIGSRSYSGRGRGRRGPNYTSGYGTNSELSNPSETESERKDELSDWSLAGEDDRDSRHQRDSRRRPGGRGRSVSGGRGRGGPRGGKSSISSVLKDPDSNPYSLLDNTESDQTADTDASESHHSTNRRRRSRRRRTDEDAVLMDGMTESDTASVNENGLVTVADYISRAESQSRQRNLPRETLAKNKKEMAKDVIEEHGPSEKAINGPTSASGDDISKLQRTPGEEKINTLKEENTQEAAVLNGVS

SEQ ID NO: 13974 - protein, 198 aa, Homo sapiens
MDAILNYRSEDTEDYYTLLGCDELSSVEQILAEFKVRALECHPDKHPENPKAVETFQKLQKAKEILTNEESRARYDHWRRSQMSMPFQQWEALNDSVKTSMHWVVRGKKDLMLEESDKTHTTKMENEECNEQRERKKEELASTAEKTEQKEPKPLEKSVSPQNSDSSGFADVNGWHLRFRWSKDAPSELLRKFRNYEI

SEQ ID NO: 13975 - protein, 107 aa, Homo sapiens
MDAILNYRSEDTEDYYTLLGCDELSSVEQILAEFKVRALECHPDKHPENPKAVETFQKLQKAKEILTNEESRARYDHWRRSQMSMPFQQWEALNDSVKTVGFSLGAT

SEQ ID NO: 13976 - protein, 2243 aa, Homo sapiens
MNIIRENKDLACFYTTKHSWRGKYKRVFSVGTHAITTYNPNTLEVTNQWPYGDICSISPVGKGQGTEFNLTFRKGSGKKSETLKFSTEHRTELLTEALRFRTDFSEGKITGRRYNCYKHHWSDSRKPVILEVTPGGFDQINPATNRVLCSYDYRNIEGFVDLSDYQGGFCILYGGFSRLHLFASEQREEIIKSAIDHAGNYIGISLRIRKEPLEFEQYLNLRFGKYSTDESITSLAEFVVQKISPRHSEPVKRVLALTETCLVERDPATYNIATLKPLGEVFALVCDSENPQLFTIEFIKGQVRKYSSTERDSLLASLLDGVRASGNRDVCVKMTPTHKGQRWGLLSMPVDEEVESLHLRFLATPPNGNFADAVFRFNANISYSGVLHAVTQDGLFSENKEKLINNAITALLSQEGDVVASNAELESQFQAVRRLVASKAGFLAFTQLPKFRERLGVKVVKALKRSNNGIIHAAVDMLCALMCPMHDDYDLRQEQLNKASLLSSKKFLENLLEKFNSHVDHGTGALVISSLLDFLTFALCAPYSETTEGQQFDMLLEMVASNGRTLFKLFQHPSMAIIKGAGLVMKAIIEEGDKEIATKMQELALSEGALPRHLHTAMFTISSDQRMLTNRQLSRHLVGLWTADNATATNLLKRILPPGLLAYLESSDLVPEKDADRMHVRDNVKIAMDQYGKFNKVPEWQRLAGKAAKEVEKFAKEKVDLVLMHWRDRMGIAQKENINQKPVVLRKRRQRIKIEANWDLFYYRFGQDHARSNLIWNFKTREELKDTLESEMRAFNIDRELGSANVISWNHHEFEVKYECLAEEIKIGDYYLRLLLEEDENEESGSIKRSYEFFNELYHRFLLTPKVNMKCLCLQALAIVYGRCHEEIGPFTDTRYIIGMLERCTDKLERDRLILFLNKLILNKKNVKDLMDSNGIRILVDLLTLAHLHVSRATVPLQSNVIEAAPDMKRESEKEWYFGNADKERSGPYGFHEMQELWTKGMLNAKTRCWAQGMDGWRPLQSIPQLKWCLLASGQAVLNETDLATLILNMLITMCGYFPSRDQDNAIIRPLPKVKRLLSDSTCLPHIIQLLLTFDPILVEKVAILLYHIMQDNPQLPRLYLSGVFFFIMMYTGSNVLPVARFLKYTHTKQAFKSEETKGQDIFQRSILGHILPEAMVCYLENYEPEKFSEIFLGEFDTPEAIWSSEMRRLMIEKIAAHLADFTPRLQSNTRALYQYCPIPIINYPQLENELFCNIYYLKQLCDTLRFPDWPIKDPVKLLKDTLDAWKKEVEKKPPMMSIDDAYEVLNLPQGQGPHDESKIRKAYFRLAQKYHPDKNPEGRDMFEKVNKAYEFLCTKSAKIVDGPDPENIILILKTQSILFNRHKEDLQPYKYAGYPMLIRTITMETSDDLLFSKESPLLPAATELAFHTVNCSALNAEELRRENGLEVLQEAFSRCVAVLTRASKPSDMSVQVCGYISKCYSVAAQFEECREKITEMPSIIKDLCRVLYFGKSIPRVAALGVECVSSFAVDFWLQTHLFQAGILWYLLGFLFNYDYTLEESGIQKSEETNQQEVANSLAKLSVHALSRLGGYLAEEQATPENPTIRKSLAGMLTPYVARKLAVASVTEILKMLNSNTESPYLIWNNSTRAELLEFLESQQENMIKKGDCDKTYGSEFVYSDHAKELIVGEIFVRVYNEVPTFQLEVPKAFAASLLDYIGSQAQYLHTFMAITHAAKVESEQHGDRLPRVEMALEALRNVIKYNPGSESECIGHFKLIFSLLRVHGAGQVQQLALEVVNIVTSNQDCVNNIAESMVLSSLLALLHSLPSSRQLVLETLYALTSSTKIIKEAMAKGALIYLLDMFCNSTHPQVRAQTAELFAKMTADKLIGPKVRITLMKFLPSVFMDAMRDNPEAAVHIFEGTHENPELIWNDNSRDKVSTTVREMMLEHFKNQQDNPEANWKLPEDFAVVFGEAEGELAVGGVFLRIFIAQPAWVLRKPREFLIALLEKLTELLEKNNPHGETLETLTMATVCLFSAQPQLADQVPPLGHLPKVIQAMNHRNNAIPKSAIRVIHALSENELCVRAMASLETIGPLMNGMKKRADTVGLACEAINRMFQKEQSELVAQALKADLVPYLLKLLEGIGLENLDSPAATKAQIVKALKAMTRSLQYGEQVNEILCRSSVWSAFKDQKHDLFISESQTAGYLTGPGVAGYLTAGTSTSVMSNLPPPVDHEAGDLGYQT

SEQ ID NO: 13977 - protein, 782 aa, Homo sapiens
MEVRKLSISWQFLIVLVLILQILSALDFDPYRVLGVSRTASQADIKKAYKKLAREWHPDKNKDPGAEDKFIQISKAYEILSNEEKRSNYDQYGDAGENQGYQKQQQQREYRFRHFHENFYFDESFFHFPFNSERRDSIDEKYLLHFSHYVNEVVPDSFKKPYLIKITSDWCFSCIHIEPVWKEVIQELEELGVGIGVVHAGYERRLAHHLGAHSTPSILGIINGKISFFHNAVVRENLRQFVESLLPGNLVEKVTNKNYVRFLSGWQQENKPHVLLFDQTPIVPLLYKLTAFAYKDYLSFGYVYVGLRGTEEMTRRYNINIYAPTLLVFKEHINRPADVIQARGMKKQIIDDFITRNKYLLAARLTSQKLFHELCPVKRSHRQRKYCVVLLTAETTKLSKPFEAFLSFALANTQDTVRFVHVYSNRQQEFADTLLPDSEAFQGKSAVSILERRNTAGRVVYKTLEDPWIGSESDKFILLGYLDQLRKDPALLSSEAVLPDLTDELAPVFLLRWFYSASDYISDCWDSIFHNNWREMMPLLSLIFSALFILFGTVIVQAFSDSNDERESSPPEKEEAQEKTGKTEPSFTKENSSKIPKKGFVEVTELTDVTYTSNLVRLRPGHMNVVLILSNSTKTSLLQKFALEVYTFTGSSCLHFSFLSLDKHREWLEYLLEFAQDAAPIPNQYDKHFMERDYTGYVLALNGHKKYFCLFKPQKTVEEEEAIGSCSDVDSSLYLGESRGKPSCGLGSRPIKGKLSKLSLWMERLLEGSLQRFYIPSWPELD

SEQ ID NO: 13978 - protein, 470 aa, Homo sapiens
MTRRYNINIYAPTLLVFKEHINRPADVIQARGMKKQIIDDFITRNKYLLAARLTSQKLFHELCPVKRSHRQRKYCVVLLTAETTKLSKPFEAFLSFALANTQDTVRFVHVYSNRQQEFADTLLPDSEAFQGKSAVSILERRNTAGRVVYKTLEDPWIGSESDKFILLGYLDQLRKDPALLSSEAVLPDLTDELAPVFLLRWFYSASDYISDCWDSIFHNNWREMMPLLSLIFSALFILFGTVIVQAFSDSNDERESSPPEKEEAQEKTGKTEPSFTKENSSKIPKKGFVEVTELTDVTYTSNLVRLRPGHMNVVLILSNSTKTSLLQKFALEVYTFTGSSCLHFSFLSLDKHREWLEYLLEFAQDAAPIPNQYDKHFMERDYTGYVLALNGHKKYFCLFKPQKTVEEEEAIGSCSDVDSSLYLGESRGKPSCGLGSRPIKGKLSKLSLWMERLLEGSLQRFYIPSWPELD

SEQ ID NO: 13979 - protein, 531 aa, Homo sapiens
MKCHYEALGVRRDASEEELKKAYRKLALKWHPDKNLDNAAEAAEQFKLIQAAYDVLSDPQERAWYDNHREALLKGGFDGEYQDDSLDLLRYFTVTCYSGYGDDEKGFYTVYRNVFEMIAKEELESVLEEEVDDFPTFGDSQSDYDTVVHPFYAYWQSFCTQKNFAWKEEYDTRQASNRWEKRAMEKENKKIRDKARKEKNELVRQLVAFIRKRDKRVQAHRKLVEEQNAEKARKAEEMRRQQKLKQAKLVEQYREQSWMTMANLEKELQEMEARYEKEFGDGSDENEMEEHELKDEEDGKDSDEAEDAELYDDLYCPACDKSFKTEKAMKNHEKSKKHREMVALLKQQLEEEEENFSRPQIDENPLDDNSEEEMEDAPKQKLSKKQKKKKQKPAQNYDDNFNVNGPGEGVKVDPEDTNLNQDSAKELEDSPQENVSVTEIIKPCDDPKSEAKSVPKPKGKKTKDMKKPVRVPAEPQTMSVLISCTTCHSEFPSRNKLFDHLKATGHARAPSSSSLNSATSSQSKKEKRKNR

SEQ ID NO: 13980 - protein, 576 aa, Homo sapiens
MKCHYEALGVRRDASEEELKKAYRKLALKWHPDKNLDNAAEAAEQFKLIQAAYDVLSDPQERAWYDNHREALLKGGFDGEYQDDSLDLLRYFTVTCYSGYGDDEKGFYTVYRNVFEMIAKEELESVLEEEVDDFPTFGDSQSDYDTVVHPFYAYWQSFCTQKNFAWKEEYDTRQASNRWEKRAMEKENKKIRDKARKEKNELVRQLVAFIRKRDKRVQAHRKLVEEQNAEKARKAEEMRRQQKLKQAKLVEQYREQSWMTMANLEKELQEMEARYEKEFGDGSDENEMEEHELKDEEDGKDSDEAEDAELYDDLYCPACDKSFKTEKAMKNHEKSKKHREMVALLKQQLEEEEENFSRPQIDENPLDDNSEEEMEDAPKQKLSKKQKKKKQKPAQDVPGKDSYLPAAHFQMAWGKKCVLGERRDGESEHKCAKMLLENRQNYDDNFNVNGPGEGVKVDPEDTNLNQDSAKELEDSPQENVSVTEIIKPCDDPKSEAKSVPKPKGKKTKDMKKPVRVPAEPQTMSVLISCTTCHSEFPSRNKLFDHLKATGHARAPSSSSLNSATSSQSKKEKRKNR

SEQ ID NO: 13981 - protein, 544 aa, Homo sapiens
MKCHYEALGVRRDASEEELKKAYRKLALKWHPDKNLDNAAEAAEQFKLIQAAYDVLSDPQERAWYDNHREALLKGGFDGEYQDDSLDLLRYFTVTCYSGYGDDEKGFYTVYRNVFEMIAKEELESVLEEEVDDFPTFGDSQSDYDTVVHPFYAYWQSFCTQKNFAWKEEYDTRQASNRWEKRAMEKENKKIRDKARKEKNELVRQLVAFIRKRDKRVQAHRKLVEEQNAEKARKAEEMRRQQKLKQAKLVEQYREQSWMTMANLEKELQEMEARYEKEFGDGSDENEMEEHELKDEEDGKDSDEAEDAELYDDLYCPACDKSFKTEKAMKNHEKSKKHREMVALLKQQLEEEEENFSRPQIDENPLDDNSEEEMEDAPKQKVKYLTFRFIFALRLSKKQKKKKQKPAQNYDDNFNVNGPGEGVKVDPEDTNLNQDSAKELEDSPQENVSVTEIIKPCDDPKSEAKSVPKPKGKKTKDMKKPVRVPAEPQTMSVLISCTTCHSEFPSRNKLFDHLKATGHARAPSSSSLNSATSSQSKKEKRKNR

SEQ ID NO: 13982 - protein, 673 aa, Homo sapiens
MGGLASGGDVEPGLPVEVRGSNGAFYKGFVKDVHEDSVTIFFENNWQSERQIPFGDVRLPPPADYNKEITEGDEVEVYSRANEQEPCGWWLARVRMMKGDFYVIEYAACDATYNEIVTLERLRPVNPNPLATKGSFFKVTMAVPEDLREACSNENVHKEFKKALGANCIFLNITNSELFILSTTEAPVKRASLLGDMHFRSLRTKLLLMSRNEEATKHLETSKQLAAAFQEEFTVREDLMGLAIGTHGANIQQARKVPGVTAIELGEETCTFRIYGETPEACRQARSYLEFSEDSVQVPRNLVGKVIGKNGKVIQEIVDKSGVVRVRVEGDNDKKNPREEGMVPFIFVGTRENISNAQALLEYHLSYLQEVEQLRLERLQIDEQLRQIGLGFRPPGSGRGSGGSDKAGYSTDESSSSSLHATRTYGGSYGGRGRGRRTGGPAYGPSSDVSTASETESEKREEPNRAGPGDRDPPTRGEESRRRPTGGRGRGPPPAPRPTSRYNSSSISSVLKDPDSNPYSLLDTSEPEPPVDSEPGEPPPASARRRRSRRRRTDEDRTVMDGGLESDGPNMTENGLEDESRPQRRNRSRRRRNRGNRTDGSISGDRQPVTVADYISRAESQSRQRPPLERTKPSEDSLSGQKGDSVSKLPKGPSENGELSAPLELGSMVNGVS

SEQ ID NO: 13983 - protein, 341 aa, Homo sapiens
MAKGLLVTYALWAVGGPAGLHHLYLGRDSHALLWMLTLGGGGLGWLWEFWKLPSFVAQANRAQGQRQSPRGVTPPLSPIRFAAQVIVGIYFGLVALISLSSMVNFYIVALPLAVGLGVLLVAAVGNQTSDFKNTLGSAFLTSPIFYGRPIAILPISVAASITAQRHRRYKALVASEPLSVRLYRLGLAYLAFTGPLAYSALCNTAATLSYVAETFGSFLNWFSFFPLLGRLMEFVLLLPYRIWRLLMGETGFNSSCFQEWAKLYEFVHSFQDEKRQLAYQVLGLSEGATNEEIHRSYQELVKVWHPDHNLDQTEEAQRHFLEIQAAYEVLSQPRKPWGSRR

SEQ ID NO: 13984 - protein, 331 aa, Homo sapiens
MEVTGDAGVPESGEIRTLKPCLLRRNYSREQHGVAASCLEDLRSKACDILAIDKSLTPVTLVLAEDGTIVDDDDYFLCLPSNTKFVALASNEKWAYNNSDGGTAWISQESFDVDETDSGAGLKWKNVARQLKEDLSSIILLSEEDLQMLVDAPCSDLAQELRQSCATVQRLQHTLQQVLDQREEVRQSKQLLQLYLQALEKEGSLLSKQEESKAAFGEEVDAVDTGISRETSSDVALASHILTALREKQAPELSLSSQDLELVTKEDPKALAVALNWDIKKTETVQEACERELALRLQQTQSLHSLRSISASKASPPGDLQNPKRARQDPT

SEQ ID NO: 13985 - protein, 268 aa, Homo sapiens
MEVTGDAGVPESGEIRTLKPCLLRRNYSREQHGVAASCLEDLRSKACDILAIDKSLTPVTLVLAEDGTIVDDDDYFLCLPSNTKFVALASNEKWAYNNSDGGTAWISQESFDVDETDSGAGLKWKNVARQLKEDLSSIILLSEEDLQMLVDAPCSDLAQELRQSCATVQRLQHTLQQVLDQREEVRQSKQLLQLYLQALEKEGSLLSKQEESKAAFGEEVDAVDTGISRETSSDVALASHILTALREKQAPELSLSSQDLEVGGNQGH

SEQ ID NO: 13986 - protein, 338 aa, Homo sapiens
MLQKPKSVKLRALRSPRKFGVAGRSCQEVLRKGCLRFQLPERGSRLCLYEDGTELTEDYFPSVPDNAELVLLTLGQAWQGYVSDIRRFLSAFHEPQVGLIQAAQQLLCDEQAPQRQRLLADLLHNVSQNIAAETRAEDPPWFEGLESRFQSKSGYLRYSCESRIRSYLREVSSYPSTVGAEAQEEFLRVLGSMCQRLRSMQYNGSYFDRGAKGGSRLCTPEGWFSCQGPFDMDSCLSRHSINPYSNRESRILFSTWNLDHIIEKKRTIIPTLVEAIKEQDGREVDWEYFYGLLFTSENLKLVHIVCHKKTTHKLNCDPSRIYKPQTRLKRKQPVRKRQ

SEQ ID NO: 13987 - protein, 270 aa, Homo sapiens
MLQKPKSVKLRALRSPRKFGVAGRSCQEVLRKGCLRFQLPERGSRLCLYEDGTELTEDYFPSVPDNAELVLLTLGQAWQGYVSDIRRFLSAFHEPQVGLIQAAQQLLCDEQAPQRQRLLADLLHNVSQNIAAETRAEDPPWFEGLESRFQSKSGYLRYSCESRIRSYLREVSSYPSTVGAEAQEEFLRVLGSMCQRLRSMQYNGSYFDRGAKGGSRLCTPEGWFSCQGPFDMDSCLSRHSINPYSNRESRILFSTWNLDHIDGVLLCGPG

SEQ ID NO: 13988 - protein, 116 aa, Homo sapiens
MLQKPKSVKLRALRSPRKFGVAGRSCQEVLRKGCLRFQLPERGSRLCLYEDGTELTEDYFPSVPDNAELVLLTLGQAWQGSVGVRARTKTRDTSSLSPGDCQALGNGGRCGQRLFL

SEQ ID NO: 13989 - protein, 103 aa, Homo sapiens
MLQKPKSVKLRALRSPRKFGVAGRSCQEVLRKGCLRFQLPERGSRLCLYEDGTELTEDYFPSVPDNAELVLLTLGQAWQGWFCHVSQDSLTLLGSSCPPALVS

SEQ ID NO: 13990 - protein, 273 aa, Homo sapiens
MEANMPKRKEPGRSLRIKVISMGNAEVGKSCIIKRYCEKRFVSKYLATIGIDYGVTKVHVRDREIKVNIFDMAGHPFFYEVRNEFYKDTQGVILVYDVGQKDSFDALDAWLAEMKQELGPHGNMENIIFVVCANKIDCTKHRCVDESEGRLWAESKGFLYFETSAQTGEGINEMFQTFYISIVDLCENGGKRPTTNSSASFTKEQADAIRRIRNSKDSWDMLGVKPGASRDEVNKAYRKLAVLLHPDKCVAPGSEDAFKAVVNARTALLKNIK

SEQ ID NO: 13991 - protein, 90 aa, Homo sapiens
MEANMPKRKEPGRSLRIKVISMGNAEVGKSCIIKRYCEKRFVSKYLATIGIDYGVTKVHVRDREIKVNIFDMAGHPFFYEMRKLRRREVK

SEQ ID NO: 13992 - protein, 177 aa, Homo sapiens
MEANMPKRKEPGRSLRIKVISMGNAEVGKSCIIKRYCEKRFVSKYLATIGIDYGVTKVHVRDREIKVNIFDMAGHPFFYEVRNEFYKDTQGVILVYDVGQKDSFDALDAWLAEMKQELGPHGNMENIIFVVCANKIDCTKHRCVDESEGRLWAESKGFLYFETSAQTGEGINEMFQG

SEQ ID NO: 13993 - protein, 723 aa, Homo sapiens
MGSRCALALAVLSALLCQVWSSGVFELKLQEFVNKKGLLGNRNCCRGGAGPPPCACRTFFRVCLKHYQASVSPEPPCTYGSAVTPVLGVDSFSLPDGGGADSAFSNPIRFPFGFTWPGTFSLIIEALHTDSPDDLATENPERLISRLATQRHLTVGEEWSQDLHSSGRTDLKYSYRFVCDEHYYGEGCSVFCRPRDDAFGHFTCGERGEKVCNPGWKGPYCTEPICLPGCDEQHGFCDKPGECKCRVGWQGRYCDECIRYPGCLHGTCQQPWQCNCQEGWGGLFCNQDLNYCTHHKPCKNGATCTNTGQGSYTCSCRPGYTGATCELGIDECDPSPCKNGGSCTDLENSYSCTCPPGFYGKICELSAMTCADGPCFNGGRCSDSPDGGYSCRCPVGYSGFNCEKKIDYCSSSPCSNGAKCVDLGDAYLCRCQAGFSGRHCDDNVDDCASSPCANGGTCRDGVNDFSCTCPPGYTGRNCSAPVSRCEHAPCHNGATCHERGHRYVCECARGYGGPNCQFLLPELPPGPAVVDLTEKLEGQGGPFPWVAVCAGVILVLMLLLGCAAVVVCVRLRLQKHRPPADPCRGETETMNNLANCQREKDISVSIIGATQIKNTNKKADFHGDHSADKNGFKARYPAVDYNLVQDLKGDDTAVRDAHSKRDTKCQPQGSSGEEKGTPTTLRGGEASERKRPDSGCSTSKDTKYQSVYVISEEKDECVIATEV

SEQ ID NO: 13994 - protein, 247 aa, Homo sapiens
MGSRCALALAVLSALLCQVWSSGVFELKLQEFVNKKGLLGNRNCCRGGAGPPPCACRTFFRVCLKHYQASVSPEPPCTYGSAVTPVLGVDSFSLPDGGGADSAFSNPIRFPFGFTWPGTFSLIIEALHTDSPDDLATENPERLISRLATQRHLTVGEEWSQDLHSSGRTDLKYSYRFVCDEHYYGEGCSVFCRPRDDAFGHFTCGERGEKVCNPGWKGPYCTERESLGRHRWLTRPRTRTTRRDGAS

SEQ ID NO: 13995 - protein, 178 aa, Homo sapiens
MSPSGRLCLLTIVGLILPTRGQTLKDTTSSSSADSTIMDIQVPTRAPDAVYTELQPTSPTPTWPADETPQPQTQTQQLEGTDGPLVTDPETHKSTKAAHPTDDTTTLSERPSPSTDVQTDPQTLKPSGFHEDDPFFYDEHTLRKRGLLVAAVLFITGIIILTSGKCRQLSRLCRNRCR

SEQ ID NO: 13996 - protein, 107 aa, Homo sapiens
MQTLSNIPCFCLHGSLLPSTDLATLSAHPTDDTTTLSERPSPSTDVQTDPQTLKPSGFHEDDPFFYDEHTLRKRGLLVAAVLFITGIIILTSGKCRQLSRLCRNRCR

SEQ ID NO: 13997 - protein, 618 aa, Homo sapiens
MVSPRMSGLLSQTVILALIFLPQTRPAGVFELQIHSFGPGPGPGAPRSPCSARLPCRLFFRVCLKPGLSEEAAESPCALGAALSARGPVYTEQPGAPAPDLPLPDGLLQVPFRDAWPGTFSFIIETWREELGDQIGGPAWSLLARVAGRRRLAAGGPWARDIQRAGAWELRFSYRARCEPPAVGTACTRLCRPRSAPSRCGPGLRPCAPLEDECEAPLVCRAGCSPEHGFCEQPGECRCLEGWTGPLCTVPVSTSSCLSPRGPSSATTGCLVPGPGPCDGNPCANGGSCSETPRSFECTCPRGFYGLRCEVSGVTCADGPCFNGGLCVGGADPDSAYICHCPPGFQGSNCEKRVDRCSLQPCRNGGLCLDLGHALRCRCRAGFAGPRCEHDLDDCAGRACANGGTCVEGGGAHRCSCALGFGGRDCRERADPCAARPCAHGGRCYAHFSGLVCACAPGYMGARCEFPVHPDGASALPAAPPGLRPGDPQRYLLPPALGLLVAAGVAGAALLLVHVRRRGHSQDAGSRLLAGTPEPSVHALPDALNNLRTQEGSGDGPSSSVDWNRPEDVDPQGIYVISAPSIYAREVATPLFPPLHTGRAGQRQHLLFPYPSSILSVK

SEQ ID NO: 13998 - protein, 587 aa, Homo sapiens
MVSPRMSGLLSQTVILALIFLPQTRPAGVFELQIHSFGPGPGPGAPRSPCSARLPCRLFFRVCLKPGLSEEAAESPCALGAALSARGPVYTEQPGAPAPDLPLPDGLLQVPFRDAWPGTFSFIIETWREELGDQIGGPAWSLLARVAGRRRLAAGGPWARDIQRAGAWELRFSYRARCEPPAVGTACTRLCRPRSAPSRCGPGLRPCAPLEDECEAPLVCRAGCSPEHGFCEQPGECRCLEGWTGPLCTVPVSTSSCLSPRGPSSATTGCLVPGPGPCDGNPCANGGSCSETPRSFECTCPRGFYGLRCEVSGVTCADGPCFNGGLCVGGADPDSAYICHCPPGFQGSNCEKRVDRCSLQPCRNGGLCLDLGHALRCRCRAGFAGPRCEHDLDDCAGRACANGGTCVEGGGAHRCSCALGFGGRDCRERADPCAARPCAHGGRCYAHFSGLVCACAPGYMGARCEFPVHPDGASALPAAPPGLRPGDPQRYLLPPALGLLVAAGVAGAALLLVHVRRRGHSQDAGSRLLAGTPEPSVHALPDALNNLRTQEGSGDGPSSSVDWNRPEDVDPQGIYVISAPSIYAREA

SEQ ID NO: 13999 - protein, 1220 aa, Homo sapiens [sequence omitted]

SEQ ID NO: 14000 - protein, 95 aa, Homo sapiens
MELVLVFLCSLLAPMVLASAAEKEKEMDPFHYDYQTLRIGGLVFAVVLFSVGILLILSRRCKCSFNQKPRAPGDEEAQVENLITANATEPQKAEN

SEQ ID NO: 14001 - protein, 112 aa, Homo sapiens
MELVLVFLCSLLAPMVLASAAEKEKEMDPFHYDYQTLRIGGLVFAVVLFSVGILLILRPQEMRKPRWRTSSPPMQQSPRKQRTEVQPSGGRRQPQGGRGPVLLWQKIPLWGQ

SEQ ID NO: 14002 - protein, 80 aa, Homo sapiens
MATPTQTPTKAPEEPDPFYYDYNTVQTVGMTLATILFLLGILIVISKKVKCRKADSRSESPTCKSCKSELPSSAPGGGGV

SEQ ID NO: 14003 - protein, 96 aa, Homo sapiens
MAEVEETLKRIQSHKGVIGTMVVNAEGIPIRTTLDNSTTVQYAGLLHHLTMKAKSTVRDIDPQNDLTFLRIRSKKHEIMVAPDKEYLLIVIQNPCE

SEQ ID NO: 14004 - protein, 194 aa, Homo sapiens
MGANQLVVLNVYDMYWMNEYTSSIGIGVFHSGIEVYGREFAYGGHPYPFSGIFEISPGNASELGETFKFKEAVVLGSTDFLEDDIEKIVEELGKEYKGNAYHLMHKNCNHFSSALSEILCGKEIPRWINRLAYFSSCIPFLQSCLPKEWLTPAALQSSVSQELQDELEEAEDAAASASVASTAAGSRPGRHTKL

SEQ ID NO: 14005 - protein, 161 aa, Homo sapiens
MGANQLVVLNVYDMYWMNEYTSSIGIGVFHSGIEVYGRAVVLGSTDFLEDDIEKIVEELGKEYKGNAYHLMHKNCNHFSSALSEILCGKEIPRWINRLAYFSSCIPFLQSCLPKEWLTPAALQSSVSQELQDELEEAEDAAASASVASTAAGSRPGRHTKL

SEQ ID NO: 14006 - protein, 337 aa, Homo sapiens
MAFFSRLNLQEGLQTFFVLQWIPVYIFLGAIPILLIPYFLLFSKFWPLAVLSLAWLTYDWNTHSQGGRRSAWVRNWTLWKYFRNYFPVKLVKTHDLSPKHNYIIANHPHGILSFGVFINFATEATGIARIFPSITPFVGTLERIFWIPIVREYVMSMGVCPVSSSALKYLLTQKGSGNAVVIVVGGAAEALLCRPGASTLFLKQRKGFVKMALQTGAYLVPSYSFGENEVFNQETFPEGTWLRLFQKTFQDTFKKILGLNFCTFHGRGFTRGSWGFLPFNRPITTVVGEPLPIPRIKRPNQKTVDKYHALYISALRKLFDQHKVEYGLPETQELTIT

SEQ ID NO: 14007 - protein, 224 aa, Homo sapiens
MVAAVLLGLSWLCSPLGALVLDFNNIRSSADLHGARKGSQCLSDTDCNTRKFCLQPRDEKPFCATCRGLRRRCQRDAMCCPGTLCVNDVCTTMEDATPILERQLDEQDGTHAEGTTGHPVQENQPKRKPSIKKSQGRKGQEGESCLRTFDCGPGLCCARHFWTKICKPVLLEGQVCSRRGHKDTAQAPEIFQRCDCGPGLLCRSQLTSNRQHARLRVCQKIEKL

SEQ ID NO: 14008 - protein, 470 aa, Homo sapiens
MSQAYSSSQRVSSYRRTFGGAPGFPLGSPLSSPVFPRAGFGSKGSSSSVTSRVYQVSRTSGGAGGLGSLRASRLGTTRTPSSYGAGELLDFSLADAVNQEFLTTRTNEKVELQELNDRFANYIEKVRFLEQQNAALAAEVNRLKGREPTRVAELYEEELRELRRQVEVLTNQRARVDVERDNLLDDLQRLKAKLQEEIQLKEEAENNLAAFRADVDAATLARIDLERRIESLNEEIAFLKKVHEEEIRELQAQLQEQQVQVEMDMSKPDLTAALRDIRAQYETIAAKNISEAEEWYKSKVSDLTQAANKNNDALRQAKQEMMEYRHQIQSYTCEIDALKGTNDSLMRQMRELEDRFASEASGYQDNIARLEEEIRHLKDEMARHLREYQDLLNVKMALDVEIATYRKLLEGEESRINLPIQTYSALNFRETSPEQRGSEVHTKKTVMIKTIETRDGEVVSEATQQQHEVL

SEQ ID NO: 14009 - protein, 728 aa, Homo sapiens
MEGEGVRNFKELRAKFQNLDAPPLPGPIKFPAGVSPKGDIGGTQSTQILANGKPLSSNHKQRTPYCSSSESQPLQPQKIKLAQKSEIPKCSNSPGPLGKSTVCSATSSQKASLLLEVTQSNVEIITKEKVMVANSFRNKLWNWEKVSSQKSEMSSALLLANYGSKAIHLEGQKGMGLTPEEPRKKLETKGAQTLPSQKHVVAPKILHNVSEDPSFVISQHIRKSWENPPPERSPASSPCQPIYECELASQAPEKQPDVRHHHLPKTKPLPSIDSLGPPPPKPSRPPIVNLQAFQRQPAAVPKTQGEVTVEEGSLSPERLFNAEFEEPHNYEATISYLRHSGNSINLCTAKEIADPTYEVGIEELQKPGKNFPYPEPSAKHEDKKMKEKQPCELKPKNTEKEPYSNHVFKVDACEGTPEKIQMTNVHTGRRNMLAGKQEAMIDIIQTNPCPEGPKLARHSQGHCGHLEVLESTKETPDLGVSKTSSISEEIYDDVEYSRKEVPKLNYSSSLASSSEENRELYEDVYKTKNNYPKIDLDGKEALKRLQQFFKKEKDRFKIKKTKSKENLSAFSILLPDLELKSQEVIIYDDVDLSEKESKDEDKLKMWKPKFLTPKEKKEKNGAEESESFSPRNFFKTKKQNLEKNRMKREEKLFRERFKYDKEIIVINTAVACSNNSRNGIFDLPISPGEELEVIDTTEQNLVICRNSKGKYGYVLIEHLDFKHQSWSP

SEQ ID NO: 14010 - protein, 358 aa, Homo sapiens
MEGEGVRNFKELRAKFQNLDAPPLPGPIKFPAGVSPKGDIGGTQSTQILANGKPLSSNHKQRTPYCSSSESQPLQPQKIKLAQKSEIPKCSNSPGPLGKSTVCSATSSQKASLLLEVTQSNVEIITKEKVMVANSFRNKLWNWEKVSSQKSEMSSALLLANYGSKAIHLEGQKGMGLTPEEPRKKLETKGAQTLPSQKHVVAPKILHNVSEDPSFVISQHIRKSWENPPPERSPASSPCQPIYECELASQAPEKQPDVRHHHLPKTKPLPSIDSLGPPPPKPSRPPIVNLQAFQRQPAAVPKTQGEVTVEEGSLSPERLFNAEFEEPHNYEATISYLRHSGNSINLCTAKEIADRRCL

SEQ ID NO: 14011 - protein, 699 aa, Homo sapiens
MIPASAKAPHKQPHKQSISIGRGTRKRDEDSGTEVGEGTDEWAQSKATVRPPDQLELTDAELKEEFTRILTANNPHAPQNIVRYSFKEGTYKPIGFVNQLAVHYTQVGNLIPKDSDEGRRQHYRDELVAGSQESVKVISETGNLEEDEEPKELETEPGSQTDVPAAGAAEKVTEEELMTPKQPKERKLTNQFNFSERASQTYNNPVRDRECQTEPPPRTNFSATANQWEIYDAYVEELEKQEKTKEKEKAKTPVAKKSGKMAMRKLTSMESQTDDLIKLSQAAKIMERMVNQNTYDDIAQDFKYYDDAADEYRDQVGTLLPLWKFQNDKAKRLSVTALCWNPKYRDLFAVGYGSYDFMKQSRGMLLLYSLKNPSFPEYMFSSNSGVMCLDIHVDHPYLVAVGHYDGNVAIYNLKKPHSQPSFCSSAKSGKHSDPVWQVKWQKDDMDQNLNFFSVSSDGRIVSWTLVKRKLVHIDVIKLKVEGSTTEVPEGLQLHPVGCGTAFDFHKEIDYMFLVGTEEGKIYKCSKSYSSQFLDTYDAHNMSVDTVSWNPYHTKVFMSCSSDWTVKIWDHTIKTPMFIYDLNSAVGDVAWAPYSSTVFAAVTTDGKAHIFDLAINKYEAICNQPVAAKKNRLTHVQFNLIHPIIIVGDDRGHIISLKLSPNLRKMPKEKKGQEVQKGPAVEIAKLDKLLNLVREVKIKT

SEQ ID NO: 14012 - protein, 168 aa, Homo sapiens
MIPASAKAPHKQPHKQSISIGRGTRKRDEDSGTEVGEGTDEWAQSKATVRPPDQLELTDAELKEEFTRILTANNPHAPQNIVRYSFKKQWSLGFIPKLKRKIPVNYWGQDEGEISNETVRVIYSLGIFIMKIVTILLNINIEHLLCVRHCVNRLFLLFLILIIIMQIR

SEQ ID NO: 14013 - protein, 466 aa, Homo sapiens
MVMEKPSPLLVGREFVRQYYTLLNQAPDMLHRFYGKNSSYVHGGLDSNGKPADAVYGQKEIHRKVMSQNFTNCHTKIRHVDAHATLNDGVVVQVMGLLSNNNQALRRFMQTFVLAPEGSVANKFYVHNDIFRYQDEVFGGFVTEPQEESEEEVEEPEERQQTPEVVPDDSGTFYDQAVVSNDMEEHLEEPVAEPEPDPEPEPEQEPVSEIQEEKPEPVLEETAPEDAQKSSSPAPADIAQTVQEDLRTFSWASVTSKNLPPSGAVPVTGIPPHVVKVPASQPRPESKPESQIPPQRPQRDQRVREQRINIPPQRGPRPIREAGEQGDIEPRRMVRHPDSHQLFIGNLPHEVDKSELKDFFQSYGNVVELRINSGGKLPNFGFVVFDDSEPVQKVLSNRPIMFRGEVRLNVEEKKTRAAREGDRRDNRLRGPGGPRGGLGGGMRGPPRGGMVQKPGFGVGRGLAPRQ

SEQ ID NO: 14014 - protein, 122 aa, Homo sapiens
MVMEKPSPLLVGREFVRQYYTLLNQAPDMLHRFYGKNSSYVHGGLDSNGKPADAVYGQKEIHRKVMSQNFTNCHTKIRHVDAHATLNDGVVVQVMGLLSNNNQALRRFMQTFVLAPESLKKK

SEQ ID NO: 14015 - protein, 165 aa, Homo sapiens
MASGVQVADEVCRIFYDMKVRKCSTPEEIKKRKKAVIFCLSADKKCIIVEEGKEILVGDVGVTITDPFKHFVGMLPEKDCRYALYDASFETKESRKEELMFFLWAPELAPLKSKMIYASSKDAIKKKFQGIKHECQANGPEDLNRACIAEKLGGSLIVAFEGCPV

SEQ ID NO: 14016 - protein, 148 aa, Homo sapiens
MKVRKCSTPEEIKKRKKAVIFCLSADKKCIIVEEGKEILVGDVGVTITDPFKHFVGMLPEKDCRYALYDASFETKESRKEELMFFLWAPELAPLKSKMIYASSKDAIKKKFQGIKHECQANGPEDLNRACIAEKLGGSLIVAFEGCPV

SEQ ID NO: 14017 - protein, 482 aa, Homo sapiens
MVMEKPSPLLVGREFVRQYYTLLNKAPEYLHRFYGRNSSYVHGGVDASGKPQEAVYGQNDIHHKVLSLNFSECHTKIRHVDAHATLSDGVVVQVMGLLSNSGQPERKFMQTFVLAPEGSVPNKFYVHNDMFRYEDEVFGDSEPELDEESEDEVEEEQEERQPSPEPVQENANSGYYEAHPVTNGIEEPLEESSHEPEPEPESETKTEELKPQVEEKNLEELEEKSTTPPPAEPVSLPQEPPKAFSWASVTSKNLPPSGTVSSSGIPPHVKAPVSQPRVEAKPEVQSQPPRVREQRPRERPGFPPRGPRPGRGDMEQNDSDNRRIIRYPDSHQLFVGNLPHDIDENELKEFFMSFGNVVELRINTKGVGGKLPNFGFVVFDDSEPVQRILIAKPIMFRGEVRLNVEEKKTRAARERETRGGGDDRRDIRRNDRGPGGPRGIVGGGMMRDRDGRGPPPRGGMAQKLGSGRGTGQMEGRFTGQRR

SEQ ID NO: 14018 - protein, 449 aa, Homo sapiens
MVMEKPSPLLVGREFVRQYYTLLNKAPEYLHRFYGRNSSYVHGGVDASGKPQEAVYGQNDIHHKVLSLNFSECHTKIRHVDAHATLSDGVVVQVMGLLSNSGQPERKFMQTFVLAPEGSVPNKFYVHNDMFRYEDEVFGDSEPELDEESEDEVEEEQEERQPSPEPVQENANSGYYEAHPVTNGIEEPLEESSHEPEPEPESETKTEELKPQVEEKNLEELEEKSTTPPPAEPVSLPQEPPKPRVEAKPEVQSQPPRVREQRPRERPGFPPRGPRPGRGDMEQNDSDNRRIIRYPDSHQLFVGNLPHDIDENELKEFFMSFGNVVELRINTKGVGGKLPNFGFVVFDDSEPVQRILIAKPIMFRGEVRLNVEEKKTRAARERETRGGGDDRRDIRRNDRGPGGPRGIVGGGMMRDRDGRGPPPRGGMAQKLGSGRGTGQMEGRFTGQRR

SEQ ID NO: 14019 - protein, 550 aa, Homo sapiens
MDHHVSTIKPRRIQNQNVIHRLERRRISSGKAGTHWHQVRVFHQNVFPNFTVVNVEKPPCFLRKFSPDGRYFIAFSSDQTSLEIYEYQGCQAAEDLLQGYEGEILSNGNDQRSVNIRGRLFERFFVLLHITNVAANGEHLNRECSLFTDDCRCVIVGSAAYLPDEPHPPFFEVYRNSESVTPNPRSPLEDYSLHIIDLHTGRLCDTRTFKCDKVVLSHNQGLYLYKNILAILSVQQQTIHVFQVTPEGTFIDVRTIGRFCYEDDLLTVSAVFPEVQRDSQTGMANPFRDPFINSLKHRLLVYLWRRAEQDGSAMAKRRFFQYFDQLRQLRMWKMQLLDENHLFIKYTSEDVVTLRVTDPSQASFFVVYNMVTTEVIAVFENTSDELLELFENFCDLFRNATLHSEVQFPCSASSNNFARQIQRRFKDTIINAKYGGHTEAVRRLLGQLPISAQSYSGSPYLDLSLFSYDDKWVSVMERPKTCGDHPIRFYARDSGLLKFEIQAGLLGRPINHTVRRLVAFTFHPFEPFAISVQRTNAEYVVNFHMRHCCT

SEQ ID NO: 14020 - protein, 561 aa, Homo sapiens
MVGQILKRDVIMDHHVSTIKPRRIQNQNVIHRLERRRISSGKAGTHWHQVRVFHQNVFPNFTVVNVEKPPCFLRKFSPDGRYFIAFSSDQTSLEIYEYQGCQAAEDLLQGYEGEILSNGNDQRSVNIRGRLFERFFVLLHITNVAANGEHLNRECSLFTDDCRCVIVGSAAYLPDEPHPPFFEVYRNSESVTPNPRSPLEDYSLHIIDLHTGRLCDTRTFKCDKVVLSHNQGLYLYKNILAILSVQQQTIHVFQVTPEGTFIDVRTIGRFCYEDDLLTVSAVFPEVQRDSQTGMANPFRDPFINSLKHRLLVYLWRRAEQDGSAMAKRRFFQYFDQLRQLRMWKMQLLDENHLFIKYTSEDVVTLRVTDPSQASFFVVYNMVTTEVIAVFENTSDELLELFENFCDLFRNATLHSEVQFPCSASSNNFARQIQRRFKDTIINAKYGGHTEAVRRLLGQLPISAQSYSGSPYLDLSLFSYDDKWVSVMERPKTCGDHPIRFYARDSGLLKFEIQAGLLGRPINHTVRRLVAFTFHPFEPFAISVQRTNAEYVVNFHMRHCCT

SEQ ID NO: 14021 - protein, 885 aa, Homo sapiens
MSHPDYRMNLRPLGTPRGVSAVAGPHDIGASPGDKKSKNRSTRGKKKSIFETYMSKEDVSEGLKRGTLIQGVLRINPKKFHEAFIPSPDGDRDIFIDGVVARNRALNGDLVVVKLLPEEHWKVVKPESNDKETEAAYESDIPEELCGHHLPQQSLKSYNDSPDVIVEAQFDGSDSEDGHGITQNVLVDGVKKLSVCVSEKGREDGDAPVTKDETTCISQDTRALSEKSLQRSAKVVYILEKKHSRAATGFLKLLADKNSELFRKYALFSPSDHRVPRIYVPLKDCPQDFVARPKDYANTLFICRIVDWKEDCNFALGQLAKSLGQAGEIEPETEGILTEYGVDFSDFSSEVLECLPQGLPWTIPPEEFSKRRDLRKDCIFTIDPSTARDLDDALSCKPLADGNFKVGVHIADVSYFVPEGSDLDKVAAERATSVYLVQKVVPMLPRLLCEELCSLNPMSDKLTFSVIWTLTPEGKILDEWFGRTIIRSCTKLSYEHAQSMIESPTEKIPAKELPPISPEHSSEEVHQAVLNLHGIAKQLRQQRFVDGALRLDQLKLAFTLDHETGLPQGCHIYEYRESNKLVEEFMLLANMAVAHKIHRAFPEQALLRRHPPPQTRMLSDLVEFCDQMGLPVDFSSAGALNKSLTQTFGDDKYSLARKEVLTNMCSRPMQMALYFCSGLLQDPAQFRHYALNVPLYTHFTSPIRRFADVLVHRLLAAALGYRERLDMAPDTLQKQADHCNDRRMASKRVQELSTSLFFAVLVKESGPLESEAMVMGILKQAFDVLVLRYGVQKRIYCNALALRSHHFQKVGKKPELTLVWEPEDMEQEPAQQVITIFSLVEVVLQAESTALKYSAILKRPGTQGHLGPEKEEEESDGEPEDSSTS

SEQ ID NO: 14022 - protein, 619 aa, Homo sapiens
MSHPDYRMNLRPLGTPRGVSAVAGPHDIGASPGDKKSKNRSTRGKKKSIFETYMSKEDVSEGLKRGTLIQGVLRINPKKFHEAFIPSPDGDRDIFIDGVVARNRALNGDLVVVKLLPEEHWKVVKPESNDKETEAAYESDIPEELCGHHLPQQSLKSYNDSPDVIVEAQFDGSDSEDGHGITQNVLVDGVKKLSVCVSEKGREDGDAPVTKDETTCISQDTRALSEKSLQRSAKVVYILEKKHSRAATGFLKLLADKNSELFRKYALFSPSDHRVPRIYVPLKDCPQDFVARPKDYANTLFICRIVDWKEDCNFALGQLAKSLGQAGEIEPETEGILTEYGVDFSDFSSEVLECLPQGLPWTIPPEEFSKRRDLRKDCIFTIDPSTARDLDDALSCKPLADGNFKVGVHIADVSYFVPEGSDLDKVAAERATSVYLVQKVVPMLPRLLCEELCSLNPMSDKLTFSVIWTLTPEGKILDEWFGRTIIRSCTKLSYEHAQSMIESPTEKIPAKELPPISPEHSSEEVHQAVLNLHGIAKQLRQQRFVDGALRLDQLKLAFTLDHETGLPQGCHIYEYRESNKPCCAGTPRPKQGCSVTWWNSATRWGCPWTSAPQEPSIKA

SEQ ID NO: 14023 - protein, 603 aa, Homo sapiens
MSHPDYRMNLRPLGTPRGVSAVAGPHDIGASPGDKKSKNRSTRGKKKSIFETYMSKEDVSEGLKRGTLIQGVLRINPKKFHEAFIPSPDGDRDIFIDGVVARNRALNGDLVVVKLLPEEHWKVVKPESNDKETEAAYESDIPEELCGHHLPQQSLKSYNDSPDVIVEAQFDGSDSEDGHGITQNVLVDGVKKLSVCVSEKGREDGDAPVTKDETTCISQDTRALSEKSLQRSAKVVYILEKKHSRAATGFLKLLADKNSELFRKYALFSPSDHRVPRIYVPLKDCPQDFVARPKDYANTLFICRIVDWKEDCNFALGQLAKSLGQAGEIEPETEGILTEYGVDFSDFSSEVLECLPQGLPWTIPPEEFSKRRDLRKDCIFTIDPSTARDLDDALSCKPLADGNFKVGVHIADVSYFVPEGSDLDKVAAERATSVYLVQKVVPMLPRLLCEELCSLNPMSDKLTFSVIWTLTPEGKILDEWFGRTIIRSCTKLSYEHAQSMIESPTEKIPAKELPPISPEHSSEEVHQQNADKDGAAHLQASHSPSAEDAEAQPSTEERLPETRGICDRDPDTRLFFLQQQSRVLEAKPQNTIRVEEQTTQLQI

SEQ ID NO: 14024 - protein, 249 aa, Homo sapiens
MSHPDYRMNLRPLGTPRGVSAVAGPHDIGASPGDKKSKNRSTRGKKKSIFETYMSKEDVSEGLKRGTLIQGVLRINPKKFHEAFIPSPDGDRDIFIDGVVARNRALNGDLVVVKLLPEEHWKVVKPESNDKETEAAYESDIPEELCGHHLPQQSLKSYNDSPDVIVEAQFDGSDSEDGHGITQNVLVDGVKKLSVCVSEKGREDGDAPVTKDETTCISQDTRALSEKSLQRSAKVIAYRFSPRVQMAFT

SEQ ID NO: 14025 - protein, 356 aa, Homo sapiens
MSHPDYRMNLRPLGTPRGVSAVAGPHDIGASPGDKKSKNRSTRGKKKSIFETYMSKEDVSEGLKRGTLIQGVLRINPKKFHEAFIPSPDGDRDIFIDGVVARNRALNGDLVVVKLLPEEHWKVVKPESNDKETEAAYESDIPEELCGHHLPQQSLKSYNDSPDVIVEAQFDGSDSEDGHGITQNVLVDGVKKLSVCVSEKDNEIEAQRSSWAYPVSHRKSEERMVMHRLQKMRPPAFHKTQELYRRNPCKDQQRWFTSWRKNILEQQPASSNSWLIRTANCLGNTPCFLPQTTECLEFMCLSRTVPRTLWHGLKIMPTHCSSAALWTGRRTAILPWGSWLRVLGRLVKLSLKQKEY

SEQ ID NO: 14026 - protein, 773 aa, Homo sapiens
METDESPSPLPCGPAGEAVMESRARPFQALPREQSPPPPLQTSSGAEVMDVGSGGDGQSELPAEDPFNFYGASLLSKGSFSKGRLLIDPNCSGHSPRTARHAPAVRKFSPDLKLLKDVKISVSFTESCRSKDRKVLYTGAERDVRAECGLLLSPVSGDVHACPFGGSVGDGVGIGGESADKKDEENELDQEKRVEYAVLDELEDFTDNLELDEEGAGGFTAKAIVQRDRVDEEALNFPYEDDFDNDVDALLEEGLCAPKKRRTEEKYGGDSDHPSDGETSVQPMMTKIKTVLKSRGRPPTEPLPDGWIMTFHNSGVPVYLHRESRVVTWSRPYFLGTGSIRKHDPPLSSIPCLHYKKMKDNEEREQSSDLTPSGDVSPVKPLSRSAELEFPLDEPDSMGADPGPPDEKDPLGAEAAPGALGQVKAKVEVCKDESVDLEEFRSYLEKRFDFEQVTVKKFRTWAERRQFNREMKRKQAESERPILPANQKLITLSVQDAPTKKEFVINPNGKSEVCILHEYMQRVLKVRPVYNFFECENPSEPFGASVTIDGVTYGSGTASSKKLAKNKAARATLEILIPDFVKQTSEEKPKDSEELEYFNHISIEDSRVYELTSKAGLLSPYQILHECLKRNHGMGDTSIKFEVVPGKNQKSEYVMACGKHTVRGWCKNKRVGKQLASQKILQLLHPHVKNWGSLLRMYGRESSKMVKQETSDKSVIELQQYAKKNKPNLHILSKLQEEMKRLAEEREETRKKPKMSIVASAQPGGEPLCTVDV

SEQ ID NO: 14027 - protein, 304 aa, Homo sapiens
METDESPSPLPCGPAGEAVMESRARPFQALPREQSPPPPLQTSSGAEVMDVGSGGDGQSELPAEDPFNFYGASLLSKGSFSKGRLLIDPNCSGHSPRTARHAPAVRKFSPDLKLLKDVKISVSFTESCRSKDRKVLYTGAERDVRAECGLLLSPVSGDVHACPFGGSVGDGVGIGGESADKKDEENELDQEKRVEYAVLDELEDFTDNLELDEEGAGGFTAKAIVQRDRVDEEALNFPYEDDFDNDVDALLEEGLCAPKKRRTEEKYGGDSDHPSDGETSVQPMMTKIKTVLKSRGRPPTEPVL

SEQ ID NO: 14028 - protein, 740 aa, Homo sapiens
METDESPSPLPCGPAGEAVMESRARPFQALPREQSPPPPLQTSSGAEVMDVGSGGDGQSELPAEDPFNFYGASLLSKGSFSKGRLLIDPNCSGHSPRTARHAPAVRKFSPDLKLLKDVKISVSFTESCRSKDRKVLYTGAERDVRAECGLLLSPVSGDVHACPFGGSVGDGVGIGGESADKKDEENELDQEKRVEYAVLDELEDFTDNLELDEEGAGGFTAKAIVQRDRVDEEALNFPYEDDFDNDVDALLEEGLCAPKKRRTEEKYGGDSDHPSDGETSVQPMMTKIKTVLKSRGRPPTEPLPDGWIMTFHNSGVPVYLHRESRVVTWSRPYFLGTGSIRKHDPPLSSIPCLHYKKMKDNEEREQSSDLTPSGDVSPVKPLSRSAELEFPLDEPDSMGADPGPPDEKDPLGAEAAPGALGQVKAKVEVCKDESVDLEEFRSYLEKRFDFEQVTVKKFRTWAERRQFNREMKRKQAESERPILPANQKLITLSVQDAPTKKEFVINPNGKSEVCILHEYMQRVLKVRPVYNFFECARATLEILIPDFVKQTSEEKPKDSEELEYFNHISIEDSRVYELTSKAGLLSPYQILHECLKRNHGMGDTSIKFEVVPGKNQKSEYVMACGKHTVRGWCKNKRVGKQLASQKILQLLHPHVKNWGSLLRMYGRESSKMVKQETSDKSVIELQQYAKKNKPNLHILSKLQEEMKRLAEEREETRKKPKMSIVASAQPGGEPLCTVDV

SEQ ID NO: 14029 - protein, 244 aa, Homo sapiens
MAAAAAAGEARRVLVYGGRGALGSRCVQAFRARNWWVASVDVVENEEASASIIVKMTDSFTEQADQVTAEVGKLLGEEKVDAILCVAGGWAGGNAKSKSLFKNCDLMWKQSIWTSTISSHLATKHLKEGGLLTLAGAKAALDGTPGMIGYGMAKGAVHQLCQSLAGKNSGMPPGAAAIAVLPVTLDTPMNRKSMPEADFSSWTPLEFLVETFHDWITGKNRPSSGSLIQVVTTEGRTELTPAYF

SEQ ID NO: 14030 - protein, 213 aa, Homo sapiens
MAAAAAAGEARRVLVYGGRGALGSRCVQAFRARNWVTAEVGKLLGEEKVDAILCVAGGWAGGNAKSKSLFKNCDLMWKQSIWTSTISSHLATKHLKEGGLLTLAGAKAALDGTPGMIGYGMAKGAVHQLCQSLAGKNSGMPPGAAAIAVLPVTLDTPMNRKSMPEADFSSWTPLEFLVETFHDWITGKNRPSSGSLIQVVTTEGRTELTPAYF

SEQ ID NO: 14031 - protein, 1193 aa, Homo sapiens
MERHQPRLHHPAQGSAAGTPYPSSASLRGCRESKMPRRKGPQHPPPPSGPEEPGEKRPKFHLNIRTLTDDMLDKFASIRIPGSKKERPPLPNLKTAFASSDCSAAPLEMMENFPKPLSENELLELFEKMMEDMNLNEDKKAPLREKDFSIKKEMVMQYINTASKTGSLKRSRQISPQEFIHELKMGSADERLVTCLESLRVSLTSNPVSWVESFGHEGLGLLLDILEKLISGKIQEKVVKKNQHKVIQCLKALMNTQYGLERIMSEERSLSLLAKAVDPRHPNMMTDVVKLLSAVCIVGEESILEEVLEALTSAGEEKKIDRFFCIVEGLRHNSVQLQVACMQLINALVTSPDDLDFRLHIRNEFMRCGLKEILPNLKCIKNDGLDIQLKVFDEHKEEDLFELSHRLEDIRAELDEAYDVYNMVWSTVKETRAEGYFISILQHLLLIRNDYFIRQQYFKLIDECVSQIVLHRDGMDPDFTYRKRLDLDLTQFVDICIDQAKLEEFEEKASELYKKFEKEFTDHQETQAELQKKEAKINELQAELQAFKSQFGALPADCNIPLPPSKEGGTGHSALPPPPPLPSGGGVPPPPPPPPPPPLPGMRMPFSGPVPPPPPLGFLGGQNSPPLPILPFGLKPKKEFKPEISMRRLNWLKIRPHEMTENCFWIKVNENKYENVDLLCKLENTFCCQQKERREEEDIEEKKSIKKKIKELKFLDSKIAQNLSIFLSSFRVPYEEIRMMILEVDETRLAESMIQNLIKHLPDQEQLNSLSQFKSEYSNLCEPEQFVVVMSNVKRLRPRLSAILFKLQFEEQVNNIKPDIMAVSTACEEIKKSKSFSKLLELVLLMGNYMNAGSRNAQTFGFNLSSLCKLKDTKSADQKTTLLHFLVEICEEKYPDILNFVDDLEPLDKASKVSVETLEKNLRQMGRQLQQLEKELETFPPPEDLHDKFVTKMSRFVISAKEQYETLSKLHENMEKLYQSIIGYYAIDVKKVSVEDFLTDLNNFRTTFMQAIKENIKKREAEEKEKRVRIAKELAERERLERQQKKKRLLEMKTEGDETGVMDNLLEALQSGAAFRDRRKRTPMPKDVRQSLSPMSQRPVLKVCNHENQKVQLTEGSRSHYNINCNSTRTPVAKELNYNLDTHTSTGRIKAAEKKEACNVESNRKKETELLGSFSKNESVPEVEALLARLRAL

SEQ ID NO: 14032 - protein, 849 aa, Homo sapiens
MSEERSLSLLAKAVDPRHPNMMTDVVKLLSAVCIVGEESILEEVLEALTSAGEEKKIDRFFCIVEGLRHNSVQLQVACMQLINALVTSPDDLDFRLHIRNEFMRCGLKEILPNLKCIKNDGLDIQLKVFDEHKEEDLFELSHRLEDIRAELDEAYDVYNMVWSTVKETRAEGYFISILQHLLLIRNDYFIRQQYFKLIDECVSQIVLHRDGMDPDFTYRKRLDLDLTQFVDICIDQAKLEEFEEKASELYKKFEKEFTDHQETQAELQKKEAKINELQAELQAFKSQFGALPADCNIPLPPSKEGGTGHSALPPPPPLPSGGGVPPPPPPPPPPPLPGMRMPFSGPVPPPPPLGFLGGQNSPPLPILPFGLKPKKEFKPEISMRRLNWLKIRPHEMTENCFWIKVNENKYENVDLLCKLENTFCCQQKERREEEDIEEKKSIKKKIKELKFLDSKIAQNLSIFLSSFRVPYEEIRMMILEVDETRLAESMIQNLIKHLPDQEQLNSLSQFKSEYSNLCEPEQFVVVMSNVKRLRPRLSAILFKLQFEEQVNNIKPDIMAVSTACEEIKKSKSFSKLLELVLLMGNYMNAGSRNAQTFGFNLSSLCKLKDTKSADQKTTLLHFLVEICEEKYPDILNFVDDLEPLDKASKVSVETLEKNLRQMGRQLQQLEKELETFPPPEDLHDKFVTKMSRFVISAKEQYETLSKLHENMEKLYQSIIGYYAIDVKKVSVEDFLTDLNNFRTTFMQAIKENIKKREAEEKEKRVRIAKELAERERLERQQKKKRLLEMKTEGDETGVMDNLLEALQSGAAFRDRRKRTPMPKDVRQSLSPMSQRPVLKVCNHGNKPYL

SEQ ID NO: 14033 - protein, 691 aa, Homo sapiens
MSEERSLSLLAKAVDPRHPNMMTDVVKLLSAVCIVGEESILEEVLEALTSAGEEKKIDRFFCIVEGLRHNSVQLQVACMQLINALVTSPDDLDFRLHIRNEFMRCGLKEILPNLKCIKNDGLDIQLKVFDEHKEEDLFELSHRLEDIRAELDEAYDVYNMVWSTVKETRAEGYFISILQHLLLIRNDYFIRQQYFKLIDECVSQIVLHRDGMDPDFTYRKRLDLDLTQFVDICIDQAKLEEFEEKASELYKKFEKEFTDHQETQAELQKKEAKINELQAELQAFKSQFGALPADCNIPLPPSKEGGTGHSALPPPPPLPSGGGVPPPPPPPPPPPLPGMRMPFSGPVPPPPPLGFLGGQNSPPLPILPFGLKPKKEFKPEISMRRLNWLKIRPHEMTENCFWIKVNENKYENVDLLCKLENTFCCQQKERREEEDIEEKKSIKKKIKELKFLDSKIAQNLSIFLSSFRVPYEEIRMMILEVDETRLAESMIQNLIKHLPDQEQLNSLSQFKSEYSNLCEPEQFVVVMSNVKRLRPRLSAILFKLQFEEQVNNIKPDIMAVSTACEEIKKSKSFSKLLELVLLMGNYMNAGSRNAQTFGFNLSSLCKLKDTKSADQKTTLLHFLVEICEEKYPDILNFVDDLEPLDKASKGLCLFKKHFMALIFSAKRLKIIPFICMYFPLSHSVFIPNISF

SEQ ID NO: 14034 - protein, 1182 aa, Homo sapiens
MERHQPRLHHPAQGSAAGTPYPSSASLRGCRESKMPRRKGPQHPPPPSGPEEPGEKRPKFLDKFASIRIPGSKKERPPLPNLKTAFASSDCSAAPLEMMENFPKPLSENELLELFEKMMEDMNLNEDKKAPLREKDFSIKKEMVMQYINTASKTGSLKRSRQISPQEFIHELKMGSADERLVTCLESLRVSLTSNPVSWVESFGHEGLGLLLDILEKLISGKIQEKVVKKNQHKVIQCLKALMNTQYGLERIMSEERSLSLLAKAVDPRHPNMMTDVVKLLSAVCIVGEESILEEVLEALTSAGEEKKIDRFFCIVEGLRHNSVQLQVACMQLINALVTSPDDLDFRLHIRNEFMRCGLKEILPNLKCIKNDGLDIQLKVFDEHKEEDLFELSHRLEDIRAELDEAYDVYNMVWSTVKETRAEGYFISILQHLLLIRNDYFIRQQYFKLIDECVSQIVLHRDGMDPDFTYRKRLDLDLTQFVDICIDQAKLEEFEEKASELYKKFEKEFTDHQETQAELQKKEAKINELQAELQAFKSQFGALPADCNIPLPPSKEGGTGHSALPPPPPLPSGGGVPPPPPPPPPPPLPGMRMPFSGPVPPPPPLGFLGGQNSPPLPILPFGLKPKKEFKPEISMRRLNWLKIRPHEMTENCFWIKVNENKYENVDLLCKLENTFCCQQKERREEEDIEEKKSIKKKIKELKFLDSKIAQNLSIFLSSFRVPYEEIRMMILEVDETRLAESMIQNLIKHLPDQEQLNSLSQFKSEYSNLCEPEQFVVVMSNVKRLRPRLSAILFKLQFEEQVNNIKPDIMAVSTACEEIKKSKSFSKLLELVLLMGNYMNAGSRNAQTFGFNLSSLCKLKDTKSADQKTTLLHFLVEICEEKYPDILNFVDDLEPLDKASKVSVETLEKNLRQMGRQLQQLEKELETFPPPEDLHDKFVTKMSRFVISAKEQYETLSKLHENMEKLYQSIIGYYAIDVKKVSVEDFLTDLNNFRTTFMQAIKENIKKREAEEKEKRVRIAKELAERERLERQQKKKRLLEMKTEGDETGVMDNLLEALQSGAAFRDRRKRTPMPKDVRQSLSPMSQRPVLKVCNHENQKVQLTEGSRSHYNINCNSTRTPVAKELNYNLDTHTSTGRIKAAEKKEACNVESNRKKETELLGSFSKNESVPEVEALLARLRAL

SEQ ID NO: 14035 - protein, 1147 aa, Homo sapiens
MERHQPRLHHPAQGSAAGTPYPSSASLRGCRESKMPRRKGPQHPPPPSGPEEPGEKRPKFLDKFASIRIPGSKKERPPLPNLKTAFASSDCSAAPLEMMENFPKPLSENELLELFEKMMGSLKRSRQISPQEFIHELKMGSADERLVTCLESLRVSLTSNPVSWVESFGHEGLGLLLDILEKLISGKIQEKVVKKNQHKVIQCLKALMNTQYGLERIMSEERSLSLLAKAVDPRHPNMMTDVVKLLSAVCIVGEESILEEVLEALTSAGEEKKIDRFFCIVEGLRHNSVQLQVACMQLINALVTSPDDLDFRLHIRNEFMRCGLKEILPNLKCIKNDGLDIQLKVFDEHKEEDLFELSHRLEDIRAELDEAYDVYNMVWSTVKETRAEGYFISILQHLLLIRNDYFIRQQYFKLIDECVSQIVLHRDGMDPDFTYRKRLDLDLTQFVDICIDQAKLEEFEEKASELYKKFEKEFTDHQETQAELQKKEAKINELQAELQAFKSQFGALPADCNIPLPPSKEGGTGHSALPPPPPLPSGGGVPPPPPPPPPPPLPGMRMPFSGPVPPPPPLGFLGGQNSPPLPILPFGLKPKKEFKPEISMRRLNWLKIRPHEMTENCFWIKVNENKYENVDLLCKLENTFCCQQKERREEEDIEEKKSIKKKIKELKFLDSKIAQNLSIFLSSFRVPYEEIRMMILEVDETRLAESMIQNLIKHLPDQEQLNSLSQFKSEYSNLCEPEQFVVVMSNVKRLRPRLSAILFKLQFEEQVNNIKPDIMAVSTACEEIKKSKSFSKLLELVLLMGNYMNAGSRNAQTFGFNLSSLCKLKDTKSADQKTTLLHFLVEICEEKYPDILNFVDDLEPLDKASKVSVETLEKNLRQMGRQLQQLEKELETFPPPEDLHDKFVTKMSRFVISAKEQYETLSKLHENMEKLYQSIIGYYAIDVKKVSVEDFLTDLNNFRTTFMQAIKENIKKREAEEKEKRVRIAKELAERERLERQQKKKRLLEMKTEGDETGVMDNLLEALQSGAAFRDRRKRTPMPKDVRQSLSPMSQRPVLKVCNHENQKVQLTEGSRSHYNINCNSTRTPVAKELNYNLDTHTSTGRIKAAEKKEACNVESNRKKETELLGSFSKNESVPEVEALLARLRAL

SEQ ID NO: 14036 - protein, 1123 aa, Homo sapiens
MERHQPRLHHPAQGSAAGTPYPSSASLRGCRESKMPRRKGPQHPPPPSGPEEPGEKRPKFEDMNLNEDKKAPLREKDFSIKKEMVMQYINTASKTGSLKRSRQISPQEFIHELKMGSADERLVTCLESLRVSLTSNPVSWVESFGHEGLGLLLDILEKLISGKIQEKVVKKNQHKVIQCLKALMNTQYGLERIMSEERSLSLLAKAVDPRHPNMMTDVVKLLSAVCIVGEESILEEVLEALTSAGEEKKIDRFFCIVEGLRHNSVQLQVACMQLINALVTSPDDLDFRLHIRNEFMRCGLKEILPNLKCIKNDGLDIQLKVFDEHKEEDLFELSHRLEDIRAELDEAYDVYNMVWSTVKETRAEGYFISILQHLLLIRNDYFIRQQYFKLIDECVSQIVLHRDGMDPDFTYRKRLDLDLTQFVDICIDQAKLEEFEEKASELYKKFEKEFTDHQETQAELQKKEAKINELQAELQAFKSQFGALPADCNIPLPPSKEGGTGHSALPPPPPLPSGGGVPPPPPPPPPPPLPGMRMPFSGPVPPPPPLGFLGGQNSPPLPILPFGLKPKKEFKPEISMRRLNWLKIRPHEMTENCFWIKVNENKYENVDLLCKLENTFCCQQKERREEEDIEEKKSIKKKIKELKFLDSKIAQNLSIFLSSFRVPYEEIRMMILEVDETRLAESMIQNLIKHLPDQEQLNSLSQFKSEYSNLCEPEQFVVVMSNVKRLRPRLSAILFKLQFEEQVNNIKPDIMAVSTACEEIKKSKSFSKLLELVLLMGNYMNAGSRNAQTFGFNLSSLCKLKDTKSADQKTTLLHFLVEICEEKYPDILNFVDDLEPLDKASKVSVETLEKNLRQMGRQLQQLEKELETFPPPEDLHDKFVTKMSRFVISAKEQYETLSKLHENMEKLYQSIIGYYAIDVKKVSVEDFLTDLNNFRTTFMQAIKENIKKREAEEKEKRVRIAKELAERERLERQQKKKRLLEMKTEGDETGVMDNLLEALQSGAAFRDRRKRTPMPKDVRQSLSPMSQRPVLKVCNHENQKVQLTEGSRSHYNINCNSTRTPVAKELNYNLDTHTSTGRIKAAEKKEACNVESNRKKETELLGSFSKNESVPEVEALLARLRAL

SEQ ID NO: 14037 - protein, 1112 aa, Homo sapiens
MERHQPRLHHPAQGSAAGTPYPSSASLRGCRESKMPRRKGPQHPPPPSGPEEPGEKRPKFHLNIRTLTDDMLDKFASIRIPGSKKERPPLPNLKTAFASSDCSAAPLEMMENFPKPLSENELLELFEKMMEDMNLNEDKKAPLREKDFSIKKEMVMQYINTASKTGSLKRSRQISPQEFIHELKMGSADERLVTCLESLRVSLTSNPVSWVESFGHEGLGLLLDILEKLISGKIQEKVVKKNQHKVIQCLKALMNTQYGLERIMSEERSLSLLAKAVDPRHPNMMTDVVKLLSAVCIVGEESILEEVLEALTSAGEEKKIDRFFCIVEGLRHNSVQLQVACMQLINALVTSPDDLDFRLHIRNEFMRCGLKEILPNLKCIKNDGLDIQLKVFDEHKEEDLFELSHRLEDIRAELDEAYDVYNMVWSTVKETRAEGYFISILQHLLLIRNDYFIRQQYFKLIDECVSQIVLHRDGMDPDFTYRKRLDLDLTQFVDICIDQAKLEEFEEKASELYKKFEKEFTDHQETQAELQKKEAKINELQAELQAFKSQFGALPADCNIPLPPSKEGGTGHSALPPPPPLPSGGGVPPPPPPPPPPPLPGMRMPFSGPVPPPPPLGFLGGQNSPPLPILPFGLKPKKEFKPEISMRRLNWLKIRPHEMTENCFWIKVNENKYENVDLLCKLENTFCCQQKERREEEDIEEKKSIKKKIKELKFLDSKIAQNLSIFLSSFRVPYEEIRMMILEVDETRLAESMIQNLIKHLPDQEQLNSLSQFKSEYSNLCEPEQFVVVMSNVKRLRPRLSAILFKLQFEEQVNNIKPDIMAVSTACEEIKKSKSFSKLLELVLLMGNYMNAGSRNAQTFGFNLSSLCKLKDTKSADQKTTLLHFLVEICEEKYPDILNFVDDLEPLDKASKVSVETLEKNLRQMGRQLQQLEKELETFPPPEDLHDKFVTKMSRFVISAKEQYETLSKLHENMEKLYQSIIGYYAIDVKKVSVEDFLTDLNNFRTTFMQAIKENIKKREAEEKEKRVRIAKELAERERLERQQKKKRLLEMKTEGDETGVMDNLLEALQSGAAFRDRRKRTPMPKDVRQSLSPMSQRPVLKVCNHGNKPYL

SEQ ID NO: 14038 - protein, 458 aa, Homo sapiens
MATESPATRRVQVAEHPRLLKLKEMFNSKFGSIPKFYVRAPGRVNIIGEHIDYCGYSVLPMAVEQDVLIAVEPVKTYALQLANTNPLYPDFSTSANNIQIDKTKPLWHNYFLCGLKGIQEHFGLSNLTGMNCLVDGNIPPSSGLSSSSALVCCAGLVTLTVLGRNLSKVELAEICAKSERYIGTEGGGMDQSISFLAEEGTAKLIEFSPLRATDVKLPSGAVFVIANSCVEMNKAATSHFNIRVMECRLAAKLLAKYKSLQWDKVLRLEEVQAKLGISLEEMLLVTEDALHPEPYNPEEICRCLGISLEELRTQILSPNTQDVLIFKLYQRAKHVYSEAARVLQFKKICEEAPENMVQLLGELMNQSHMSCRDMYECSCPELDQLVDICRKFGAQGSRLTGAGWGGCTVSMVPADKLPSFLANVHKAYYQRSDGSLAPEKQSLFATKPGGGALVLLEA

SEQ ID NO: 14039 - protein, 447 aa, Homo sapiens
MPVLYDRLLKLKEMFNSKFGSIPKFYVRAPGRVNIIGEHIDYCGYSVLPMAVEQDVLIAVEPVKTYALQLANTNPLYPDFSTSANNIQIDKTKPLWHNYFLCGLKGIQEHFGLSNLTGMNCLVDGNIPPSSGLSSSSALVCCAGLVTLTVLGRNLSKVELAEICAKSERYIGTEGGGMDQSISFLAEEGTAKLIEFSPLRATDVKLPSGAVFVIANSCVEMNKAATSHFNIRVMECRLAAKLLAKYKSLQWDKVLRLEEVQAKLGISLEEMLLVTEDALHPEPYNPEEICRCLGISLEELRTQILSPNTQDVLIFKLYQRAKHVYSEAARVLQFKKICEEAPENMVQLLGELMNQSHMSCRDMYECSCPELDQLVDICRKFGAQGSRLTGAGWGGCTVSMVPADKLPSFLANVHKAYYQRSDGSLAPEKQSLFATKPGGGALVLLEA

SEQ ID NO: 14040 - protein, 870 aa, Homo sapiens
MFFACYCALRTNVKKYRYQDEDAPHDHSLPRLTHEVRGPELVHVSEKNLSQIENVHGYVLQSHISPLKASPAPIIVNTDTLDTIPYVNGTEIEYEFEEITLERGNSGLGFSIAGGTDNPHIGDDPGIFITKIIPGGAAAEDGRLRVNDCILRVNEVDVSEVSHSKAVEALKEAGSIVRLYVRRRRPILETVVEIKLFKGPKGLGFSIAGGVGNQHIPGDNSIYVTKIIDGGAAQKDGRLQVGDRLLMVNNYSLEEVTHEEAVAILKNTSEVVYLKVGKPTTIYMTDPYGPPDITHSYSPPMENHLLSGNNGTLEYKTSLPPISPGRYSPIPKHMLVDDDYTRPPEPVYSTVNKLCDKPASPRHYSPVECDKSFLLSAPYSHYHLGLLPDSEMTSHSQHSTATRQPSMTLQRAVSLEGEPRKVVLHKGSTGLGFNIVGGEDGEGIFVSFILAGGPADLSGELQRGDQILSVNGIDLRGASHEQAAAALKGAGQTVTIIAQYQPEDYARFEAKIHDLREQMMNHSMSSGSGSLRTNQKRSLYVRAMFDYDKSKDSGLPSQGLSFKYGDILHVINASDDEWWQARRVMLEGDSEEMGVIPSKRRVERKERARLKTVKFNAKPGVIDSKGSFNDKRKKSFIFSRKFPFYKNKEQSEQETSDPERGQEDLILSYEPVTRQEINYTRPVIILGPMKDRINDDLISEFPDKFGSCVPHTTRPKRDYEVDGRDYHFVISREQMEKDIQEHKFIEAGQYNDNLYGTSVQSVRFVAERGKHCILDVSGNAIKRLQVAQLYPIAIFIKPRSLEPLMEMNKRLTEEQAKKTYDRAIKLEQEFGEYFTAIVQGDTLEDIYNQCKLVIEEQSGPFIWIPSKEKL

SEQ ID NO: 14041 - protein, 975 aa, Homo sapiens
MGIFKSSLFQALLDIQEFYEVTLLNSQKSCEQKIEEANQVLQKWEKTSLLAPCHDRLQKSSELTDCSGSKENASCIEQNKENQSFENETDETTTQNQGRCPAQNCSVEAPAWMPVHHCTKYRYQDEDAPHDHSLPRLTHEVRGPELVHVSEKNLSQIENVHGYVLQSHISPLKASPAPIIVNTDTLDTIPYVNGTEIEYEFEEITLERGNSGLGFSIAGGTDNPHIGDDPGIFITKIIPGGAAAEDGRLRVNDCILRVNEVDVSEVSHSKAVEALKEAGSIVRLYVRRRRPILETVVEIKLFKGPKGLGFSIAGGVGNQHIPGDNSIYVTKIIDGGAAQKDGRLQVGDRLLMVNNYSLEEVTHEEAVAILKNTSEVVYLKVGKPTTIYMTDPYGPPDITHSYSPPMENHLLSGNNGTLEYKTSLPPISPGRYSPIPKHMLVDDDYTRPPEPVYSTVNKLCDKPASPRHYSPVECDKSFLLSAPYSHYHLGLLPDSEMTSHSQHSTATRQPSMTLQRAVSLEGEPRKVVLHKGSTGLGFNIVGGEDGEGIFVSFILAGGPADLSGELQRGDQILSVNGIDLRGASHEQAAAALKGAGQTVTIIAQYQPEDYARFEAKIHDLREQMMNHSMSSGSGSLRTNQKRSLYVRAMFDYDKSKDSGLPSQGLSFKYGDILHVINASDDEWWQARRVMLEGDSEEMGVIPSKRRVERKERARLKTVKFNAKPGVIDSKGSFNDKRKKSFIFSRKFPFYKNKEQSEQETSDPERGQEDLILSYEPVTRQEINYTRPVIILGPMKDRINDDLISEFPDKFGSCVPHTTRPKRDYEVDGRDYHFVISREQMEKDIQEHKFIEAGQYNDNLYGTSVQSVRFVAERGKHCILDVSGNAIKRLQVAQLYPIAIFIKPRSLEPLMEMNKRLTEEQAKKTYDRAIKLEQEFGEYFTAIVQGDTLEDIYNQCKLVIEEQSGPFIWIPSKEKL

SEQ ID NO: 14042 - protein, 749 aa, Homo sapiens
MQRPSVSRAENYQLLWDTIASLKQCEQAMQHAFIPVNGTEIEYEFEEITLERGNSGLGFSIAGGTDNPHIGDDPGIFITKIIPGGAAAEDGRLRVNDCILRVNEVDVSEVSHSKAVEALKEAGSIVRLYVRRRRPILETVVEIKLFKGPKGLGFSIAGGVGNQHIPGDNSIYVTKIIDGGAAQKDGRLQVGDRLLMVNNYSLEEVTHEEAVAILKNTSEVVYLKVGKPTTIYMTDPYGPPDITHSYSPPMENHLLSGNNGTLEYKTSLPPISPGRYSPIPKHMLVDDDYTSHSQHSTATRQPSMTLQRAVSLEGEPRKVVLHKGSTGLGFNIVGGEDGEGIFVSFILAGGPADLSGELQRGDQILSVNGIDLRGASHEQAAAALKGAGQTVTIIAQYQPEDYARFEAKIHDLREQMMNHSMSSGSGSLRTNQKRSLYVRAMFDYDKSKDSGLPSQGLSFKYGDILHVINASDDEWWQARRVMLEGDSEEMGVIPSKRRVERKERARLKTVKFNAKPGVIDSKGDIPGLGDDGYGTKTLRGQEDLILSYEPVTRQEINYTRPVIILGPMKDRINDDLISEFPDKFGSCVPHTTRPKRDYEVDGRDYHFVISREQMEKDIQEHKFIEAGQYNDNLYGTSVQSVRFVAERGKHCILDVSGNAIKRLQVAQLYPIAIFIKPRSLEPLMEMNKRLTEEQAKKTYDRAIKLEQEFGEYFTAIVQGDTLEDIYNQCKLVIEEQSGPFIWIPSKEKL

SEQ ID NO: 14043 - protein, 909 aa, Homo sapiens
MNAYLTKQHSCSRGSDGMDAVRSAPTLIRDAHCACGWQRNCQGLGYSSQTMPSSGPGGPASNRTGGSSFNRTLWDSVRKSPHKTSTKGKGTCGEHCTCPHGWFSPAQASPAPIIVNTDTLDTIPYVNGTEIEYEFEEITLERGNSGLGFSIAGGTDNPHIGDDPGIFITKIIPGGAAAEDGRLRVNDCILRVNEVDVSEVSHSKAVEALKEAGSIVRLYVRRRRPILETVVEIKLFKGPKGLGFSIAGGVGNQHIPGDNSIYVTKIIDGGAAQKDGRLQVGDRLLMVNNYSLEEVTHEEAVAILKNTSEVVYLKVGKPTTIYMTDPYGPPDITHSYSPPMENHLLSGNNGTLEYKTSLPPISPGRYSPIPKHMLVDDDYTRPPEPVYSTVNKLCDKPASPRHYSPVECDKSFLLSAPYSHYHLGLLPDSEMTSHSQHSTATRQPSMTLQRAVSLEGEPRKVVLHKGSTGLGFNIVGGEDGEGIFVSFILAGGPADLSGELQRGDQILSVNGIDLRGASHEQAAAALKGAGQTVTIIAQYQPEDYARFEAKIHDLREQMMNHSMSSGSGSLRTNQKRSLYVRAMFDYDKSKDSGLPSQGLSFKYGDILHVINASDDEWWQARRVMLEGDSEEMGVIPSKRRVERKERARLKTVKFNAKPGVIDSKGSFNDKRKKSFIFSRKFPFYKNKEQSEQETSDPERGQEDLILSYEPVTRQEINYTRPVIILGPMKDRINDDLISEFPDKFGSCVPHTTRPKRDYEVDGRDYHFVISREQMEKDIQEHKFIEAGQYNDNLYGTSVQSVRFVAERGKHCILDVSGNAIKRLQVAQLYPIAIFIKPRSLEPLMEMNKRLTEEQAKKTYDRAIKLEQEFGEYFTAIVQGDTLEDIYNQCKLVIEEQSGPFIWIPSKEKL

SEQ ID NO: 14044 - protein, 334 aa, Homo sapiens
MMNHSMSSGSGSLRTNQKRSLYVRAMFDYDKSKDSGLPSQGLSFKYGDILHVINASDDEWWQARRVMLEGDSEEMGVIPSKRRVERKERARLKTVKFNAKPGVIDSKGDIPGLGDDGYGTKTLRGQEDLILSYEPVTRQEINYTRPVIILGPMKDRINDDLISEFPDKFGSCVPHTTRPKRDYEVDGRDYHFVISREQMEKDIQEHKFIEAGQYNDNLYGTSVQSVRFVAERGKHCILDVSGNAIKRLQVAQLYPIAIFIKPRSLEPLMEMNKRLTEEQAKKTYDRAIKLEQEFGEYFTAIVQGDTLEDIYNQCKLVIEEQSGPFIWIPSKEKL

SEQ ID NO: 14045 - protein, 817 aa, Homo sapiens
MHKHQHCCKCPECYEVTRLAALRRLEPPGYGDWQVPDPYGPGGGNGASAGYGGYSSQTLPSQAGATPTPRTKAKLIPTGRDVGPVPPKPVPGKSTPKLNGSGPSWWPECTCTNRDWYEQVNGSDGMFKYEEIVLERGNSGLGFSIAGGIDNPHVPDDPGIFITKIIPGGAAAMDGRLGVNDCVLRVNEVDVSEVVHSRAVEALKEAGPVVRLVVRRRQPPPETIMEVNLLKGPKGLGFSIAGGIGNQHIPGDNSIYITKIIEGGAAQKDGRLQIGDRLLAVNNTNLQDVRHEEAVASLKNTSDMVYLKVAKPGSLHLNDMYAPPDYASTFTALADNHISHNSSLGYLGAVESKVSYPAPPQVPPTRYSPIPRHMLAEEDFTREPRKIILHKGSTGLGFNIVGGEDGEGIFVSFILAGGPADLSGELRRGDRILSVNGVNLRNATHEQAAAALKRAGQSVTIVAQYRPEEYSRFESKIHDLREQMMNSSMSSGSGSLRTSEKRSLYVRALFDYDRTRDSCLPSQGLSFSYGDILHVINASDDEWWQARLVTPHGESEQIGVIPSKKRVEKKERARLKTVKFHARTGMIESNRDFPGLSDDYYGAKNLKGQEDAILSYEPVTRQEIHYARPVIILGPMKDRVNDDLISEFPHKFGSCVPHTTRPRRDNEVDGQDYHFVVSREQMEKDIQDNKFIEAGQFNDNLYGTSIQSVRAVAERGKHCILDVSGNAIKRLQQAQLYPIAIFIKPKSIEALMEMNRRQTYEQANKIYDKAMKLEQEFGEYFTAIVQGDSLEEIYNKIKQIIEDQSGHYIWVPSPEKL

SEQ ID NO: 14046 - protein, 512 aa, Homo sapiens
MERARKFSGSGLAMGLGSASASAWRRASQRWAWPLRSLRPGGDAREPRKIILHKGSTGLGFNIVGGEDGEGIFVSFILAGGPADLSGELRRGDRILSVNGVNLRNATHEQAAAALKRAGQSVTIVAQYRPEEYSRFESKIHDLREQMMNSSMSSGSGSLRTSEKRSLYVRALFDYDRTRDSCLPSQGLSFSYGDILHVINASDDEWWQARLVTPHGESEQIGVIPSKKRVEKKERARLKTVKFHARTGMIESNRSIKTKRKKSFRLSRKFPFYKSKENMAQESSIQEQGVTSNTSDSESSSKGQEDAILSYEPVTRQEIHYARPVIILGPMKDRVNDDLISEFPHKFGSCVPHTTRPRRDNEVDGQDYHFVVSREQMEKDIQDNKFIEAGQFNDNLYGTSIQSVRAVAERGKHCILDVSGNAIKRLQQAQLYPIAIFIKPKSIEALMEMNRRQTYEQANKIYDKAMKLEQEFGEYFTAIVQGDSLEEIYNKIKQIIEDQSGHYIWVPSPEKL

SEQ ID NO: 14047 - protein, 366 aa, Homo sapiens
MMNSSMSSGSGSLRTSEKRSLYVRALFDYDRTRDSCLPSQGLSFSYGDILHVINASDDEWWQARLVTPHGESEQIGVIPSKKRVEKKERARLKTVKFHARTGMIESNRSIKTKRKKSFRLSRKFPFYKSKENMAQESSIQEQGVTSNTSDSESSSKGQEDAILSYEPVTRQEIHYARPVIILGPMKDRVNDDLISEFPHKFGSCVPHTTRPRRDNEVDGQDYHFVVSREQMEKDIQDNKFIEAGQFNDNLYGTSIQSVRAVAERGKHCILDVSGNAIKRLQQAQLYPIAIFIKPKSIEALMEMNRRQTYEQANKIYDKAMKLEQEFGEYFTAIVQGDSLEEIYNKIKQIIEDQSGHYIWVPSPEKL

SEQ ID NO: 14048 - protein, 260 aa, Homo sapiens
MARPGMERWRDRLALVTGASGGIGAAVARALVQQGLKVVGCARTVGNIEELAAECKSAGYPGTLIPYRCDLSNEEDILSMFSAIRSQHSGVDICINNAGLARPDTLLSGSTSGWKDMFNVNVLALSICTREAYQSMKERNVDDGHIININSMSGHRVLPLSVTHFYSATKYAVTALTEGLRQELREAQTHIRATCISPGVVETQFAFKLHDKDPEKAAATYEQMKCLKPEDVAEAVIYVLSTPAHIQIGDIQMRPTEQVT

SEQ ID NO: 14049 - protein, 181 aa, Homo sapiens
MFSAIRSQHSGVDICINNAGLARPDTLLSGSTSGWKDMFNVNVLALSICTREAYQSMKERNVDDGHIININSMSGHRVLPLSVTHFYSATKYAVTALTEGLRQELREAQTHIRATCISPGVVETQFAFKLHDKDPEKAAATYEQMKCLKPEDVAEAVIYVLSTPAHIQIGDIQMRPTEQVT

SEQ ID NO: 14050 - protein, 229 aa, Homo sapiens
MARPGMERWRDRLALVTGASGGIGAAVARALVQQGLKVVGCARTVGNIEELAAECKSAGYPGTLIPYRCDLSNEEDILSMFSAIRSQHSGVDICINNAGLARPDTLLSGSTSGWKDMFNVNVLALSICTREAYQSMKERNVDDGHIININSMSGHRVLPLSVTHFYSATKYAVTALTEGLRQELREAQTHIRATCLKPEDVAEAVIYVLSTPAHIQIGDIQMRPTEQVT

SEQ ID NO: 14051 - protein, 1009 aa, Homo sapiens
MGSRIKQNPETTFEVYVEVAYPRTGGTLSDPEVQRQFPEDYSDQEVLQTLTKFCFPFYVDSLTVSQVGQNFTFVLTDIDSKQRFGFCRLSSGAKSCFCILSYLPWFEVFYKLLNILADYTTKRQENQWNELLETLHKLPIPDPGVSVHLSVHSYFTVPDTRELPSIPENRNLTEYFVAVDVNNMLHLYASMLYERRILIICSKLSTLTACIHGSAAMLYPMYWQHVYIPVLPPHLLDYCCAPMPYLIGIHLSLMEKVRNMALDDVVILNVDTNTLETPFDDLQSLPNDVISSLKNRLKKVSTTTGDGVARAFLKAQAAFFGSYRNALKIEPEEPITFCEEAFVSHYRSGAMRQFLQNATQLQLFKQFIDGRLDLLNSGEGFSDVFEEEINMGEYAGSDKLYHQWLSTVRKGSGAILNTVKTKANPAMKTVYKFAKDHAKMGIKEVKNRLKQKDIAENGCAPTPEEQLPKTAPSPLVEAKDPKLREDRRPITVHFGQVRPPRPHVVKRPKSNIAVEGRRTSVPSPEQPQPYRTLRESDSAEGDEAESPEQQVRKSTGPVPAPPDRAASIDLLEDVFSNLDMEAALQPLGQAKSLEDLRAPKDLREQPGTFDYQRLDLGGSERSRGVTVALKLTHPYNKLWSLGQDDMAIPSKPPAASPEKPSALLGNSLALPRRPQNRDSILNPSDKEEVPTPTLGSITIPRPQGRKTPELGIVPPPPIPRPAKLQAAGAALGDVSERLQTDRDRRAALSPGLLPGVVPQGPTELLQPLSPGPGAAGTSSDALLALLDPLSTAWSGSTLPSRPATPNVATPFTPQFSFPPAGTPTPFPQPPLNPFVPSMPAAPPTLPLVSTPAGPFGAPPASLGPAFASGLLLSSAGFCAPHRSQPNLSALSMPNLFGQMPMGTHTSPLQPLGPPAVAPSRIRTLPLARSSARAAETKQGLALRPGDPPLLPPRPPQGLEPTLQPSAPQQARDPFEDLLQKTKQDVSPSPALAPAPDSVEQLRKQWETFE

SEQ ID NO: 14052 - protein, 559 aa, Homo sapiens
MGSRIKQNPETTFEVYVEVAYPRTGGTLSDPEVQRQFPEDYSDQEVLQTLTKFCFPFYVDSLTVSQVGQNFTFVLTDIDSKQRFGFCRLSSGAKSCFCILSYLPWFEVFYKLLNILADYTTKRQENQWNELLETLHKLPIPDPGVSVHLSVHSYFTVPDTRELPSIPENRNLTEYFVAVDVNNMLHLYASMLYERRILIICSKLSTLTACIHGSAAMLYPMYWQHVYIPVLPPHLLDYCCAPMPYLIGIHLSLMEKVRNMALDDVVILNVDTNTLETPFDDLQSLPNDVISSLKNRLKKVSTTTGDGVARAFLKAQAAFFGSYRNALKIEPEEPITFCEEAFVSHYRSGAMRQFLQNATQLQLFKQFIDGRLDLLNSGEGFSDVFEEEINMGEYAGSDKLYHQWLSTVRKGSGAILNTVKTKANPAMKTVYKFAKDHAKMGIKEVKNRLKQKDIAENGCAPTPEEQLPKTAPSPLVEAKDPKLREDRRPITVHFGQVRPPRPHVVKRPKSNIAVEGRRTSVPSPEQNTIATPATLHILQKSITHFAAKFPTRGWTSSSH

SEQ ID NO: 14053 - protein, 498 aa, Homo sapiens
MGSRIKQNPETTFEVYVEVAYPRTGGTLSDPEVQRQFPEDYSDQEVLQTLTKFCFPFYVDSLTVSQVGQNFTFVLTDIDSKQRFGFCRLSSGAKSCFCILSYLPWFEVFYKLLNILADYTTKRQENQWNELLETLHKLPIPDPGVSVHLSVHSYFTVPDTRELPSIPENRNLTEYFVAVDVNNMLHLYASMLYERRILIICSKLSTLTACIHGSAAMLYPMYWQHVYIPVLPPHLLDYCCAPMPYLIGIHLSLMEKVRNMALDDVVILNVDTNTLETPFDDLQSLPNDVISSLKNRLKKVSTTTGDGVARAFLKAQAAFFGSYRNALKIEPEEPITFCEEAFVSHYRSGAMRQFLQNATQLQLFKQFIDGRLDLLNSGEGFSDVFEEEINMGEYAGSDKLYHQWLSTVRKGSGAILNTVKTKANPAMKTVYKFAKDHAKMGIKEVKNRLKQKDIAENGCAPTPEEQLPKTAPSPLVEAKDPKLREDRRPITVHFGQAL

SEQ ID NO: 14054 - protein, 466 aa, Homo sapiens
MLKWPIPGQVALFQILRCRGNSRRTTVTSLTVSQVGQNFTFVLTDIDSKQRFGFCRLSSGAKSCFCILSYLPWFEVFYKLLNILADYTTKRQENQWNELLETLHKLPIPDPGVSVHLSVHSYFTVPDTRELPSIPENRNLTEYFVAVDVNNMLHLYASMLYERRILIICSKLSTLTACIHGSAAMLYPMYWQHVYIPVLPPHLLDYCCAPMPYLIGIHLSLMEKVRNMALDDVVILNVDTNTLETPFDDLQSLPNDVISSLKNRLKKVSTTTGDGVARAFLKAQAAFFGSYRNALKIEPEEPITFCEEAFVSHYRSGAMRQFLQNATQLQLFKQFIDGRLDLLNSGEGFSDVFEEEINMGEYAGSDKLYHQWLSTVRKGSGAILNTVKTKANPAMKTVYKFAKDHAKMGIKEVKNRLKQKDIAENGCAPTPEEQLPKTAPSPLVEAKDPKLREDRRPITVHFGQAL

SEQ ID NO: 14055 - protein, 529 aa, Homo sapiens
MLKWPIPGQVALFQEVLQTLTKFCFPFYVDSLTVSQVGQNFTFVLTDIDSKQRFGFCRLSSGAKSCFCILSYLPWFEVFYKLLNILADYTTKRQENQWNELLETLHKLPIPDPGVSVHLSVHSYFTVPDTRELPSIPENRNLTEYFVAVDVNNMLHLYASMLYERRILIICSKLSTLTACIHGSAAMLYPMYWQHVYIPVLPPHLLDYCCAPMPYLIGIHLSLMEKVRNMALDDVVILNVDTNTLETPFDDLQSLPNDVISSLKNRLKKVSTTTGDGVARAFLKAQAAFFGSYRNALKIEPEEPITFCEEAFVSHYRSGAMRQFLQNATQLQLFKQFIDGRLDLLNSGEGFSDVFEEEINMGEYAGSDKLYHQWLSTVRKGSGAILNTVKTKANPAMKTVYKFAKDHAKMGIKEVKNRLKQKDIAENGCAPTPEEQLPKTAPSPLVEAKDPKLREDRRPITVHFGQVRPPRPHVVKRPKSNIAVEGRRTSVPSPEQNTIATPATLHILQKSITHFAAKFPTRGWTSSSH

SEQ ID NO: 14056 - protein, 1020 aa, Homo sapiens
MRRPGDHGLQDQEVLQTLTKFCFPFYVDSLTVSQVGQNFTFVLTDIDSKQRFGFCRLSSGAKSCFCILSYLPWFEVFYKLLNILADYTTKRQENQWNELLETLHKLPIPDPGVSVHLSVHSYFTVPDTRELPSIPENRNLTEYFVAVDVNNMLHLYASMLYERRILIICSKLSTLTACIHGSAAMLYPMYWQHVYIPVLPPHLLDYCCAPMPYLIGIHLSLMEKVRNMALDDVVILNVDTNTLETPFDDLQSLPNDVISSLKNRLKKVSTTTGDGVARAFLKAQAAFFGSYRNALKIEPEEPITFCEEAFVSHYRSGAMRQFLQNATQLQLFKQFIDGRLDLLNSGEGFSDVFEEEINMGEYAGSDKLYHQWLSTVRKGSGAILNTVKTKANPAMKTVYKFAKDHAKMGIKEVKNRLKQKDIAENGCAPTPEEQLPKTAPSPLVEAKDPKLREDRRPITVHFGQVRPPRPHVVKRPKSNIAVEGRRTSVPSPEHLVKPLRHYAVFLSEDSSDDECQREEGPSSGFTESFFFSAPFEWPQPYRTLRESDSAEGDEAESPEQQVRKSTGPVPAPPDRAASIDLLEDVFSNLDMEAALQPLGQAKSLEDLRAPKDLREQPGTFDYQRLDLGGSERSRGVTVALKLTHPYNKLWSLGQDDMAIPSKPPAASPEKPSALLGNSLALPRRPQNRDSILNPSDKEEVPTPTLGSITIPRPQGRKTPELGIVPPPPIPRPAKLQAAGAALGDVSERLQTDRDRRAALSPGLLPGVVPQGPTELLQPLSPGPGAAGTSSDALLALLDPLSTAWSGSTLPSRPATPNVATPFTPQFSFPPAGTPTPFPQPPLNPFVPSMPAAPPTLPLVSTPAGPFGAPPASLGPAFASGLLLSSAGFCAPHRSQPNLSALSMPNLFGQMPMGTHTSPLQPLGPPAVAPSRIRTLPLARSSARAAETKQGLALRPGDPPLLPPRPPQGLEPTLQPSAPQQARDPFEDLLQKTKQDVSPSPALAPAPDSVEQLRKQWETFE

SEQ ID NO: 14057 - protein, 1010 aa, Homo sapiens
MGSRIKQNPETTFEVYVEVAYPRTGGTLSDPEVQRQFPEDYSDQEVLQTLTKFCFPFYVDSLTVSQVGQNFTFVLTDIDSKQRFGFCRLSSGAKSCFCILSYLPWFEVFYKLLNILADYTTKRQENQWNELLETLHKLPIPDPGVSVHLSVHSYFTVPDTRELPSIPENRNLTEYFVAVDVNNMLHLYASMLYERRILIICSKLSTLTACIHGSAAMLYPMYWQHVYIPVLPPHLLDYCCAPMPYLIGIHLSLMEKVRNMALDDVVILNVDTNTLETPFDDLQSLPNDVEEPITFCEEAFVSHYRSGAMRQFLQNATQLQLFKQFIDGRLDLLNSGEGFSDVFEEEINMGEYAGSDKLYHQWLSTVRKGSGAILNTVKTKANPAMKTVYKFAKDHAKMGIKEVKNRLKQKDIAENGCAPTPEEQLPKTAPSPLVEAKDPKLREDRRPITVHFGQVRPPRPHVVKRPKSNIAVEGRRTSVPSPEHLVKPLRHYAVFLSEDSSDDECQREEGPSSGFTESFFFSAPFEWPQPYRTLRESDSAEGDEAESPEQQVRKSTGPVPAPPDRAASIDLLEDVFSNLDMEAALQPLGQAKSLEDLRAPKDLREQPGTFDYQRLDLGGSERSRGVTVALKLTHPYNKLWSLGQDDMAIPSKPPAASPEKPSALLGNSLALPRRPQNRDSILNPSDKEEVPTPTLGSITIPRPQGRKTPELGIVPPPPIPRPAKLQAAGAALGDVSERLQTDRDRRAALSPGLLPGVVPQGPTELLQPLSPGPGAAGTSSDALLALLDPLSTAWSGSTLPSRPATPNVATPFTPQFSFPPAGTPTPFPQPPLNPFVPSMPAAPPTLPLVSTPAGPFGAPPASLGPAFASGLLLSSAGFCAPHRSQPNLSALSMPNLFGQMPMGTHTSPLQPLGPPAVAPSRIRTLPLARSSARAAETKQGLALRPGDPPLLPPRPPQGLEPTLQPSAPQQARDPFEDLLQKTKQDVSPSPALAPAPDSVEQLRKQWETFE

SEQ ID NO: 14058 - protein, 1919 aa, Homo sapiens
MEPQRRELLAQCQQSLAQAMTEVEAVLGLLEAAGALSPGERRQLDEEAGGAKAELLLKLLLAKERDHFQDLRAALEKTQPHLLPILYLNGVVGPPQPAEGAGSTYSVLSTMPSDSESSSSLSSVGTTGKAPSPPPLLTDQQVNEKVENLSIQLRLMTRERNELRKRLAFATHGTAFDKRPYHRLNPDYERLKIQCVRAMSDLQSLQNQHTNALKRCEEVAKETDFYHTLHSRLLSDQTRLKDDVDMLRRENGQLLRERNLLQQSWEDMKRLHEEDQKEIGDLRAQQQQVLKHNGSSEILNKLYDTAMDKLEVVKKDYDALRKRYSEKVAIHNADLSRLEQLGEENQRLLKQTEMLTQQRDTAIQLQHQCALSLRRFEAIHHELNKATAQNKDLQWEMELLQSELTELRTTQVKTAKESEKYREERDAVYSEYKLIMSERDQVISELDKLQTEVELAESKLKSSTSEKKAANEEMEALRQIKDTVTMDAGRANKEVEILRKQCKALCQELKEALQEADVAKCRRDWAFQERDKIVAERDSIRTLCDNLRRERDRAVSELAEALRSLDDTRKQKNDVSRELKELKEQMESQLEKEARFRQLMAHSSHDSAIDTDSMEWETEVVEFERETEDIDLKALGFDMAEGVNEPCFPGDCGIFVTKVDKGSIADGRLRVNDWLLRINDVDLINKDKKQAIKALLNGEGAINMVVRRRKSLGGKVVTPLHINLSGQKDSGISLENGVYAAAVLPGSPAAKEGSLAVGDRIVAINGIALDNKSLNECESLLRSCQDSLTLSLLKVFPQSSSWSGQNIFENIKDSDKMLSFRAHGPEVQAHNKRNLIQHNNSTQTDIFYTDRLEDRKEPGPPGGSSSFLHKPFPGGPLQVCPQACPSASERSLSSFRSDASGDRGFGLVDVRGRRPLLPFETEVGPCGVGEASLDKADSEGSNSGGTWPKAMLSSTAVPEKLSVYKKPKQRKSIFDPNTFKRPQTPPKIDYLLPGPGPAHSPQPSKRAGPLTPPKPPRRSDSIKFQHRLETSSESEATLVGSSPSTSPPSALPPDVDPGEPMHASPPRKARVRIASSYYPEGDGDSSHLPAKKSCDEDLTSQKVDELGQKRRRPKSAPSFRPKLAPVVIPAQFLEEQKCVPASGELSPELQEWAPYSPGHSSRHSNPPLYPSRPSVGTVPRSLTPSTTVSSILRNPIYTVRSHRVGPCSSPPAARDAGPQGLHPSVQHQGRLSLDLSHRTCSDYSEMRATHGSNSLPSSARLGSSSNLQFKAERIKIPSTPRYPRSVVGSERGSVSHSECSTPPQSPLNIDTLSSCSQSQTSASTLPRIAVNPASLGERRKDRPYVEEPRHVKVQKGSEPLGISIVSGEKGGIYVSKVTVGSIAHQAGLEYGDQLLEFNGINLRSATEQQARLIIGQQCDTITILAQYNPHVHQLSSHSRSSSHLDPAGTHSTLQGSGTTTPEHPSVIDPLMEQDEGPSTPPAKQSSSRIAGDANKKTLEPRVVFIKKSQLELGVHLCGGNLHGVFVAEVEDDSPAKGPDGLVPGDLILEYGSLDVRNKTVEEVYVEMLKPRDGVRLKVQYRPEEFTKAKGLPGDSFYIRALYDRLADVEQELSFKKDDILYVDDTLPQGTFGSWMAWQLDENAQKIQRGQIPSKYVMDQEFSRRLSMSEVKDDNSATKTLSAAARRSFFRRKHKHKRSGSKDGKDLLALDAFSSDSIPLFEDSVSLAYQRVQKVDCTALRPVLILGPLLDVVKEMLVNEAPGKFCRCPLEVMKASQQAIERGVKDCLFVDYKRRSGHFDVTTVASIKEITEKNRHCLLDIAPHAIERLHHMHIYPIVIFIHYKSAKHIKEQRDPIYLRDKVTQRHSKEQFEAAQKLEQEYSRYFTGVIQGGALSSICTQILAMVNQEQNKVLWIPACPL

SEQ ID NO: 14059 - protein, 1579 aa, Homo sapiens
MEPQRRELLAQCQQSLAQAMTEVEAVLGLLEAAGALSPGERRQLDEEAGGAKAELLLKLLLAKERDHFQDLRAALEKTQPHLLPILYLNGVVGPPQPAEGAGSTYSVLSTMPSDSESSSSLSSVGTTGKAPSPPPLLTDQQVNEKVENLSIQLRLMTRERNELRKRLAFATHGTAFDKRPYHRLNPDYERLKIQCVRAMSDLQSLQNQHTNALKRCEEVAKETDFYHTLHSRLLSDQTRLKDDVDMLRRENGQLLRERNLLQQSWEDMKRLHEEDQKEIGDLRAQQQQVLKHNGSSEILNKLYDTAMDKLEVVKKDYDALRKRYSEKVAIHNADLSRLEQLGEENQRLLKQTEMLTQQRDTAIQLQHQCALSLRRFEAIHHELNKATAQNKDLQWEMELLQSELTELRTTQVKTAKESEKYREERDAVYSEYKLIMSERDQVISELDKLQTEVELAESKLKSSTSEKKAANEEMEALRQIKDTVTMDAGRANKEVEILRKQCKALCQELKEALQEADVAKCRRDWAFQERDKIVAERDSIRTLCDNLRRERDRAVSELAEALRSLDDTRKQKNDVSRELKELKEQMESQLEKEARFRQLMAHSSHDSAIDTDSMEWETEVVEFERETEDIDLKALGFDMAEGVNEPCFPGDCGIFVTKVDKGSIADGRLRVNDWLLRINDVDLINKDKKQAIKALLNGEGAINMVVRRRKSLGGKVVTPLHINLSGQKDSGISLENGVYAAAVLPGSPAAKEGSLAVGDRIVAINGIALDNKSLNECESLLRSCQDSLTLSLLKEQKCVPASGELSPELQEWAPYSPGHSSRHSNPPLYPSRPSVGTVPRSLTPSTTVSSILRNPIYTVRSHRVGPCSSPPAARDAGPQGLHPSVQHQGRLSLDLSHRTCSDYSEMRATHGSNSLPSSARLGSSSNLQFKAERIKIPSTPRYPRSVVGSERGSVSHSECSTPPQSPLNIDTLSSCSQSQTSASTLPRIAVNPASLGERRKDRPYVEEPRHVKVQKGSEPLGISIVSGEKGGIYVSKVTVGSIAHQAGLEYGDQLLEFNGINLRSATEQQARLIIGQQCDTITILAQYNPHVHQLSSHSRSSSHLDPAGTHSTLQGSGTTTPEHPSVIDPLMEQDEGPSTPPAKQSSSRIAGDANKKTLEPRVVFIKKSQLELGVHLCGGNLHGVFVAEVEDDSPAKGPDGLVPGDLILEYGSLDVRNKTVEEVYVEMLKPRDGVRLKVQYRPEEFTKAKGLPGDSFYIRALYDRLADVEQELSFKKDDILYVDDTLPQGTFGSWMAWQLDENAQKIQRGQIPSKYVMDQEFSRRLSMSEVKDDNSATKTLSAAARRSFFRRKHKHKRSGSKDGKDLLALDAFSSDSIPLFEDSVSLAYQRVQKVDCTALRPVLILGPLLDVVKEMLVNEAPGKFCRCPLEVMKASQQAIERGVKDCLFVDYKRRSGHFDVTTVASIKEITEKNRHCLLDIAPHAIERLHHMHIYPIVIFIHYKSAKHIKEQRDPIYLRDKVTQRHSKEQFEAAQKLEQEYSRYFTGVIQGGALSSICTQILAMVNQEQNKVLWIPACPL

SEQ ID NO: 14060 - protein, 684 aa, Homo sapiens
MEPQRRELLAQCQQSLAQAMTEVEAVLGLLEAAGALSPGERRQLDEEAGGAKAELLLKLLLAKERDHFQDLRAALEKTQPHLLPILYLNGVVGPPQPAEGAGSTYSVLSTMPSDSESSSSLSSVGTTGKELKEQMESQLEKEARFRQLMAHSSHDSAIDTDSMEWETEVVEFERETEDIDLKALGFDMAEGVNEPCFPGDCGIFVTKVDKGSIADGRLRVNDWLLRINDVDLINKDKKQAIKALLNGEGAINMVVRRRKSLGGKVVTPLHINLSGQKDSGISLENGVYAAAVLPGSPAAKEGSLAVGDRIVAINGIALDNKSLNECESLLRSCQDSLTLSLLKVFPQSSSWSGQNIFENIKDSDKMLSFRAHGPEVQAHNKRNLIQHNNSTQTDIFYTDRLEDRKEPGPPGGSSSFLHKPFPGGPLQVCPQACPSASERSLSSFRSDASGDRGFGLVDVRGRRPLLPFETEVGPCGVGEASLDKADSEGSNSGGTWPKAMLSSTAVPEKLSVYKKPKQRKSIFDPNTFKRPQTPPKIDYLLPGPGPAHSPQPSKRAGPLTPPKPPRRSDSIKFQHRLETSSESEATLVGSSPSTSPPSALPPDVDPGEPMHASPPRKARVRIASSYYPEGDGDSSHLPAKKSCDEDLTSQKVDELGQKRRRPKSAPSFRPKLAPVVIPAQFLEV

SEQ ID NO: 14061 - protein, 1809 aa, Homo sapiens
MPSDSESSSSLSSVGTTGKAPSPPPLLTDQQVNEKVENLSIQLRLMTRERNELRKRLAFATHGTAFDKRPYHRLNPDYERLKIQCVRAMSDLQSLQNQHTNALKRCEEVAKETDFYHTLHSRLLSDQTRLKDDVDMLRRENGQLLRERNLLQQSWEDMKRLHEEDQKEIGDLRAQQQQVLKHNGSSEILNKLYDTAMDKLEVVKKDYDALRKRYSEKVAIHNADLSRLEQLGEENQRLLKQTEMLTQQRDTAIQLQHQCALSLRRFEAIHHELNKATAQNKDLQWEMELLQSELTELRTTQVKTAKESEKYREERDAVYSEYKLIMSERDQVISELDKLQTEVELAESKLKSSTSEKKAANEEMEALRQIKDTVTMDAGRANKEVEILRKQCKALCQELKEALQEADVAKCRRDWAFQERDKIVAERDSIRTLCDNLRRERDRAVSELAEALRSLDDTRKQKNDVSRELKELKEQMESQLEKEARFRQLMAHSSHDSAIDTDSMEWETEVVEFERETEDIDLKALGFDMAEGVNEPCFPGDCGIFVTKVDKGSIADGRLRVNDWLLRINDVDLINKDKKQAIKALLNGEGAINMVVRRRKSLGGKVVTPLHINLSGQKDSGISLENGVYAAAVLPGSPAAKEGSLAVGDRIVAINGIALDNKSLNECESLLRSCQDSLTLSLLKVFPQSSSWSGQNIFENIKDSDKMLSFRAHGPEVQAHNKRNLIQHNNSTQTDIFYTDRLEDRKEPGPPGGSSSFLHKPFPGGPLQVCPQACPSASERSLSSFRSDASGDRGFGLVDVRGRRPLLPFETEVGPCGVGEASLDKADSEGSNSGGTWPKAMLSSTAVPEKLSVYKKPKQRKSIFDPNTFKRPQTPPKIDYLLPGPGPAHSPQPSKRAGPLTPPKPPRRSDSIKFQHRLETSSESEATLVGSSPSTSPPSALPPDVDPGEPMHASPPRKARVRIASSYYPEGDGDSSHLPAKKSCDEDLTSQKVDELGQKRRRPKSAPSFRPKLAPVVIPAQFLEEQKCVPASGELSPELQEWAPYSPGHSSRHSNPPLYPSRPSVGTVPRSLTPSTTVSSILRNPIYTVRSHRVGPCSSPPAARDAGPQGLHPSVQHQGRLSLDLSHRTCSDYSEMRATHGSNSLPSSARLGSSSNLQFKAERIKIPSTPRYPRSVVGSERGSVSHSECSTPPQSPLNIDTLSSCSQSQTSASTLPRIAVNPASLGERRKDRPYVEEPRHVKVQKGSEPLGISIVSGEKGGIYVSKVTVGSIAHQAGLEYGDQLLEFNGINLRSATEQQARLIIGQQCDTITILAQYNPHVHQLSSHSRSSSHLDPAGTHSTLQGSGTTTPEHPSVIDPLMEQDEGPSTPPAKQSSSRIAGDANKKTLEPRVVFIKKSQLELGVHLCGGNLHGVFVAEVEDDSPAKGPDGLVPGDLILEYGSLDVRNKTVEEVYVEMLKPRDGVRLKVQYRPEEFTKAKGLPGDSFYIRALYDRLADVEQELSFKKDDILYVDDTLPQGTFGSWMAWQLDENAQKIQRGQIPSKYVMDQEFSRRLSMSEVKDDNSATKTLSAAARRSFFRRKHKHKRSGSKDGKDLLALDAFSSDSIPLFEDSVSLAYQRVQKVDCTALRPVLILGPLLDVVKEMLVNEAPGKFCRCPLEVMKASQQAIERGVKDCLFVDYKRRSGHFDVTTVASIKEITEKNRHCLLDIAPHAIERLHHMHIYPIVIFIHYKSAKHIKEQRDPIYLRDKVTQRHSKEQFEAAQKLEQEYSRYFTGVIQGGALSSICTQILAMVNQEQNKVLWIPACPL

SEQ ID NO: 14062 - protein, 674 aa, Homo sapiens
MRATHGSNSLPSSARLGSSSNLQFKAERIKIPSTPRYPRSVVGSERGSVSHSECSTPPQSPLNIDTLSSCSQSQTSASTLPRIAVNPASLGERRKDRPYVEEPRHVKVQKGSEPLGISIVSGEKGGIYVSKVTVGSIAHQAGLEYGDQLLEFNGINLRSATEQQARLIIGQQCDTITILAQYNPHVHQLSSHSRSSSHLDPAGTHSTLQGSGTTTPEHPSVIDPLMEQDEGPSTPPAKQSSSRIAGDANKKTLEPRVVFIKKSQLELGVHLCGGNLHGVFVAEVEDDSPAKGPDGLVPGDLILEYGSLDVRNKTVEEVYVEMLKPRDGVRLKVQYRPEEFTKAKGLPGDSFYIRALYDRLADVEQELSFKKDDILYVDDTLPQGTFGSWMAWQLDENAQKIQRGQIPSKYVMDQEFSRRLSMSEVKDDNSATKTLSAAARRSFFRRKHKHKRSGSKDGKDLLALDAFSSDSIPLFEDSVSLAYQRVQKVDCTALRPVLILGPLLDVVKEMLVNEAPGKFCRCPLEVMKASQQAIERGVKDCLFVDYKRRSGHFDVTTVASIKEITEKNRHCLLDIAPHAIERLHHMHIYPIVIFIHYKSAKHIKEQRDPIYLRDKVTQRHSKEQFEAAQKLEQEYSRYFTGVIQGGALSSICTQILAMVNQEQNKVLWIPACPL

SEQ ID NO: 14063 - protein, 1922 aa, Homo sapiens
MKSPALQPLSMAGLQLMTPASSPMGPFFGLPWQQEAIHDNIYTPRKYQVELLEAALDHNTIVCLNTGSGKTFIAVLLTKELSYQIRGDFSRNGKRTVFLVNSANQVAQQVSAVRTHSDLKVGEYSNLEVNASWTKERWNQEFTKHQVLIMTCYVALNVLKNGYLSLSDINLLVFDECHLAILDHPYREIMKLCENCPSCPRILGLTASILNGKCDPEELEEKIQKLEKILKSNAETATDLVVLDRYTSQPCEIVVDCGPFTDRSGLYERLLMELEEALNFINDCNISVHSKERDSTLISKQILSDCRAVLVVLGPWCADKVAGMMVRELQKYIKHEQEELHRKFLLFTDTFLRKIHALCEEHFSPASLDLKFVTPKVIKLLEILRKYKPYERQQFESVEWYNNRNQDNYVSWSDSEDDDEDEEIEEKEKPETNFPSPFTNILCGIIFVERRYTAVVLNRLIKEAGKQDPELAYISSNFITGHGIGKNQPRNKQMEAEFRKQEEVLRKFRAHETNLLIATSIVEEGVDIPKCNLVVRFDLPTEYRSYVQSKGRARAPISNYIMLADTDKIKSFEEDLKTYKAIEKILRNKCSKSVDTGETDIDPVMDDDDVFPPYVLRPDDGGPRVTINTAIGHINRYCARLPSDPFTHLAPKCRTRELPDGTFYSTLYLPINSPLRASIVGPPMSCVRLAERVVALICCEKLHKIGELDDHLMPVGKETVKYEEELDLHDEEETSVPGRPGSTKRRQCYPKAIPECLRDSYPRPDQPCYLYVIGMVLTTPLPDELNFRRRKLYPPEDTTRCFGILTAKPIPQIPHFPVYTRSGEVTISIELKKSGFMLSLQMLELITRLHQYIFSHILRLEKPALEFKPTDADSAYCVLPLNVVNDSSTLDIDFKFMEDIEKSEARIGIPSTKYTKETPFVFKLEDYQDAVIIPRYRNFDQPHRFYVADVYTDLTPLSKFPSPEYETFAEYYKTKYNLDLTNLNQPLLDVDHTSSRLNLLTPRHLNQKGKALPLSSAEKRKAKWESLQNKQILVPELCAIHPIPASLWRKAVCLPSILYRLHCLLTAEELRAQTASDAGVGVRSLPADFRYPNLDFGWKKSIDSKSFISISNSSSAENDNYCKHSTIVPENAAHQGANRTSSLENHDQMSVNCRTLLSESPGKLHVEVSADLTAINGLSYNQNLANGSYDLANRDFCQGNQLNYYKQEIPVQPTTSYSIQNLYSYENQPQPSDECTLLSNKYLDGNANKSTSDGSPVMAVMPGTTDTIQVLKGRMDSEQSPSIGYSSRTLGPNPGLILQALTLSNASDGFNLERLEMLGDSFLKHAITTYLFCTYPDAHEGRLSYMRSKKVSNCNLYRLGKKKGLPSRMVVSIFDPPVNWLPPGYVVNQDKSNTDKWEKDEMTKDCMLANGKLDEDYEEEDEEEESLMWRAPKEEADYEDDFLEYDQEHIRFIDNMLMGSGAFVKKISLSPFSTTDSAYEWKMPKKSSLGSMPFSSDFEDFDYSSWDAMCYLDPSKAVEEDDFVVGFWNPSEENCGVDTGKQSISYDLHTEQCIADKSIADCVEALLGCYLTSCGERAAQLFLCSLGLKVLPVIKRTDREKALCPTRENFNSQQKNLSVSCAAASVASSRSSVLKDSEYGCLKIPPRCMFDHPDADKTLNHLISGFENFEKKINYRFKNKAYLLQAFTHASYHYNTITDCYQRLEFLGDAILDYLITKHLYEDPRQHSPGVLTDLRSALVNNTIFASLAVKYDYHKYFKAVSPELFHVIDDFVQFQLEKNEMQGMDSELRRSEEDEEKEEDIEVPKAMGDIFESLAGAIYMDSGMSLETVWQVYYPMMRPLIEKFSANVPRSPVRELLEMEPETAKFSPAERTYDGKVRVTVEVVGKGKFKGVGRSYRIAKSAAARRALRSLKANQPQVPNS

SEQ ID NO: 14064 - protein, 1829 aa, Homo sapiens
MKSPALQPLSMAGLQLMTPASSPMGPFFGLPWQQEAIHDNIYTPRKYQVELLEAALDHNTIVCLNTGSGKTFIAVLLTKELSYQIRGDFSRNGKRTVFLVNSANQVAQQVSAVRTHSDLKVGEYSNLEVNASWTKERWNQEFTKHQVLIMTCYVALNVLKNGYLSLSDINLLVFDECHLAILDHPYREIMKLCENCPSCPRILGLTASILNGKCDPEELEEKIQKLEKILKSNAETATDLVVLDRYTSQPCEIVVDCGPFTDRSGLYERLLMELEEALNFINDCNISVHSKERDSTLISKQILSDCRAVLVVLGPWCADKVAGMMVRELQKYIKHEQEELHRKFLLFTDTFLRKIHALCEEHFSPASLDLKFVTPKVIKLLEILRKYKPYERQQFESVEWYNNRNQDNYVSWSDSEDDDEDEEIEEKEKPETNFPSPFTNILCGIIFVERRYTAVVLNRLIKEAGKQDPELAYISSNFITGHGIGKNQPRNKQMEAEFRKQEEVLRKFRAHETNLLIATSIVEEGVDIPKCNLVVRFDLPTEYRSYVQSKGRARAPISNYIMLADTDKIKSFEEDLKTYKAIEKILRNKCSKSVDTGETDIDPVMDDDDVFPPYVLRPDDGGPRVTINTAIGHINRYCARLPSDPFTHLAPKCRTRELPDGTFYSTLYLPINSPLRASIVGPPMSCVRLAERVVALICCEKLHKIGELDDHLMPVGKETVKYEEELDLHDEEETSVPGRPGSTKRRQCYPKAIPECLRDSYPRPDQPCYLYVIGMVLTTPLPDELNFRRRKLYPPEDTTRCFGILTAKPIPQIPHFPVYTRSGEVTISIELKKSGFMLSLQMLELITRLHQYIFSHILRLEKPALEFKPTDADSAYCVLPLNVVNDSSTLDIDFKFMEDIEKSEARIGIPSTKYTKETPFVFKLEDYQDAVIIPRYRNFDQPHRFYVADVYTDLTPLSKFPSPEYETFAEYYKTKYNLDLTNLNQPLLDVDHTSSRLNLLTPRHLNQKGKALPLSSAEKRKAKWESLQNKQILVPELCAIHPIPASLWRKAVCLPSILYRLHCLLTAEELRAQTASDAGVGVRSLPADFRYPNLDFGWKKSIDSKSFISISNSSSAENDNYCKHSTIVPENAAHQGANRTSSLENHDQMSVNCRTLLSESPGKLHVEVSADLTAINGLSYNQNLANGSYDLANRDFCQGNQLNYYKQEIPVQPTTSYSIQNLYSYENQPQPSDECTLLSNKYLDGNANKSTSDGSPVMAVMPGTTDTIQVLKGRMDSEQSPSIGYSSRTLGPNPGLILQALTLSNASDGFNLERLEMLGDSFLKHAITTYLFCTYPDAHEGRLSYMRSKKVSNCNLYRLGKKKGLPSRMVVSIFDPPVNWLPPGYVVNQDKSNTDKWEKDEMTKDCMLANGKLDEDYEEEDEEEESLMWRAPKEEADYEDDFLEYDQEHIRFIDNMLMGSGAFVKKISLSPFSTTDSAYEWKMPKKSSLGSMPFSSDFEDFDYSSWDAMCYLDPSKAVEEDDFVVGFWNPSEENCGVDTGKQSISYDLHTEQCIADKSIADCVEALLGCYLTSCGERAAQLFLCSLGLKVLPVIKRTDREKALCPTRENFNSQQKNLSVSCAAASVASSRSSVLKDSEYGCLKIPPRCMFDHPDADKTLNHLISGFENFEKKINYRFKNKAYLLQAFTHASYHYNTITDCYQRLEFLGDAILDYLITKHLYEDPRQHSPGVLTDLRSALVNNTIFASLAVKYDYHKYFKAVSPELFHVIDDFVQFQLEKNEMQGMDSEKSFLQMYPVPLCENCLKWNQKLPNLARLRELTTGRSESLWK

SEQ ID NO: 14065 - protein, 820 aa, Homo sapiens
MLAWESDHFLRILAENDNYCKHSTIVPENAAHQGANRTSSLENHDQMSVNCRTLLSESPGKLHVEVSADLTAINGLSYNQNLANGSYDLANRDFCQGNQLNYYKQEIPVQPTTSYSIQNLYSYENQPQPSDECTLLSNKYLDGNANKSTSDGSPVMAVMPGTTDTIQVLKGRMDSEQSPSIGYSSRTLGPNPGLILQALTLSNASDGFNLERLEMLGDSFLKHAITTYLFCTYPDAHEGRLSYMRSKKVSNCNLYRLGKKKGLPSRMVVSIFDPPVNWLPPGYVVNQDKSNTDKWEKDEMTKDCMLANGKLDEDYEEEDEEEESLMWRAPKEEADYEDDFLEYDQEHIRFIDNMLMGSGAFVKKISLSPFSTTDSAYEWKMPKKSSLGSMPFSSDFEDFDYSSWDAMCYLDPSKAVEEDDFVVGFWNPSEENCGVDTGKQSISYDLHTEQCIADKSIADCVEALLGCYLTSCGERAAQLFLCSLGLKVLPVIKRTDREKALCPTRENFNSQQKNLSVSCAAASVASSRSSVLKDSEYGCLKIPPRCMFDHPDADKTLNHLISGFENFEKKINYRFKNKAYLLQAFTHASYHYNTITDCYQRLEFLGDAILDYLITKHLYEDPRQHSPGVLTDLRSALVNNTIFASLAVKYDYHKYFKAVSPELFHVIDDFVQFQLEKNEMQGMDSELRRSEEDEEKEEDIEVPKAMGDIFESLAGAIYMDSGMSLETVWQVYYPMMRPLIEKFSANVPRSPVRELLEMEPETAKFSPAERTYDGKVRVTVEVVGKGKFKGVGRSYRIAKSAAARRALRSLKANQPQVPNS

SEQ ID NO: 14066 - protein, 313 aa, Homo sapiens
MAAPMNGQVCVVTGASRGIGRGIALQLCKAGATVYITGRHLDTLRVVAQEAQSLGGQCVPVVCDSSQESEVRSLFEQVDREQQGRLDVLVNNAYAGVQTILNTRNKAFWETPASMWDDINNVGLRGHYFCSVYGARLMVPAGQGLIVVISSPGSLQYMFNVPYGVGKAACDKLAADCAHELRRHGVSCVSLWPGIVQTELLKEHMAKEEVLQDPVLKQFKSAFSSAETTELSGKCVVALATDPNILSLSGKVLPSCDLARRYGLRDVDGRPVQDYLSLSSVLSHVSGLGWLASYLPSFLRVPKWIIALYTSKF

SEQ ID NO: 14067 - protein, 342 aa, Homo sapiens
MASVTRAVFGELPSGGGTVEKFQLQSDLLRVDIISWGCTITALEVKDRQGRASDVVLGFAELEGYLQKQPYFGAVIGRVANRIAKGTFKVDGKEYHLAINKEPNSLHGGVRGFDKVLWTPRVLSNGVQFSRISPDGEEGYPGELKVWVTYTLDGGELIVNYRAQASQATPVNLTNHSYFNLAGQASPNINDHEVTIEADTYLPVDETLIPTGEVAPVQGTAFDLRKPVELGKHLQDFHLNGFDHNFCLKGSKEKHFCARVHHAASGRVLEVYTTQPGVQFYTGNFLDGTLKGKNGAVYPKHSGFCLETQNWPDAVNQPRFPPVLLRPGEEYDHTTWFKFSVA

SEQ ID NO: 14068 - protein, 302 aa, Homo sapiens
MVWKRLGALVMFPLQMIYLVVKAAVGLVLPAKLRDLSRENVLITGGGRGIGRQLAREFAERGARKIVLWGRTEKCLKETTEEIRQMGTECHYFICDVGNREEVYQTAKAVREKVGDITILVNNAAVVHGKSLMDSDDDALLKSQHINTLGQFWTTKAFLPRMLELQNGHIVCLNSVLALSAIPGAIDYCTSKASAFAFMESLTLGLLDCPGVSATTVLPFHTSTEMFQGMRVRFPNLFPPLKPETVARRTVEAVQLNQALLLLPWTMHALVILKSILPQAALEEIHKFSGTYTCMNTFKGRT

SEQ ID NO: 14069 - protein, 167 aa, Homo sapiens
MVWKRLGALVMFPLQMIYLVVKAAVGLVLPAKLRDLSRENVLITGGGRGIGRQLAREFAERGARKIVLWGRTEKCLKETTEEIRQMGTECHYFICDVGNREEVYQTAKAVREKVCSLGGSIPSTADHRLIPGKENILMWPGRELCLWQNGFARGTFGDSPMKLAPVT

SEQ ID NO: 14070 - protein, 567 aa, Homo sapiens
MEAERRPAPGSPSEGLFADGHLILWTLCSVLLPVFITFWCSLQRSRRQLHRRDIFRKSKHGWRDTDLFSQPTYCCVCAQHILQGAFCDCCGLRVDEGCLRKADKRFQCKEIMLKNDTKVLDAMPHHWIRGNVPLCSYCMVCKQQCGCQPKLCDYRCIWCQKTVHDECMKNSLKNEKCDFGEFKNLIIPPSYLTSINQMRKDKKTDYEVLASKLGKQWTPLIILANSRSGTNMGEGLLGEFRILLNPVQVFDVTKTPPIKALQLCTLLPYYSARVLVCGGDGTVGWVLDAVDDMKIKGQEKYIPQVAVLPLGTGNDLSNTLGWGTGYAGEIPVAQVLRNVMEADGIKLDRWKVQVTNKGYYNLRKPKEFTMNNYFSVGPDALMALNFHAHREKAPSLFSSRILNKAVYLFYGTKDCLVQECKDLNKKVELELDGERVALPSLEGIIVLNIGYWGGGCRLWEGMGDETYPLARHDDGLLEVVGVYGSFHCAQIQVKLANPFRIGQAHTVRLILKCSMMPMQVDGEPWAQGPCTVTITHKTHAMMLYFSGEQTDDDISSTSDQEDIKATE

SEQ ID NO: 14071 - protein, 177 aa, Homo sapiens
MEAERRPAPGSPSEGLFADGHLILWTLCSVLLPVFITFWCSLQRSRRQLHRRDIFRKSKHGWRDTDLFSQPTYCCVCAQHILQGAFCDCCGLRVDEGCLRKADKRFQCKEIMLKNDTKVLDAMPHHWIRGNVPLCSYCMVCKQQCGCQPKLCDYRYGLRGHSLSQNAPWESGFHRVV

SEQ ID NO: 14072 - protein, 1287 aa, Homo sapiens
MSGGGGGGGSAPSRFADYFVICGLDTETGLEPDELSALCQYIQASKARDGASPFISSTTEGENFEQTPLRRTFKSKVLARYPENVEWNPFDQDAVGMLCMPKGLAFKTQADPREPQFHAFIITREDGSRTFGFALTFYEEVTSKQICSAMQTLYHMHNAEYDVLHAPPADDRDQSSMEDGEDTPVTKLQRFNSYDISRDTLYVSKCICLITPMSFMKACRSVLEQLHQAVTSPQPPPLPLESYIYNVLYEVPLPPPGRSLKFSGVYGPIICQRPSTNELPLFDFPVKEVFELLGVENVFQLFTCALLEFQILLYSQHYQRLMTVAETITALMFPFQWQHVYVPILPASLLHFLDAPVPYLMGLHSNGLDDRSKLELPQEANLCFVDIDNHFIELPEDLPQFPNKLEFVQEVSEILMAFGIPPEGNLHCSESASKLKRLRASELVSDKRNGNIAGSPLHSYELLKENETIARLQALVKRTGVSLEKLEVREDPSSNKDLKVQCDEEELRIYQLNIQIREVFANRFTQMFADYEVFVIQPSQDKESWFTNREQMQNFDKASFLSDQPEPYLPFLSRFLETQMFASFIDNKIMCHDDDDKDPVLRVFDSRVDKIRLLNVRTPTLRTSMYQKCTTVDEAEKAIELRLAKIDHTAIHPHLLDMKIGQGKYEPGFFPKLQSDVLSTGPASNKWTKRNAPAQWRRKDRQKQHTEHLRLDNDQREKYIQEARTMGSTIRQPKLSNLSPSVIAQTNWKFVEGLLKECRNKTKRMLVEKMGREAVELGHGEVNITGVEENTLIASLCDLLERIWSHGLQVKQGKSALWSHLLHYQDNRQRKLTSGSLSTSGILLDSERRKSDASSLMPPLRISLIQDMRHIQNIGEIKTDVGKARAWVRLSMEKKLLSRHLKQLLSDHELTKKLYKRYAFLRCDDEKEQFLYHLLSFNAVDYFCFTNVFTTILIPYHILIVPSKKLGGSMFTANPWICISGELGETQIMQIPRNVLEMTFECQNLGKLTTVQIGHDNSGLYAKWLVEYVMVRNEITGHTYKFPCGRWLGKGMDDGSLERILVGELLTSQPEVDERPCRTPPLQQSPSVIRRLVTISPNNKPKLNTGQIQESIGEAVNGIVKHFHKPEKERGSLTLLLCGECGLVSALEQAFQHGFKSPRLFKNVFIWDFLEKAQTYYETLEKNEVVPEENWHTRARNFCRFVTAINNTPRNIGKDGKFQMLVCLGARDHLLHHWIALLADCPITAHMYEDVALIKDHTLVNSLIRVLQTLQEFNITLETSLVKGIDI

SEQ ID NO: 14073 - protein, 1241 aa, Homo sapiens
MSGGGGGGGSAPSRFADYFVICGLDTETGLEPDELSALCQYIQASKARDGASPFISSTTEGENFEQTPLRRTFKSKVLARYPENVEWNPFDQDAVGMLCMPKGLAFKTQADPREPQFHAFIITREDGSRTFGFALTFYEEVTSKQICSAMQTLYHMHNAEYDVLHAPPADDRDQSSMEDGEDTPVTKLQRFNSYDISRDTLYVSKCICLITPMSFMKACRSVLEQLHQAVTSPQPPPLPLESYIYNVLYEVPLPPPGRSLKFSGVYGPIICQRPSTNELPLFDFPVKEVFELLGVENVFQLFTCALLEFQILLYSQHYQRLMTVAETITALMFPFQWQHVYVPILPASLLHFLDAPVPYLMGLHSNGLDDRSKLELPQEANLCFVDIDNHFIELPEDLPQFPNKLEFVQEVSEILMAFGIPPEGNLHCSESASKLKRLRASELVSDKRNGNIAGSPLHSYELLKENETIARLQALVKRTGVSLEKLEVREDPSSNKDLKVQCDEEELRIYQLNIQIREVFANRFTQMFADYEVFVIQPSQDKESWFTNREQMQNFDKASFLSDQPEPYLPFLSRFLETQMFASFIDNKIMCHDDDDKDPVLRVFDSRVDKIRLLNVRTPTLRTSMYQKCTTVDEAEKAIELRLAKIDHTAIHPHLLDMKIGQGKYEPGFFPKLQSDVLSTGPASNKWTKRNAPAQWRRKDRQKQHTEHLRLDNDQREKYIQEARTMGSTIRQPKLSNLSPSVIAQTNWKFVEGLLKECRNKTKRMLVEKMGREAVELGHGEVNITGVEENTLIASLCDLLERIWSHGLQVKQGKSALWSHLLHYQDNRQRKLTSGSLSTSGILLDSERRKSDASSLMPPLRISLIQDMRHIQNIGEIKTDVGKARAWVRLSMEKKLLSRHLKQLLSDHELTKKLYKRYAFLRCDDEKEQFLYHLLSFNAVDYFCFTNVFTTILIPYHILIVPSKKLGGSMFTANPWICISGELGETQIMQIPRNVLEMTFECQNLGKLTTVQIGHDNSGLYAKWLVEYVMVRNEITGHTYKFPCGRWLGKGMDDGSLERILVGELLTSQPEVDERPCRTPPLQQSPSVIRRLVTISPNNKPKLNTGQIQESIGEAVNGIVKHFHKPEKERGSLTLLLCGECGLVSALEQAFQHGFKSPRLFKNVFIWDFLEKAQTYYETLEKNEVVPEENWHTRARNFCRFVTAINNTPRNIGKDEITSYTTGLPCWLTAPSLHTCMRMWH

SEQ ID NO: 14074 - protein, 217 aa, Homo sapiens
MSFRGGGRGGFNRGGGGGGFNRGGSSNHFRGGGGGGGGGNFRGGGRGGFGRGGGRGGFNKGQDQGPPERVVLLGEFLHPCEDDIVCKCTTDENKVPYFNAPVYLENKEQIGKVDEIFGQLRDFYFSVKLSENMKASSFKKLQKFYIDPYKLLPLQRFLPRPPGEKGPPRGGGRGGRGGGRGGGGRGGGRGGGFRGGRGGGGGGFRGGRGGGFRGRGH

SEQ ID NO: 14075 - protein, 199 aa, Homo sapiens
MSFRGGGRGGFNRGGGGGGFNRGGSSNHFRGGGGGGGGGNFRGGGRGGFGRGGGRGGFNKGQDQGPPERVVLLGEFLHPCEDDIVCKCTTDENKVPYFNAPVYLENKEQIGKVDEIFGQLRDFYFSVKLSENMKASSFKKLQKFYIDPYKLLPLQRFLPRPPGEKGPPRGGGRGGRGGGRGGGGGFRGGRGGGFRGRGH

SEQ ID NO: 14076 - protein, 992 aa, Homo sapiens
MKGLGDSRPRHLSDSLDPPHEPLFAGTDRNPYLLSPTEAFAREARFPGQNTLPGDGLFPLNNQLPPPSSTFPRIHYNSHFEVPEESPFPSHAQATKINRLPANLLDQFEKQLPIHRDGFSTLQFPRGEAKARGESPGRIRHLVHSVQRLFFTKAPSLEGTAGKVGGNGSKKGGMEDGKGRRAKSKERAKAGEPKRRSRSNISGWWSSDDNLDGEAGAFRSSGPASGLMTLGRQAERSQPRYFMHAYNTISGHMLKTTKNNTTELTAPPPPPAPPATCPSLGVGTDTNYVKRGSWSTLTLSHAHEVCQKTSATLDKSLLKSKSCHQGLAYHYLQVPGGGGEWSTTLLSPRETDAAAEGPIPCRRMRSGSYIKAMGDEDSDESGGSPKPSPKTAARRQSYLRATQQSLGEQSNPRRSLDRLDSVDMLLPSKCPSWEEDYTPVSDSLNDSSCISQIFGQASLIPQLFGHEQQVREAELSDQYEAACESACSEAESTAAETLDLPLPSYFRSRSHSYLRAIQAGCSQEEDSVSLQSLSPPPSTGSLSNSRTLPSSSCLVAYKKTPPPVPPRTTSKPFISVTVQSSTESAQDTYLDSQDHKSEVTSQSGLSNSSDSLDSSTRPPSVTRGGVAPAPEAPEPPPKHAALKSEQGTLTSSESHPEAAPKRKLSSIGIQVDCIQPVPKEEPSPATKFQSIGVQVEDDWRSSVPSHSMSSRRDTDSDTQDANDSSCKSSERSLPDCTPHPNSISIDAGPRQAPKIAQIKRNLSYGDNSDPALEASSLPPPDPWLETSSSSPAEPAQPGACRRDGYWFLKLLQAETERLEGWCCQMDKETKENNLSEEVLGKVLSAVGSAQLLMSQKFQQFRGLCEQNLNPDANPRPTAQDLAGFWDLLQLSIEDISMKFDELYHLKANSWQLVETPEKRKEEKKPPPPVPKKPAKSKPAVSRDKASDASDKQRQEARKRLLAAKRAASVRQNSATESADSIEIYVPEAQTRL

SEQ ID NO: 14077 - protein, 989 aa, Homo sapiens
MKGLGDSRPRHLSDSLDPPHEPLFAGTDRNPYLLSPTEAFAREARFPGQNTLPGDGLFPLNNQLPPPSSTFPRIHYNSHFEVPEESPFPSHAQATKINRLPANLLDQFEKQLPIHRDGFSTLQFPRGEAKARGESPGRIRHLVHSVQRLFFTKAPSLEGTAGKVGGNGSKKGGMEDGKGRRAKSKERAKAGEPKRRSRSNISGWWSSDDNLDGEAGAFRSSGPASGLMTLGRQAERSQPRYFMHAYNTISGHMLKTTKNNTTELTAPPPPPAPPATCPSLGVGTDTNYVKRGSWSTLTLSHAHEVCQKTSATLDKSLLKSKSCHQGLAYHYLQVPGGGGEWSTTLLSPRETDAAAEGPIPCRRMRSGSYIKAMGDEDSDESGGSPKPSPKTAARRQSYLRATQQSLGEQSNPRRSLDRLDSVDMLLPSKCPSWEEDYTPVSDSLNDSSCISQIFGQASLIPQLFGHEQQVREAELSDQYEAACESACSEAESTAAETLDLPLPSYFRSRSHSYLRAIQAGCSQEEDSVSLQSLSPPPSTGSLSNSRTLPSSSCLVAYKKTPPPVPPRTTSKPFISVTVQSSTESAQDTYLDSQDHKSEVTSQSGLSNSSDSLDSSTRPPSVTRGGVAPAPEAPEPPPKHAALKSEQGTLTSSESHPEAAPKRKLSSIGIQERTRRNGSHLSEDNGPKAIDVMAPSSESSVPSHSMSSRRDTDSDTQDANDSSCKSSERSLPDCTPHPNSISIDAGPRQAPKIAQIKRNLSYGDNSDPALEASSLPPPDPWLETSSSSPAEPAQPGACRRDGYWFLKLLQAETERLEGWCCQMDKETKENNLSEEVLGKVLSAVGSAQLLMSQKFQQFRGLCEQNLNPDANPRPTAQDLAGFWDLLQLSIEDISMKFDELYHLKANSWQLVETPEKRKEEKKPPPPVPKKPAKSKPAVSRDKASDASDKQRQEARKRLLAAKRAASVRQNSATESADSIEIYVPEAQTRL

SEQ ID NO: 14078 - protein, 453 aa, Homo sapiens
MALCLELLKQCSSCLVAYKKTPPPVPPRTTSKPFISVTVQSSTESAQDTYLDSQDHKSEVTSQSGLSNSSDSLDSSTRPPSVTRGGVAPAPEAPEPPPKHAALKSEQGTLTSSESHPEAAPKRKLSSIGIQVDCIQPVPKEEPSPATKFQSIGVQVEDDWRSSVPSHSMSSRRDTDSDTQDANDSSCKSSERSLPDCTPHPNSISIDAGPRQAPKIAQIKRNLSYGDNSDPALEASSLPPPDPWLETSSSSPAEPAQPGACRRDGYWFLKLLQAETERLEGWCCQMDKETKENNLSEEVLGKVLSAVGSAQLLMSQKFQQFRGLCEQNLNPDANPRPTAQDLAGFWDLLQLSIEDISMKFDELYHLKANSWQLVETPEKRKEEKKPPPPVPKKPAKSKPAVSRDKASDASDKQRQEARKRLLAAKRAASVRQNSATESADSIEIYVPEAQTRL

SEQ ID NO: 14079 - protein, 319 aa, Homo sapiens
MLFWVLGLLILCGFLWTRKGKLKIEDITDKYIFITGCDSGFGNLAARTFDKKGFHVIAACLTESGSTALKAETSERLRTVLLDVTDPENVKRTAQWVKNQVGEKGLWGLINNAGVPGVLAPTDWLTLEDYREPIEVNLFGLISVTLNMLPLVKKAQGRVINVSSVGGRLAIVGGGYTPSKYAVEGFNDSLRRDMKAFGVHVSCIEPGLFKTNLADPVKVIEKKLAIWEQLSPDIKQQYGEGYIEKSLDKLKGNKSYVNMDLSPVVECMDHALTSLFPKTHYAAGKDAKIFWIPLSHMPAALQDFLLLKQKAELANPKAV

SEQ ID NO: 14080 - protein, 172 aa, Homo sapiens
MLPLVKKAQGRVINVSSVGGRLAIVGGGYTPSKYAVEGFNDSLRRDMKAFGVHVSCIEPGLFKTNLADPVKVIEKKLAIWEQLSPDIKQQYGEGYIEKSLDKLKGNKSYVNMDLSPVVECMDHALTSLFPKTHYAAGKDAKIFWIPLSHMPAALQDFLLLKQKAELANPKAV

SEQ ID NO: 14081 - protein, 279 aa, Homo sapiens
MLFWVLGLLILCGFLWTRKGKLKIEDITDKYIFITGCDSGFGNLAARTFDKKGFHVIAACLTESGSTALKAETSERLRTVLLDVTDPENVKRTAQWVKNQVGEKGLWGLINNAGVPGVLAPTDWLTLEDYREPIEVNLFGLISVTLNMLPLVKKAQGRVINVSSVGGRLAIVGGGYTPSKYAVEGFNDSLRRDMKAFGVHVSCIERLDKLKGNKSYVNMDLSPVVECMDHALTSLFPKTHYAAGKDAKIFWIPLSHMPAALQDFLLLKQKAELANPKAV

SEQ ID NO: 14082 - protein, 379 aa, Homo sapiens
MPEGRSHCACSITSLTLLVSLTRVTLDILQKLDPPQPAHWRHHLLVLYKKGVYLSHTGGKMLFWVLGLLILCGFLWTRKGKLKIEDITDKYIFITGCDSGFGNLAARTFDKKGFHVIAACLTESGSTALKAETSERLRTVLLDVTDPENVKRTAQWVKNQVGEKGLWGLINNAGVPGVLAPTDWLTLEDYREPIEVNLFGLISVTLNMLPLVKKAQGRVINVSSVGGRLAIVGGGYTPSKYAVEGFNDSLRRDMKAFGVHVSCIEPGLFKTNLADPVKVIEKKLAIWEQLSPDIKQQYGEGYIEKSLDKLKGNKSYVNMDLSPVVECMDHALTSLFPKTHYAAGKDAKIFWIPLSHMPAALQDFLLLKQKAELANPKAV

SEQ ID NO: 14083 - protein, 928 aa, Homo sapiens
MEPRDGSPEARSSDSESASASSSGSERDAGPEPDKAPRRLNKRRFPGLRLFGHRKAITKSGLQHLAPPPPTPGAPCSESERQIRSTVDWSESATYGEHIWFETNVSGDFCYVGEQYCVARMLKSVSRRKCAACKIVVHTPCIEQLEKINFRCKPSFRESGSRNVREPTFVRHHWVHRRRQDGKCRHCGKGFQQKFTFHSKEIVAISCSWCKQAYHSKVSCFMLQQIEEPCSLGVHAAVVIPPTWILRARRPQNTLKASKKKKRASFKRKSSKKGPEEGRWRPFIIRPTPSPLMKPLLVFVNPKSGGNQGAKIIQSFLWYLNPRQVFDLSQGGPKEALEMYRKVHNLRILACGGDGTVGWILSTLDQLRLKPPPPVAILPLGTGNDLARTLNWGGGYTDEPVSKILSHVEEGNVVQLDRWDLHAEPNPEAGPEDRDEGATDRLPLDVFNNYFSLGFDAHVTLEFHESREANPEKFNSRFRNKMFYAGTAFSDFLMGSSKDLAKHIRVVCDGMDLTPKIQDLKPQCVVFLNIPRYCAGTMPWGHPGEHHDFEPQRHDDGYLEVIGFTMTSLAALQVGGHGERLTQCREVVLTTSKAIPVQVDGEPCKLAASRIRIALRNQATMVQKAKRRSAAPLHSDQQPVPEQLRIQVSRVSMHDYEALHYDKEQLKEASVPLGTVVVPGDSDLELCRAHIERLQQEPDGAGAKSPTCQKLSPKWCFLDATTASRFYRIDRAQEHLNYVTEIAQDEIYILDPELLGASARPDLPTPTSPLPTSPCSPTPRSLQGDAAPPQGEELIEAAKRNDFCKLQELHRAGGDLMHRDEQSRTLLHHAVSTGSKDVVRYLLDHAPPEILDAVEENGETCLHQAAALGQRTICHYIVEAGASLMKTDQQGDTPRQRAEKAQDTELAAYLENRQHYQMIQREDQETAV

SEQ ID NO: 14084 - protein, 1117 aa, Homo sapiens
METFFRRHFRGKVPGPGEGQQRPSSVGLPTGKARRRSPAGQASSSLAQRRRSSAQLQGCLLSCGVRAQGSSRRRSSTVPPSCNPRFIVDKVLTPQPTTVGAQLLGAPLLLTGLVGMNEEEGVQEDVVAEASSAIQPGTKTPGPPPPRGAQPLLPLPRYLRRASSHLLPADAVYDHALWGLHGYYRRLSQRRPSGQHPGPGGRRASGTTAGTMLPTRVRPLSRRRQVALRRKAAGPQAWSALLAKAITKSGLQHLAPPPPTPGAPCSESERQIRSTVDWSESATYGEHIWFETNVSGDFCYVGEQYCVARMLKSVSRRKCAACKIVVHTPCIEQLEKINFRCKPSFRESGSRNVREPTFVRHHWVHRRRQDGKCRHCGKGFQQKFTFHSKEIVAISCSWCKQAYHSKVSCFMLQQIEEPCSLGVHAAVVIPPTWILRARRPQNTLKASKKKKRASFKRKSSKKGPEEGRWRPFIIRPTPSPLMKPLLVFVNPKSGGNQGAKIIQSFLWYLNPRQVFDLSQGGPKEALEMYRKVHNLRILACGGDGTVGWILSTLDQLRLKPPPPVAILPLGTGNDLARTLNWGGGYTDEPVSKILSHVEEGNVVQLDRWDLHAEPNPEAGPEDRDEGATDRLPLDVFNNYFSLGFDAHVTLEFHESREANPEKFNSRFRNKMFYAGTAFSDFLMGSSKDLAKHIRVVCDGMDLTPKIQDLKPQCVVFLNIPRYCAGTMPWGHPGEHHDFEPQRHDDGYLEVIGFTMTSLAALQVGGHGERLTQCREVVLTTSKAIPVQVDGEPCKLAASRIRIALRNQATMVQKAKRRSAAPLHSDQQPVPEQLRIQVSRVSMHDYEALHYDKEQLKEASVPLGTVVVPGDSDLELCRAHIERLQQEPDGAGAKSPTCQKLSPKWCFLDATTASRFYRIDRAQEHLNYVTEIAQDEIYILDPELLGASARPDLPTPTSPLPTSPCSPTPRSLQGDAAPPQGEELIEAAKRNDFCKLQELHRAGGDLMHRDEQSRTLLHHAVSTGSKDVVRYLLDHAPPEILDAVEENGETCLHQAAALGQRTICHYIVEAGASLMKTDQQGDTPRQRAEKAQDTELAAYLENRQHYQMIQREDQETAV

SEQ ID NO: 14085 - protein, 945 aa, Homo sapiens
MAEGQGGGGQRWDWAGGGRAAEEEVVRRRCRRGEEAQVAQPWPEGSRGTAAGPPVEERFRQLHLRKQVSYRKAITKSGLQHLAPPPPTPGAPCSESERQIRSTVDWSESATYGEHIWFETNVSGDFCYVGEQYCVARMLKSVSRRKCAACKIVVHTPCIEQLEKINFRCKPSFRESGSRNVREPTFVRHHWVHRRRQDGKCRHCGKGFQQKFTFHSKEIVAISCSWCKQAYHSKVSCFMLQQIEEPCSLGVHAAVVIPPTWILRARRPQNTLKASKKKKRASFKRKSSKKGPEEGRWRPFIIRPTPSPLMKPLLVFVNPKSGGNQGAKIIQSFLWYLNPRQVFDLSQGGPKEALEMYRKVHNLRILACGGDGTVGWILSTLDQLRLKPPPPVAILPLGTGNDLARTLNWGGGYTDEPVSKILSHVEEGNVVQLDRWDLHAEPNPEAGPEDRDEGATDRLPLDVFNNYFSLGFDAHVTLEFHESREANPEKFNSRFRNKMFYAGTAFSDFLMGSSKDLAKHIRVVCDGMDLTPKIQDLKPQCVVFLNIPRYCAGTMPWGHPGEHHDFEPQRHDDGYLEVIGFTMTSLAALQVGGHGERLTQCREVVLTTSKAIPVQVDGEPCKLAASRIRIALRNQATMVQKAKRRSAAPLHSDQQPVPEQLRIQVSRVSMHDYEALHYDKEQLKEASVPLGTVVVPGDSDLELCRAHIERLQQEPDGAGAKSPTCQKLSPKWCFLDATTASRFYRIDRAQEHLNYVTEIAQDEIYILDPELLGASARPDLPTPTSPLPTSPCSPTPRSLQGDAAPPQGEELIEAAKRNDFCKLQELHRAGGDLMHRDEQSRTLLHHAVSTGSKDVVRYLLDHAPPEILDAVEENGETCLHQAAALGQRTICHYIVEAGASLMKTDQQGDTPRQRAEKAQDTELAAYLENRQHYQMIQREDQETAV

SEQ ID NO: 14086 - protein, 929 aa, Homo sapiens
MEPRDGSPEARSSDSESASASSSGSERDAGPEPDKAPRRLNKRRFPGLRLFGHRKAITKSGLQHLAPPPPTPGAPCSESERQIRSTVDWSESATYGEHIWFETNVSGDFCYVGEQYCVARMLQKSVSRRKCAACKIVVHTPCIEQLEKINFRCKPSFRESGSRNVREPTFVRHHWVHRRRQDGKCRHCGKGFQQKFTFHSKEIVAISCSWCKQAYHSKVSCFMLQQIEEPCSLGVHAAVVIPPTWILRARRPQNTLKASKKKKRASFKRKSSKKGPEEGRWRPFIIRPTPSPLMKPLLVFVNPKSGGNQGAKIIQSFLWYLNPRQVFDLSQGGPKEALEMYRKVHNLRILACGGDGTVGWILSTLDQLRLKPPPPVAILPLGTGNDLARTLNWGGGYTDEPVSKILSHVEEGNVVQLDRWDLHAEPNPEAGPEDRDEGATDRLPLDVFNNYFSLGFDAHVTLEFHESREANPEKFNSRFRNKMFYAGTAFSDFLMGSSKDLAKHIRVVCDGMDLTPKIQDLKPQCVVFLNIPRYCAGTMPWGHPGEHHDFEPQRHDDGYLEVIGFTMTSLAALQVGGHGERLTQCREVVLTTSKAIPVQVDGEPCKLAASRIRIALRNQATMVQKAKRRSAAPLHSDQQPVPEQLRIQVSRVSMHDYEALHYDKEQLKEASVPLGTVVVPGDSDLELCRAHIERLQQEPDGAGAKSPTCQKLSPKWCFLDATTASRFYRIDRAQEHLNYVTEIAQDEIYILDPELLGASARPDLPTPTSPLPTSPCSPTPRSLQGDAAPPQGEELIEAAKRNDFCKLQELHRAGGDLMHRDEQSRTLLHHAVSTGSKDVVRYLLDHAPPEILDAVEENGETCLHQAAALGQRTICHYIVEAGASLMKTDQQGDTPRQRAEKAQDTELAAYLENRQHYQMIQREDQETAV

SEQ ID NO: 14087 - protein, 934 aa, Homo sapiens
MEPRDGSPEARSSDSESASASSSGSERDAGPEPDKAPRRLNKRRFPGLRLFGHRKAITKSGLQHLAPPPPTPGAPCSESERQIRSTVDWSESATYGEHIWFETNVSGDFCYVGEQYCVARMLQKSVSRRKCAACKIVVHTPCIEQLEKINFRCKPSFRESGSRNVREPTFVRHHWVHRRRQDGKCRHCGKGFQQKFTFHSKEIVAISCSWCKQAYHSKVSCFMLQQIEEPCSLGVHAAVVIPPTWILRARRPQNTLKASKKKKRASFKRKSSKKGPEEGRWRPFIIRPTPSPLMKPLLVFVNPKSGGNQGAKIIQSFLWYLNPRQVFDLSQGGPKEALEMYRKVHNLRILACGGDGTVGWILSTLDQLRLKPPPPVAILPLGTGNDLARTLNWGGGYTDEPVSKILSHVEEGNVVQLDRWDLHAEPNPEAGPEDRDEGATDRLPLDVFNNYFSLGFDAHVTLEFHESREANPEKFNSRFRNKMFYAGTAFSDFLMGSSKDLAKHIRVVCDGMDLTPKIQDLKPQCVVFLNIPRYCAGTMPWGHPGEHHDFEPQRHDDGYLEVIGFTMTSLAALQVGGHGERLTQCREVVLTTSKAIPVQVDGEPCKLAASRIRIALRNQATMVQKAKRRSAAPLHSDQQPVPEQLRIQVSRVSMHDYEALHYDKEQLKEASVPLGTVVVPGDSDLELCRAHIERLQQEPDGAGAKSPTCQKLSPKWCFLDATTASRFYRIDRAQEHLNYVTEIAQDEIYILDPELLGASARPDLPTPTSPLPTSPCSPTPRSLQGDAAPPQGEELIEAAKRNDFCKLQELHRAGGDLMHRDEQSRTLLHHAVSTGSKDVVRYLLDHAPPEILDAVEENPCSPSGETCLHQAAALGQRTICHYIVEAGASLMKTDQQGDTPRQRAEKAQDTELAAYLENRQHYQMIQREDQETAV

SEQ ID NO: 14088 - protein, 906 aa, Homo sapiens
MEPRDGSPEARSSDSESASASSSGSERDAGPEPDKAPRRLNKRRFPGLRLFGHRKAITKSGLQHLAPPPPTPGAPCSESERQIRSTVDWSESATYGEHIWFETNVSGDFCYVGEQYCVARMLQKSVSRRKCAACKIVVHTPCIEQLEKINFRCKPSFRESGSRNVREGFQQKFTFHSKEIVAISCSWCKQAYHSKVSCFMLQQIEEPCSLGVHAAVVIPPTWILRARRPQNTLKASKKKKRASFKRKSSKKGPEEGRWRPFIIRPTPSPLMKPLLVFVNPKSGGNQGAKIIQSFLWYLNPRQVFDLSQGGPKEALEMYRKVHNLRILACGGDGTVGWILSTLDQLRLKPPPPVAILPLGTGNDLARTLNWGGGYTDEPVSKILSHVEEGNVVQLDRWDLHAEPNPEAGPEDRDEGATDRLPLDVFNNYFSLGFDAHVTLEFHESREANPEKFNSRFRNKMFYAGTAFSDFLMGSSKDLAKHIRVVCDGMDLTPKIQDLKPQCVVFLNIPRYCAGTMPWGHPGEHHDFEPQRHDDGYLEVIGFTMTSLAALQVGGHGERLTQCREVVLTTSKAIPVQVDGEPCKLAASRIRIALRNQATMVQKAKRRSAAPLHSDQQPVPEQLRIQVSRVSMHDYEALHYDKEQLKEASVPLGTVVVPGDSDLELCRAHIERLQQEPDGAGAKSPTCQKLSPKWCFLDATTASRFYRIDRAQEHLNYVTEIAQDEIYILDPELLGASARPDLPTPTSPLPTSPCSPTPRSLQGDAAPPQGEELIEAAKRNDFCKLQELHRAGGDLMHRDEQSRTLLHHAVSTGSKDVVRYLLDHAPPEILDAVEENGETCLHQAAALGQRTICHYIVEAGASLMKTDQQGDTPRQRAEKAQDTELAAYLENRQHYQMIQREDQETAV

SEQ ID NO: 14089 - protein, 933 aa, Homo sapiens
MSAPGAGHSAGGSCNESSALGPVEALGTEEGERPGSLRQMWRYRSWDVPQIPSEAPQTQKAITKSGLQHLAPPPPTPGAPCSESERQIRSTVDWSSATYGEHIWFETNVSGDFCYVGEQYCVARMLQKSVSRRKCAACKIVVHTPCIEQLEKINFRCKPSFRESGSRNVREPTFVRHHWVHRRRQDGKCRHCGKGFQQKFTFHSKEIVAISCSWCKQAYHSKVSCFMLQQIEEPCSLGVHAAVVIPPTWILRARRPQNTLKASKKKKRASFKRKSSKKGPEEGRWRPFIIRPTPSPLMKPLLVFVNPKSGGNQGAKIIQSFLWYLNPRQVFDLSQGGPKEALEMYRKVHNLRILACGGDGTVGWILSTLDQLRLKPPPPVAILPLGTGNDLARTLNWGGGYTDEPVSKILSHVEEGNVVQLDRWDLHAEPNPEAGPEDRDEGATDRLPLDVFNNYFSLGFDAHVTLEFHESREANPEKFNSRFRNKMFYAGTAFSDFLMGSSKDLAKHIRVVCDGMDLTPKIQDLKPQCVVFLNIPRYCAGTMPWGHPGEHHDFEPQRHDDGYLEVIGFTMTSLAALQVGGHGERLTQCREVVLTTSKAIPVQVDGEPCKLAASRIRIALRNQATMVQKAKRRSAAPLHSDQQPVPEQLRIQVSRVSMHDYEALHYDKEQLKEASVPLGTVVVPGDSDLELCRAHIERLQQEPDGAGAKSPTCQKLSPKWCFLDATTASRFYRIDRAQEHLNYVTEIAQDEIYILDPELLGASARPDLPTPTSPLPTSPCSPTPRSLQGDAAPPQGEELIEAAKRNDFCKLQELHRAGGDLMHRDEQSRTLLHHAVSTGSKDVVRYLLDHAPPEILDAVEENGETCLHQAAALGQRTICHYIVEAGASLMKTDQQGDTPRQRAEKAQDTELAAYLENRQHYQMIQREDQETAV

SEQ ID NO: 14090 - protein, 159 aa, Homo sapiens
MAVLWRLSAVCGALGGRALLLRTPVVRPAHISAFLQDRPIPEWCGVQHIHLSPSHHSGSKAASLHWTSERVVSVLLLGLLPAAYLNPCSAMDYSLAAALTLHGHWGLGQVVTDYVHGDALQKAAKAGLLALSALTFAGLCYFNYHDVGICKAVAMLWKL

SEQ ID NO: 14091 - protein, 120 aa, Homo sapiens
MAVLWRLSAVCGALGGRAGSKAASLHWTSERVVSVLLLGLLPAAYLNPCSAMDYSLAAALTLHGHWGLGQVVTDYVHGDALQKAAKAGLLALSALTFAGLCYFNYHDVGICKAVAMLWKL

SEQ ID NO: 14092 - protein, 85 aa, Homo sapiens
MAVLWRLSAVCGALGGRALLLRTPVVRPAHISAFLQDRPIPEWCGVQHIHLSPSHHWALDKLLLTMFMGMPCRKLPRQGFWHFQL

SEQ ID NO: 14093 - protein, 143 aa, Homo sapiens
MAVLWRLSAVCGALGGRALLLRTPVVRPAHISAFLQDRPIPEWCGVQHIHLSPSHHSGSKAASLHWTSERVVSVLLLGLLPAAYLNPCSAMDYSLAAALTLHGHWLECNGAILARHDLGSARSQLTATSAFRVQAILLPQPPK

SEQ ID NO: 14094 - protein, 529 aa, Homo sapiens
MEHRIVGPGPYRATRLWNETVELFRAKMPLRKHRCRFKSYEHCFTAAEAVDWLHELLRCSQNFGPEVTRKQTVQLLKKFLKNHVIEDIKGKWGEEDFEDNRHLYRFPPSSPLKPYPKKPPNQKDVIKFPEWNDLPPGTSQENIPVRPVVMNSEMWYKRHSIAIGEVPACRLVHRRQLTEANVEEIWKSMTLSYLQKILGLDSLEEVLDVKLVNSKFIIHNVYSVSKQGVVILDDKSKELPHWVLSAMKCLANWPNCSDLKQPMYLGFEKDVFKTIADYYGHLKEPLLTFHLFDAFVSVLGLLQKEKVAVEAFQICCLLLPPENRRKLQLLMRMMARICLNKEMPPLCDGFGTRTLMVQTFSRCILCSKDEVDLDELLAARLVTFLMDNYQEILKVPLALQTSIEERVAHLRRVQIKYPGADMDITLSAPSFCRQISPEEFEYQRSYGSQEPLAALLEEVITDAKLSNKEKKKKLKQFQKSYPEVYQERFPTPESAALLFPEKPKPKPQLLMWALKKPFQPFQRTRSFRM

SEQ ID NO: 14095 - protein, 467 aa, Homo sapiens
MEHRIVGPGPYRATRLWNETVELFRAKMPLRKHRCRFKSYEHCFTAAEAVDWLHELLRCSQNFGPEVTRKQTVQLLKKFLKNHVIEDIKGKWGEEDFEDNRHLYRFPPSSPLKPYPKKPPNQKDVIKFPEWNDLPPGTSQENIPVRPVVMNSEMWYKRHSIAIGEVPACRLVHRRQLTEANVEEIWKSMTLSYLQKILGLDSLEEVLDVKLVNSKFIIHNVYSVSKQGVVILDDKSKELPHWVLSAMKCLANWPNCSDLKQPMYLGFEKDVFKTIADYYGHLKEPLLTFHLFDAFVSVLGLLQKEKVAVEAFQICCLLLPPENRRKLQLLMRMMARICLNKEMPPLCDGFGTRTLMVQTFSRCILCSKDEVDLDELLAARLVTFLMDNYQEILKVPLALQTSIEERVAHLRRVQFQKSYPEVYQERFPTPESAALLFPEKPKPKPQLLMWALKKPFQPFQRTRSFRM

SEQ ID NO: 14096 - protein, 900 aa, Homo sapiens
MLRFLRRTFGRRSMQRYARGAAGRGAAGLGDERDGGPRGGPAAAASSSALPAAPGGSVFPAGGGPLLTGGAAVHISAAGAAKATLYCRVFLLDGTEVSVDLPKHAKGQDLFDQIVYHLDLVETDYFGLQFLDSAQVAHWLDHAKPIKKQMKIGPAYALHFRVKYYSSEPNNLREEFTRYLFVLQLRHDILSGKLKCPYETAVELAALCLQAELGECELPEHTPELVSEFRFIPNQTEAMEFDIFQRWKECRGKSPAQAELSYLNKAKWLEMYGVDMHVVRGRDGCEYSLGLTPTGILIFEGANKIGLFFWPKITKMDFKKSKLTLVVVEDDDQGREQEHTFVFRLDSARTCKHLWKCAVEHHAFFRLRTPGNSKSNRSDFIRLGSRFRFSGRTEYQATHGSRLRRTSTFERKPSKRYPSRRHSTFKASNPVIAAQLCSKTNPEVHNYQPQYHPNIHPSQPRWHPHSPNVSYPLPSPVLSSSDRLPFGIEENGGTPFLTAASGRHHHQHQHQHQHQHHSNYSLSLTLENKEGPLRSPNSSSKSLTKLSPGTPALFSEAAAHLKKLELETVKAAGPWPPLHININKAEEKKVSEKTLQTPLLPSPVADHVKCNILKAQLENASRVNIQGGKEESPFVNINKKSSLQDASVRSPIPIRVETAQPAVEKPEIKPPRVRKLTRQYSFDEDDLPPDLAEAVGVTTSTTTNTTTAATQVSVPLPSPKVQNVSSPHKSEGKGLLSPGAKSPSDRGGAFTLEPGDLLMDFTEATPLAEPASNPHCAHSRCSPPLSLPMKEETTGVCMYPPIKTRLIKTFPVDTMNPFPDTFTTGPQFTADFRDSKLQCCPGPTSPLIPAATLRPLTETVSTVQTIYTTRKPVSLAASAETLRQELEREKMMKRLLMTEL

SEQ ID NO: 14097 - protein, 518 aa, Homo sapiens
MLRFLRRTFGRRSMQRYARGAAGRGAAGLGDERDGGPRGGPAAAASSSALPAAPGGSVFPAGGGPLLTGGAAVHISAAGAAKATLYCRVFLLDGTEVSVDLPKHAKGQDLFDQIVYHLDLVETDYFGLQFLDSAQVAHWLDHAKPIKKQMKIGPAYALHFRVKYYSSEPNNLREEFTRYLFVLQLRHDILSGKLKCPYETAVELAALCLQAELGECELPEHTPELVSEFRFIPNQTEAMEFDIFQRWKECRGKSPAQAELSYLNKAKWLEMYGVDMHVVRGRDGCEYSLGLTPTGILIFEGANKIGLFFWPKITKMDFKKSKLTLVVVEDDDQGREQEHTFVFRLDSARTCKHLWKCAVEHHAFFRLRTPGNSKSNRSDFIRLGSRFRFSGRTEYQATHGSRLRRTSTFERKPSKRYPSRRHSTFKASNPVIAAQLCSKTNPEVHNYQPQYHPNIHPSQPRWHPHSPNVRPSFQDDRSHWKASASGDDSHFDYVHDQNQKNLGGMQSMMYRDKLMTAL

SEQ ID NO: 14098 - protein, 1087 aa, Homo sapiens
MTTESGSDSESKPDQEAEPQEAAGAQGRAGAPVPEPPKEEQQQALEQFAAAAAHSTPVRREVTDKEQEFAARAAKQLEYQQLEDDKLSQKSSSSKLSRSPLKIVKKPKSMQCKVILLDGSEYTCDVEKRSRGQVLFDKVCEHLNLLEKDYFGLTYRDAENQKNWLDPAKEIKKQVRSGAWHFSFNVKFYPPDPAQLSEDITRYYLCLQLRDDIVSGRLPCSFVTLALLGSYTVQSELGDYDPDECGSDYISEFRFAPNHTKELEDKVIELHKSHRGMTPAEAEMHFLENAKKLSMYGVDLHHAKDSEGVEIMLGVCASGLLIYRDRLRINRFAWPKVLKISYKRNNFYIKIRPGEFEQFESTIGFKLPNHRAAKRLWKVCVEHHTFFRLLLPEAPPKKFLTLGSKFRYSGRTQAQTRRASALIDRPAPYFERSSSKRYTMSRSLDGEVGTGQYATTKGISQTNLITTVTPEKKAEEERDEEEDKRRKGEEVTPISAIRHEGKSPGLGTDSCPLSPPSTHCAPTSPTELRRRCKENDCKLPGYEPSRAEHLPGEPALDSDGPGRPYLGDQDVAFSYRQQTGKGTTLFSFSLQLPESFPSLLDDDGYLSFPNLSETNLLPQSLQHYLPIRSPSLVPCFLFIFFFLLSASFSVPYALTLSFPLALCLCYLEPKAASLSASLDNDPSDSSEEETDSERTDTAADGETTATESDQEEDAELKAQELEKTQDDLMKHQTNISELKRTFLETSTDTAVTNEWEKRLSTSPVRLAARQEDAPMIEPLVPEETKQSSGEKLMDGSEIFSLLESARKPTEFIGGVTSTSQSWVQKMETKTESSGIETEPTVHHLPLSTEKVVQETVLVEERRVVHASGDASYSAGDSGDAAAQPAFTGIKGKEGSALTEGAKEEGGEEVAKAVLEQEETAAASRERQEEQSAAIHISETLEQKPHFESSTVKTETISFGSVSPGGVKLEISTKEVPVVHTETKTITYESSQVDPGTDLEPGVLMSAQTITSETTSTTTTTHITKTVKGGISETRIEKRIVITGDADIDHDQALAQAIKEAKEQHPDMSVTKVVVHKETEITPEDGED

SEQ ID NO: 14099 - protein, 865 aa, Homo sapiens
MTTESGSDSESKPDQEAEPQEAAGAQGRAGAPVPEPPKEEQQQALEQFAAAAAHSTPVRREVTDKEQEFAARAAKQLEYQQLEDDKLSQKSSSSKLSRSPLKIVKKPKSMQCKVILLDGSEYTCDVEKRSRGQVLFDKVCEHLNLLEKDYFGLTYRDAENQKNWLDPAKEIKKQVRSGAWHFSFNVKFYPPDPAQLSEDITRYYLCLQLRDDIVSGRLPCSFVTLALLGSYTVQSELGDYDPDECGSDYISEFRFAPNHTKELEDKVIELHKSHRGMTPAEAEMHFLENAKKLSMYGVDLHHAKDSEGVEIMLGVCASGLLIYRDRLRINRFAWPKVLKISYKRNNFYIKIRPGEFEQFESTIGFKLPNHRAAKRLWKVCVEHHTFFRLLLPEAPPKKFLTLGSKFRYSGRTQAQTRRASALIDRPAPYFERSSSKRYTMSRSLDGASVNENHEIYMKDSMSAAEVGTGQYATTKGISQTNLITTVTPEKKAEEERDEEEDKRRKGEEVTPISAIRHEGKTDSERTDTAADGETTATEELEKTQDDLMKHQTNISELKRTFLETSTDTAVTNEWEKRLSTSPVRLAARQEDAPMIEPLVPEEKMETKTESSGIETEPTVHHLPLSTEKVVQETVLVEERRVVHASGDASYSAGDSGDAAAQPAFTGIKGKEGSALTEGAKEEGGEEVAKAVLEQEETAAASRERQEEQSAAIHISETLEQKPHFESSTVKTETISFGSVSPGGVKLEISTKEVPVVHTETKTITYESSQVDPGTDLEPGVLMSAQTITSETTSTTTTTHITKTVKGGISETRIEKRIVITGDADIDHDQALAQAIKEAKEQHPDMSVTKVVVHKETEITPEDGED

SEQ ID NO: 14100 - protein, 612 aa, Homo sapiens
MTTESGSDSESKPDQEAEPQEAAGAQGRAGAPVPEPPKEEQQQALEQFAAAAAHSTPVRREVTDKEQEFAARAAKQLEYQQLEDDKLSQKSSSSKLSRSPLKIVKKPKSMQCKVILLDGSEYTCDVEKRSRGQVLFDKVCEHLNLLEKDYFGLTYRDAENQKNWLDPAKEIKKQVRSGAWHFSFNVKFYPPDPAQLSEDITRYYLCLQLRDDIVSGRLPCSFVTLALLGSYTVQSELGDYDPDECGSDYISEFRFAPNHTKELEDKVIELHKSHRGMTPAEAEMHFLENAKKLSMYGVDLHHAKDSEGVEIMLGVCASGLLIYRDRLRINRFAWPKVLKISYKRNNFYIKIRPGEFEQFESTIGFKLPNHRAAKRLWKVCVEHHTFFRLLLPEAPPKKFLTLGSKFRYSGRTQAQTRRASALIDRPAPYFERSSSKRYTMSRSLDGASVNENHEIYMKDSMSAAEVGTGQYATTKGISQTNLITTVTPEKKAEEERDEEEDKRRKGEEVTPISAIRHEGKTDSERTDTAADGETTATEELEKTQDDLMKHQTNISELKRTFLETSTDTAVTNEWEKRLSTSPVRLAARQEDAPMIEPLVPEEKMETKTESSG

SEQ ID NO: 14101 - protein, 883 aa, Homo sapiens
MTTESGSDSESKPDQEAEPQEAAGAQGRAGAPVPEPPKEEQQQALEQFAAAAAHSTPVRREVTDKEQEFAARAAKQLEYQQLEDDKLSQKSSSSKLSRSPLKIVKKPKSMQCKVILLDGSEYTCDVEKRSRGQVLFDKVCEHLNLLEKDYFGLTYRDAENQKNWLDPAKEIKKQVRSGAWHFSFNVKFYPPDPAQLSEDITRYYLCLQLRDDIVSGRLPCSFVTLALLGSYTVQSELGDYDPDECGSDYISEFRFAPNHTKELEDKVIELHKSHRGMTPAEAEMHFLENAKKLSMYGVDLHHAKDSEGVEIMLGVCASGLLIYRDRLRINRFAWPKVLKISYKRNNFYIKIRPGEFEQFESTIGFKLPNHRAAKRLWKVCVEHHTFFRLLLPEAPPKKFLTLGSKFRYSGRTQAQTRRASALIDRPAPYFERSSSKRYTMSRSLDGASVNENHEIYMKDSMSAAEVGTGQYATTKGISQTNLITTVTPEKKAEEERDEEEDKRRKGEEVTPISAIRHEGKTDSERTDTAADGETTATESDQEEDAELKAQELEKTQDDLMKHQTNISELKRTFLETSTDTAVTNEWEKRLSTSPVRLAARQEDAPMIEPLVPEETKQSSGEKLMDGSEIFSLLESARKPTEFIGGVTSTSQSWVQKMETKTESSGIETEPTVHHLPLSTEKVVQETVLVEERRVVHASGDASYSAGDSGDAAAQPAFTGIKGKEGSALTEGAKEEGGEEVAKAVLEQEETAAASRERQEEQSAAIHISETLEQKPHFESSTVKTETISFGSVSPGGVKLEISTKEVPVVHTETKTITYESSQVDPGTDLEPGVLMSAQTITSETTSTTTTTHITKTVKGGISETRIEKRIVITGDADIDHDQE

SEQ ID NO: 14102 - protein, 197 aa, Homo sapiens
MPAEVHGSPPASLCPCQSVKFRPGLPEMALLTALDDTLPEEAQGPGRRMILLSTPSQSDALRACFERNLYPGIATKEELAQGIDIPEPRVQIWFQNERSCQLRQHRRQSRPWPGRRDPQKGRRKRTAITGSQTALLLRAFEKDRFPGIAAREELARETGLPESRIQIWFQNRRARHRGQSGRAPTQASIRCNAAPIG

SEQ ID NO: 14103 - protein, 170 aa, Homo sapiens
MALLTALDDTLPEEAQGPGRRMILLSTPSQSDALRACFERNLYPGIATKEELAQGIDIPEPRVQIWFQNERSCQLRQHRRQSRPWPGRRDPQKGRRKRTAITGSQTALLLRAFEKDRFPGIAAREELARETGLPESRIQIWFQNRRARHRGQSGRAPTQASIRCNAAPIG

SEQ ID NO: 14104 - protein, 733 aa, Homo sapiens
MLSFFRRTLGRRSMRKHAEKERLREAQRAATHIPAAGDSKSIITCRVSLLDGTDVSVDLPKKAKGQELFDQIMYHLDLIESDYFGLRFMDSAQVAHWLDGTKSIKKQVKIGSPYCLHLRVKFYSSEPNNLREELTRYLFVLQLKQDILSGKLDCPFDTAVQLAAYNLQAELGDYDLAEHSPELVSEFRFVPIQTEEMELAIFEKWKEYRGQTPAQAETNYLNKAKWLEMYGVDMHVVKARDGNDYSLGLTPTGVLVFEGDTKIGLFFWPKITRLDFKKNKLTLVVVEDDDQGKEQEHTFVFRLDHPKACKHLWKCAVEHHAFFRLRGPVQKSSHRSGFIRLGSRFRYSGKTEYQTTKTNKARRSTSFERRPSKRYSRRTLQMKACATKPEELSVHNNVSTQSNGSQQAWGMRSALPVSPSISSAPVPVEIENLPQSPGTDQHDRKCIPLNIDLLNSPDLLEATIGDVIGASDTMETSQALNDVNVATRLPGLGEPEVEYETLKDTSEKLKQLEMENSPLLSPRSNIDVNINSQEEVVKLTEKCLNNVIESPGLNVMRVPPDFKSNILKAQVEAVHKVTKEDSLLSHKNANVQDAATNSAVLNENNVPLPKESLETLMLITPADSGSVLKEATDELDALLASLTENLIDHTVAPQVSSTSMITPRWIVPQSGAMSNGLAGCEMLLTGKEGHGNKDGISLISPPAPFLVDAVTSSGPILAEEAVLKQKCLLTTEL

SEQ ID NO: 14105 - protein, 505 aa, Homo sapiens
MLSFFRRTLGRRSMRKHAEKERLREAQRAATHIPAAGDSKSIITCRVSLLDGTDVSVDLPKKAKGQELFDQIMYHLDLIESDYFGLRFMDSAQVAHWLDGTKSIKKQVKIGSPYCLHLRVKFYSSEPNNLREELTRYLFVLQLKQDILSGKLDCPFDTAVQLAAYNLQAELGDYDLAEHSPELVSEFRFVPIQTEEMELAIFEKWKEYRGQTPAQAETNYLNKAKWLEMYGVDMHVVKARDGNDYSLGLTPTGVLVFEGDTKIGLFFWPKITRLDFKKNKLTLVVVEDDDQGKEQEHTFVFRLDHPKACKHLWKCAVEHHAFFRLRGPVQKSSHRSGFIRLGSRFRYSGKTEYQTTKTNKARRSTSFERRPSKRYSRRTLQMKACATKPEELSVHNNVSTQSNGSQQAWGMRSALPVSPSISSAPVPVEIENLPQSPGTDQHDRKWLSAASDCCQRGGNQWNTRALPPPQTAHRNYTDFVHEHNVKNAGIRHDVHFPGHTAMTEI

SEQ ID NO: 14106 - protein, 732 aa, Homo sapiens
MLSFFRRTLGRRSMRKHAEKERLREAQRAATHIPAAGDSKSIITCRVSLLDGTDVSVDLPKKAKGQELFDQIMYHLDLIESDYFGLRFMDSAQVAHWLDGTKSIKKQVKIGSPYCLHLRVKFYSSEPNNLREELTRYLFVLQLKQDILSGKLDCPFDTAVQLAAYNLQAELGDYDLAEHSPELVSEFRFVPIQTEEMELAIFEKWKEYRGQTPAQAETNYLNKAKWLEMYGVDMHVVKARDGNDYSLGLTPTGVLVFEGDTKIGLFFWPKITRLDFKKNKLTLVVVEDDDQGKEQEHTFVFRLDHPKACKHLWKCAVEHHAFFRLRGPVQKSSHRSGFIRLGSRFRYSGKTEYQTTKTNKARRSTSFERRPSKRYSRRTLQMKACATKPEELSVHNNVSTQSNGSQQAWGMRSALPVSPSISSAPVPVEIENLPQSPGTDQHDRKCIPLNIDLLNSPDLLEATIGDVIGASDTMETSQALNDVNVATRLPGLGEPEVEYETLKDTSEKLKQLEMENSPLLSPRSNIDVNINSQEEVVKLTEKCLNNVIESPGLNVMRVPPDFKSNILKAQVEAVHKVTKEDSLLSHKNANVQDAATNSAVLNENNVPLPKESLETLMLITPADSGSVLKEATDELDALLASLTENLIDHTVAPQVSSTSMITPRWIVPSGAMSNGLAGCEMLLTGKEGHGNKDGISLISPPAPFLVDAVTSSGPILAEEAVLKQKCLLTTEL

SEQ ID NO: 14107 - protein, 687 aa, Homo sapiens
MLSFFRRTLGRRSMRKHAEKERLREAQRAATHIPAAGDSKSIITCRVSLLDGTDVSVDLPKKAKGQELFDQIMYHLDLIESDYFGLRFMDSAQVAHWLDGTKSIKKQVKIGSPYCLHLRVKFYSSEPNNLREELTRYLFVLQLKQDILSGKLDCPFDTAVQLAAYNLQAELGDYDLAEHSPELVSEFRFVPIQTEEMELAIFEKWKEYRGQTPAQAETNYLNKAKWLEMYGVDMHVVKARDGNDYSLGLTPTGVLVFEGDTKIGLFFWPKITRLDFKKNKLTLVVVEDDDQGKEQEHTFVFRLDHPKACKHLWKCAVEHHAFFRLRGPVQKSSHRSGFIRLGSRFRYSGKTEYQTTKTNKARRSTSFERRPSKRYSRRTLQMKACATKPEELSVHNNVSTQSNGSQQAWGMRSALPVSPSISSAPVPVEIENLPQSPGTDQHDRKCIPLNIDLLNSPDLLEATIGDVIGASDTMETSQALNDVNVATRLPGLGEPEVEYETLKDTSEKLKQLEMENSPLLSPRSNIDVNINSQEEVVKLTEKCLNNVIESPGLNVMRVPPDFKSNILKAQVEAVHKVTKEDSLLSHKNANVQDAATNSAVLNENNVPLPKESLETLMLITPADSGSVLKEATDELDALLASLTENLIDHTVAPQVSSTSMITPRWIVPLWSHFGRRSCPEAEVFTDH

SEQ ID NO: 14108 - protein, 784 aa, Homo sapiens
MEGAMAVRVTAAHTAEAQAEAGREAGEGAVAAVAAALAPSGFLGLPAPFSEEDEDDVHRCGRCQAEFTALEDFVQHKIQKACQRAPPEALPATPATTALLGQEVVPAAPGPEEPITVAHIVVEAASLAADISHASDLVGGGHIKEVIVAAEAELGDGEMAEAPGSPRQQGLGLAGEGEQAQVKLLVNKDGRYVCALCHKTFKTGSILKAHMVTHSSRKDHECKLCGASFRTKGSLIRHHRRHTDERPYKCSKCGKSFRESGALTRHLKSLTPCTEKIRFSVSKDVVVSKEDARAGSGAGAAGLGTATSSVTGEPIETSPVIHLVTDAKGTVIHEVHVQMQELSLGMKALAPEPPVSQELPCSSEGSRENLLHQAMQNSGIVLERAAGEEGALEPAPAAGSSPQPLAVAAPQLPVLEVQPLETQVASEASAVPRTHPCPQCSETFPTAATLEAHKRGHTGPRPFACAQCGKAFPKAYLLKKHQEVHVRERRFRCGDCGKLYKTIAHVRGHRRVHSDERPYPCPKCGKRYKTKNAQQVHFRTHLEEKPHVCQFCSRGFREKGSLVRHVRHHTGEKPFKCYKCGRGFAEHGTLNRHLRTKGGCLLEVEELLVSEDSPAAATTVLTEDPHTVLVEFSSVVADTQEYIIEATADDAETSEATEIIEGTQTEVDSHIMKVVQQIVHQASAGHQIIVQNVTMDEETALGPEAAAADTITIATPESLTEQVAMTLASAISEGTVLAARAGTSGTEQATVTMVSSEDIEILEHAGELVIASPEGQLEVQTVIV

SEQ ID NO: 14109 - protein, 775 aa, Homo sapiens
MMVQRLGLISPPASQVSTACNQISPSLQRAMNAANLNIPPSDTRSLISRESLASTTLSLTESQSASSMKQEWSQGYRALPSLSNHGSQNGLDLGDLLSLPPGTSMSSNSVSNSLPSYLFGTESSHSPYPSPRHSSTRSHSARSKKRALSLSPLSDGIGIDFNTIIRTSPTSLVAYINGSRASPANLSPQPEVYGHFLGVRGSCIPQPRPVPGSQKGVLVAPGGLALPAYGEDGALEHERMQQLEHGGLQPGLVNHMVVQHGLPGPDSQSAGLFKTERLEEFPGSTVDLPPAPPLPPLPPPPGPPPPYHAHAHLHHPELGPHAQQLALPQATLDDDGEMDGIGGKHCCRWIDCSALYDQQEELVRHIEKVHIDQRKGEDFTCFWAGCPRRYKPFNARYKLLIHMRVHSGEKPNKCTFEGCEKAFSRLENLKIHLRSHTGEKPYLCQHPGCQKAFSNSSDRAKHQRTHLDTKPYACQIPGCTKRYTDPSSLRKHVKAHSSKEQQARKKLRSSTELHPDLLTDCLTVQSLQPATSPRDAAAEGTVGRSPGPGPDLYSAPIFSSNYSSRSGTAAGAVPPPHPVSHPSPGHNVQGSPHNPSSQLPPLTAVDAGAERFAPSAPSPHHISPRRVPAPSSILQRTQPPYTQQPSGSHLKSYQPETNSSFQPNGIHVHGFYGQLQKFCPPHYPDSQRIVPPVSSCSVVPSFEDCLVPTSMGQASFDVFHRAFSTHSGITVYDLPSSSSSLFGESLRSGAEDATFLQISTVDRCPSQLSSVYTEG

SEQ ID NO: 14110 - protein, 930 aa, Homo sapiens
MNGRSCSMSLHRTSGTPQGPRMVSGHHIPAIRAHSGTPGPSPCGSTSSPTMASLANNLHLKMPSGGGMAPQNNVAESRIHLPALSPRRQMLTNGKPRFQVTQAGGMSGSHTLKPKQQEFGSPFPPNPGKGALGFGPQCKSIGKGSCNNLVVTSSPMMVQRLGLISPPASQVSTACNQISPSLQRAMNAANLNIPPSDTRSLISRESLASTTLSLTESQSASSMKQEWSQGYRALPSLSNHGSQNGLDLGDLLSLPPGTSMSSNSVSNSLPSYLFGTESSHSPYPSPRHSSTRSHSARSKKRALSLSPLSDGIGIDFNTIIRTSPTSLVAYINGSRASPANLSPQPEVYGHFLGVRGSCIPQPRPVPGSQKGVLVAPGGLALPAYGEDGALEHERMQQLEHGGLQPGLVNHMVVQHGLPGPDSQSAGLFKTERLEEFPGSTVDLPPAPPLPPLPPPPGPPPPYHAHAHLHHPELGPHAQQLALPQATLDDDGEMDGIGGKHCCRWIDCSALYDQQEELVRHIEKVHIDQRKGEDFTCFWAGCPRRYKPFNARYKLLIHMRVHSGEKPNKCTFEGCEKAFSRLENLKIHLRSHTGEKPYLCQHPGCQKAFSNSSDRAKHQRTHLDTKPYACQIPGCTKRYTDPSSLRKHVKAHSSKEQQARKKLRSSTELHPDLLTDCLTVQSLQPATSPRDAAAEGTVGRSPGPGPDLYSAPIFSSNYSSRSGTAAGAVPPPHPVSHPSPGHNVQGSPHNPSSQLPPLTAVDAGAERFAPSAPSPHHISPRRVPAPSSILQRTQPPYTQQPSGSHLKSYQPETNSSFQPNGIHVHGFYGQLQKFCPPHYPDSQRIVPPVSSCSVVPSFEDCLVPTSMGQASFDVFHRAFSTHSGITVYDLPSSSSSLFGESLRSGAEDATFLQISTVDRCPSQLSSVYTEG

SEQ ID NO: 14111 - protein, 763 aa, Homo sapiens
MVACRAIGILSRFSAFRILRSRGYICRNFTGSSALLTRTHINYGVKGDVAVVRINSPNSKVNTLSKELHSEFSEVMNEIWASDQIRSAVLISSKPGCFIAGADINMLAACKTLQEVTQLSQEAQRIVEKLEKSTKPIVAAINGSCLGGGLEVAISCQYRIATKDRKTVLGTPEVLLGALPGAGGTQRLPKMVGVPAALDMMLTGRSIRADRAKKMGLVDQLVEPLGPGLKPPEERTIEYLEEVAITFAKGLADKKISPKRDKGLVEKLTAYAMTIPFVRQQVYKKVEEKVRKQTKGLYPAPLKIIDVVKTGIEQGSDAGYLCESQKFGELVMTKESKALMGLYHGQVLCKKNKFGAPQKDVKHLAILGAGLMGAGIAQVSVDKGLKTILKDATLTALDRGQQQVFKGLNDKVKKKALTSFERDSIFSNLTGQLDYQGFEKADMVIEAVFEDLSLKHRVLKEVEAVIPDHCIFASNTSALPISEIAAVSKRPEKVIGMHYFSPVDKMQLLEIITTEKTSKDTSASAVAVGLKQGKVIIVVKDGPGFYTTRCLAPMMSEVIRILQEGVDPKKLDSLTTSFGFPVGAATLVDEVGVDVAKHVAEDLGKVFGERFGGGNPELLTQMVSKGFLGRKSGKGFYIYQEGVKRKDLNSDMDSILASLKLPPKSEVSSDEDIQFRLVTRFVNEAVMCLQEGILATPAEGDIGAVFGLGFPPCLGGPFRFVDLYGAQKIVDRLKKYEAAYGKQFTPCQLLADHANSPNKKFYQ

SEQ ID NO: 14112 - protein, 82 aa, Homo sapiens
MVACRAIGILSRFSAFRILRSRGYICRNFTGSSALLTRTHINYGVKGDVAVVRINSPNSKHVSRLQDPSRSNTAITRSTENS

SEQ ID NO: 14113 - protein, 654 aa, Homo sapiens
MAPKKLSCLRSLLLPLSLTLLLPQADTRSFVVDRGHDRFLLDGAPFRYVSGSLHYFRVPRVLWADRLLKMRWSGLNAIQFYVPWNYHEPQPGVYNFNGSRDLIAFLNEAALANLLVILRPGPYICAEWEMGGLPSWLLRKPEIHLRTSDPDFLAAVDSWFKVLLPKIYPWLYHNGGNIISIQVENEYGSYRACDFSYMRHLAGLFRALLGEKILLFTTDGPEGLKCGSLRGLYTTVDFGPADNMTKIFTLLRKYEPHGPLVNSEYYTGWLDYWGQNHSTRSVSAVTKGLENMLKLGASVNMYMFHGGTNFGYWNGADKKGRFLPITTSYDYDAPISEAGDPTPKLFALRDVISKFQEVPLGPLPPPSPKMMLGPVTLHLVGHLLAFLDLLCPRGPIHSILPMTFEAVKQDHGFMLYRTYMTHTIFEPTPFWVPNNGVHDRAYVMVDGVFQGVVERNMRDKLFLTGKLGSKLDILVENMGRLSFGSNSSDFKGLLKPPILGQTILTQWMMFPLKIDNLVKWWFPLQLPKWPYPQAPSGPTFYSKTFPILGSVGDTFLYLPGWTKGQVWINGFNLGRYWTKQGPQQTLYVPRFLLFPRGALNKITLLELEDVPLQPQVQFLDKPILNSTSTLHRTHINSLSADTLSASEPMELSGH

SEQ ID NO: 14114 - protein, 564 aa, Homo sapiens
MAPKKLSCLRSLLLPLSLTLLLPQADTRSFVVDRGHDRFLLDGAPFRYVSGSLHYFRVPRVLWADRLLKMRWSGLNAIQFYVPWNYHEPQPGVYNFNGSRDLIAFLNEAALANLLVILRPGPYICAEWEMGGLPSWLLRKPEIHLRTSDPADNMTKIFTLLRKYEPHGPLVNSEYYTGWLDYWGQNHSTRSVSAVTKGLENMLKLGASVNMYMFHGGTNFGYWNGADKKGRFLPITTSYDYDAPISEAGDPTPKLFALRDVISKFQEVPLGPLPPPSPKMMLGPVTLHLVGHLLAFLDLLCPRGPIHSILPMTFEAVKQDHGFMLYRTYMTHTIFEPTPFWVPNNGVHDRAYVMVDGVFQGVVERNMRDKLFLTGKLGSKLDILVENMGRLSFGSNSSDFKGLLKPPILGQTILTQWMMFPLKIDNLVKWWFPLQLPKWPYPQAPSGPTFYSKTFPILGSVGDTFLYLPGWTKGQVWINGFNLGRYWTKQGPQQTLYVPRFLLFPRGALNKITLLELEDVPLQPQVQFLDKPILNSTSTLHRTHINSLSADTLSASEPMELSGH

SEQ ID NO: 14115 - protein, 670 aa, Homo sapiens
MAETKIIYHMDEEETPYLVKLPVAPERVTLADFKNVLSNRPVHAYKFFFKSMDQDFGVVKEEIFDDNAKLPCFNGRVVSWLVLVEGAHSDAGSQGTDSHTDLPPPLERTGGIGDSRSPSFQPDVASSRDGMDNETGTESMVSHRRDRARRRNREEAARTNGHPRGDRRRDVGLPPDSASTALSSELESSSFVDSDEDDSTSRLSSSTEQSTSSRLIRKHKRRRRKQRLRQADRASSFSSMTDSTMSLNIITVTLNMERHHFLGICIVGQSNDRGDGGIYIGSIMKGGAVAADGRIEPGDMLLQVNDVNFENMSNDDAVRVLREIVSQTGPISLTVAKCWDPTPRSYFTVPRPDPVRPIDPAAWLSHTAALTGALPRPQLEEAPLTVESDMNTVVRVMQLPDSGLEIRDRMWLKITIANAVIGADVVDWLYTHVEGFKERREARKYASSLLKHGFLRHTVNKITFSEQCYYVFGDLCSNLATLNLNSGSSGTSDQDTLAPLPHPAAPWPLGQGYPYQYPGPPPCFPPAYQDPGFSYGSGSTGSQQSEGSKSSGSTRNTLRPPACEKERRAAGSGDSDSESDHTAPSGVGSSWRERPADQLSRGSSPRSQASSYAPGLPPPHPTTKAYTVVGGPPGGPPVRELAAVPPELTGSRQSFQKAMGNPCEFFVDIM

SEQ ID NO: 14116 - protein, 662 aa, Homo sapiens
MAETKIIYHMDEEETPYLVKLPVAPERVTLADFKNVLSNRPVHAYKFFFKSMDQDFGVVKEEIFDDNAKLPCFNGRVVSWLVLVEGAHSDAGSQGTDSHTDLPPPLERTGGIGDSRSPSFQPDVASSRDGMDNETGTESMVSHRRDRARRRNREEAARTNGHPRGDRRRDVGLPPDSASTALSSELESSSFVDSDEDDSTSRLSSSTEQSTSSRLIRKHKRRRRKQRLRQADRASSFSSMTDSTMSLNIITVTLNMERHHFLGICIVGQSNDRGDGGIYIGSIMKGGAVAADGRIEPGDMLLQVNDVNFENMSNDDAVRVLREIVSQTGPISLTVAKCWDPTPRSYFTVPRPDPVRPIDPAAWLSHTAALTGALPRPQLEEAPLTVESDMNTVVRVMQLPDSGLEIRDRMWLKITIANAVIGADVVDWLYTHVEGFKERREARKYASSLLKHGFLRHTVNKITFSEQCYYVFGDLCSNGSSGTSDQDTLAPLPHPAAPWPLGQGYPYQYPGPPPCFPPAYQDPGFSYGSGSTGSQQSEGSKSSGSTRNTLRPPACEKERRAAGSGDSDSESDHTAPSGVGSSWRERPADQLSRGSSPRSQASSYAPGLPPPHPTTKAYTVVGGPPGGPPVRELAAVPPELTGSRQSFQKAMGNPCEFFVDIM

SEQ ID NO: 14117 - protein, 702 aa, Homo sapiens
MAAPMTPAARPEDYEAALNAALADVPELARLLEIDPYLKPYAVDFQRRYKQFSQILKNIGENEGGIDKFSRGYESFGVHRCADGGLYCKEWAPGAEGVFLTGDFNGWNPFSYPYKKLDYGKWELYIPPKQNKSVLVPHGSKLKVVITSKSGEILYRISPWAKYVVREGDNVNYDWIHWDPEHSYEFKHSRPKKPRSLRIYESHVGISSHEGKVASYKHFTCNVLPRIKGLGYNCIQLMAIMEHAYYASFGYQITSFFAASSRYGTPEELQELVDTAHSMGIIVLLDVVHSHASKNSADGLNMFDGTDSCYFHSGPRGTHDLWDSRLFAYSSWEILRFLLSNIRWWLEEYRFDGFRFDGVTSMLYHHHGVGQGFSGDYSEYFGLQVDEDALTYLMLANHLVHTLCPDSITIAEDVSGMPALCSPISQGGGGFDYRLAMAIPDKWIQLLKEFKDEDWNMGDIVYTLTNRRYLEKCIAYAESHDQALVGDKSLAFWLMDAEMYTNMSVLTPFTPVIDRGIQLHKMIRLITHGLGGEGYLNFMGNEFGHPEWLDFPRKGNNESYHYARRQFHLTDDDLLRYKFLNNFDRDMNRLEERYGWLAAPQAYVSEKHEGNKIIAFERAGLLFIFNFHPSKSYTDYRVGTALPGKFKIVLDSDAAEYGGHQRLDHSTDFFSEAFEHNGRPYSLLVYIPSRVALILQNVDLPN

SEQ ID NO: 14118 - protein, 78 aa, Homo sapiens
MAVFHDEVEIEDFQYDEDSETYFCPCPCGDNFSITKEELENGEGVAMCPGCSLIIKVIYDKDQFACGETVPVPSVNKE

SEQ ID NO: 14119 - protein, 427 aa, Homo sapiens
MAEQDVENDLLDYDEEEEPQAPQESTPAPPKKDIKGSYVSIHSSGFRDFLLKPELLRAIVDCGFEHPSEVQHECIPQAILGMDVLCQAKSGMGKTAVFVLATLQQIEPVNGQVTVLVMCHTRELAFQISKEYERFSKYMPSVKVSVFFGGLSIKKDEEVLKKNCPHVVVGTPGRILALVRNRSFSLKNVKHFVLDECDKMLEQLDMRRDVQEIFRLTPHEKQCMMFSATLSKDIRPVCRKFMQDPMEVFVDDETKLTLHGLQQYYVKLKDSEKNRKLFDLLDVLEFNQVIIFVKSVQRCMALAQLLVEQNFPAIAIHRGMAQEERLSRYQQFKDFQRRILVATNLFGRGMDIERVNIVFNYDMPEDSDTYLHRVARAGRFGTKGLAITFVSDENDAKILNDVQDRFEVNVAELPEEIDISTYIEQSR

SEQ ID NO: 14120 - protein, 322 aa, Homo sapiens
MAEQDVENDLLDYDEEEEPQAPQESTPAPPKKDIKGSYVSIHSSGFRDFLLKPELLRAIVDCGFEHPSEVQHECIPQAILGMDVLCQAKSGMGKTAVFVLATLQQIEPVNGQVTVLVMCHTRELAFQISKEYERFSKYMPSVKVSVFFGGLSIKKDEEVLKKNCPHVVVGTPGRILALVRNRSFSLKNVKHFVLDECDKMLEQLDMRRDVQEIFRLTPHEKQCMMFSATLSKDIRPVCRKFMQDPMEVFVDDETKLTLHGLQQYYVKLKDSEKNRKLFDLLDVLEFNQPVTLSAVQGFPAADPGGHQSVWPGDGHRASQHRL

SEQ ID NO: 14121 - protein, 267 aa, Homo sapiens
MAEQDVENDLLDYDEEEEPQAPQESTPAPPKKDIKGSYVSIHSSGFRDFLLKPELLRAIVDCGFEHPSEVQHECIPQAILGMDVLCQAKSGMGKTAVFVLATLQQIEPVNGQVTVLVMCHTRELAFQISKEYERFSKYMPSVKVSVFFGGLSIKKDEEVLKKNCPHVVVGTPGRILALVRNRSFSLKNVKHFVLDECDKMLEQLDMRRDVQEIFRLTPHEKQCMMFSATLSKDIRPVCRKFMQDVLWEVSHKGVAHWKVLGRRDAQR

SEQ ID NO: 14122 - protein, 82 aa, Homo sapiens
MAVFHDEVEIEDFQYDEDSETYFYPCPCGDNFSITKEDLENGEDVATCPSCSLIIKVIYDKDQFVCGETVPAPSANKELVKC

SEQ ID NO: 14123 - protein, 57 aa, Homo sapiens
MAVFHDEVEIEDFQYDEDSETYFYPCPCGDNFSITKDQFVCGETVPAPSANKELVKC

SEQ ID NO: 14124 - protein, 290 aa, Homo sapiens
MAALRVLLSCVRGPLRPPVRCPAWRPFASGANFEYIIAEKRGKNNTVGLIQLNRPKALNALCDGLIDELNQALKTFEEDPAVGAIVLTGGDKAFAAGADIKEMQNLSFQDCYSSKFLKHWDHLTQVKKPVIAAVNGYAFGGGCELAMMCDIIYAGEKAQFAQPEILIGTIPGAGGTQRLTRAVGKSLAMEMVLTGDRISAQDAKQAGLVSKICPVETLVEEAIQCAEKIASNSKIVVAMAKESVNAAFEMTLTEGSKLEKKLFYSTFATDDRKEGMTAFVEKRKANFKDQ

SEQ ID NO: 14125 - protein, 173 aa, Homo sapiens
MALRVVRSVRALLCTLRAVPSPAAPCPPRPWQLGVGAVRTLRTGPALLSVRKFTEKHEWVTTENGIGTVGISNFAQEALGDVVYCSLPEVGTKLNKQDEFGALESVKAASELYSPLSGEVTEINEALAENPGLVNKSCYEDGWLIKMTLSNPSELDELMSEEAYEKYIKSIEE

SEQ ID NO: 14126 - protein, 423 aa, Homo sapiens
MDRRMWGAHVFCVLSPLPTVLGHMHPECDFITQLREDESACLQAAEEMPNTTLGCPATWDGLLCWPTAGSGEWVTLPCPDFFSHFSSESGAVKRDCTITGWSEPFPPYPVACPVPLELLAEEESYFSTVKIIYTVGHSISIVALFVAITILVALRRLHCPRNYVHTQLFTTFILKAGAVFLKDAALFHSDDTDHCSFSTVLCKVSVAASHFATMTNFSWLLAEAVYLNCLLASTSPSSRRAFWWLVLAGWGLPVLFTGTWVSCKLAFEDIACWDLDDTSPYWWIIKGPIVLSVGVNFGLFLNIIRILVRKLEPAQGSLHTQSQYWRLSKSTLFLIPLFGIHYIIFNFLPDNAGLGIRLPLELGLGSFQGFIVAILYCFLNQEVRTEISRKWHGHDPELLPAWRTRAKWTTPSRSAAKVLTSMC

SEQ ID NO: 14127 - protein, 569 aa, Homo sapiens
MKKKLVVLGLLAVVLVLVIVGLCLWLPSASKEPDNHVYTRAAVAADAKQCSKIGRDALRDGGSAVDAAIAALLCVGLMNAHSMGIGGGLFLTIYNSTTRKAEVINAREVAPRLAFATMFNSSEQSQKGGLSVAVPGEIRGYELAHQRHGRLPWARLFQPSIQLARQGFPVGKGLAAALENKRTVIEQQPVLCEVFCRDRKVLREGERLTLPQLADTYETLAIEGAQAFYNGSLTAQIVKDIQAAGGIVTAEDLNNYRAELIEHPLNISLGDVVLYMPSAPLSGPVLALILNILKGYNFSRESVESPEQKGLTYHRIVEAFRFAYAKRTLLGDPKFVDVTEVVRNMTSEFFAAQLRAQISDDTTHPISYYKPEFYTPDDGGTAHLSVVAEDGSAVSATSTINLYFGSKVRSPVSGILFNNEMDDFSSPSITNEFGVPPSPANFIQPGKQPLSSMCPTIMVGQDGQVRMVVGAAGGTQITTATALAIIYNLWFGYDVKRAVEEPRLHNQLLPNVTTVERNIDQAVTAALETRHHHTQIASTFIAVVQAIVRTAGGWAAASDSRKGGEPAGY

SEQ ID NO: 14128 - protein, 366 aa, Homo sapiens
MKKKLVVLGLLAVVLVLVIVGLCLWLPSASKEPDNHVYTRAAVAADAKQCSKIGRDALRDGGSAVDAAIAALLCVGLMNAHSMGIGGGLFLTIYNSTTRKAEVINAREVAPRLAFATMFNSSEQSQKGGLSVAVPGEIRGYELAHQRHGRLPWARLFQPSIQLARQGFPVGKGLAAALENKRTVIEQQPVLCEVFCRDRKVLREGERLTLPQLADTYETLAIEGAQAFYNGSLTAQIVKDIQAAGGIVTAEDLNNYRAELIEHPLNISLGDVVLYMPSAPLSGPVLALILNILKGYNFSRESVESPEQKGLTYHRIVEAFRFAYAKRTLLGDPKFVDVTEASSGVSAGGPQHDLRVLRCPAPGPDL

SEQ ID NO: 14129 - protein, 225 aa, Homo sapiens
MTSEFFAAQLRAQISDDTTHPISYYKPEFYTPDDGGTAHLSVVAEDGSAVSATSTINLYFGSKVRSPVSGILFNNEMDDFSSPSITNEFGVPPSPANFIQPGKQPLSSMCPTIMVGQDGQVRMVVGAAGGTQITTATALAIIYNLWFGYDVKRAVEEPRLHNQLLPNVTTVERNIDQAVTAALETRHHHTQIASTFIAVVQAIVRTAGGWAAASDSRKGGEPAGY

SEQ ID NO: 14130 - protein, 117 aa, Homo sapiens
MPSPGTVCSLLLLGMLWLDLAMAGSSFLSPEHQRVQQRKESKKPPAKLQPRALAGWLRPEDGGQAEGAEDELEVRFNAPFDVGIKLSGVQYQQHSQALGKFLQDILWEEAKEAPADK

SEQ ID NO: 14131 - protein, 116 aa, Homo sapiens
MPSPGTVCSLLLLGMLWLDLAMAGSSFLSPEHQRVQRKESKKPPAKLQPRALAGWLRPEDGGQAEGAEDELEVRFNAPFDVGIKLSGVQYQQHSQALGKFLQDILWEEAKEAPADK

SEQ ID NO: 14132 - protein, 105 aa, Homo sapiens
MFTCWWSYLRSTLAAVPGEASRVQQRKESKKPPAKLQPRALAGWLRPEDGGQAEGAEDELEVRFNAPFDVGIKLSGVQYQQHSQALGKFLQDILWEEAKEAPADK

SEQ ID NO: 14133 - protein, 104 aa, Homo sapiens
MFTCWWSYLRSTLAAVPGEASRVQRKESKKPPAKLQPRALAGWLRPEDGGQAEGAEDELEVRFNAPFDVGIKLSGVQYQQHSQALGKFLQDILWEEAKEAPADK

SEQ ID NO: 14134 - protein, 66 aa, Homo sapiens
MFTCWWSYLRSTLAAVPGEASRVQFNAPFDVGIKLSGVQYQQHSQALGKFLQDILWEEAKEAPADK

SEQ ID NO: 14135 - protein, 91 aa, Homo sapiens
MPSPGTVCSLLLLGMLWLDLAMAGSSFLSPEHQRVQQRKESKKPPAKLQPRALAGWLRPEDGGQAEGAEDELEVRRPQPTSDRPQALLTSL

SEQ ID NO: 14136 - protein, 569 aa, Homo sapiens
MKKKLVVLGLLAVVLVLVIVGLCLWLPSASKEPDNHVYTRAAMAADAKQCLEIGRDTLRDGGSAVDAAIAALLCVGLMNAHSMGIGVGLFLTIYNSTTGKAEVINAREVAPRLAFASMFNSSEQSQKGGLSVAVPGEIRGYELAHQRHGRLPWARLFQPSIQLARQGFPVGKGLAAVLENKRTVIEQQPVLWYVFCRDRKVLREGERLTLPRLADTYEMLAIEGAQAFYNGSLMAQIVKDIQAAGGIVTAEDLNNYRAELIEHPLNISLGDAVLYMPSARLSGPVLALILNILKGYNFSRESVETPEQKGLTYHRIVEAFRFAYAKRTLLGDPKFVDVTEVVRNMTSEFFAAQLRSQISDHTTHPISYYKPEFYTPDDGGTAHLSVVAEDGSAVSATSTINLYFGSKVCSPVSGILFNNEWTTSALPAFTNEFGAPPSPANFIQPGKQPLLSMCLTIMVGQDGQVRMVVGAAGGTQITTDTALAIIYNLWFGYDVKRAVEEPRLHNKLLPNVTTVERNIDQAVTAALETRHHHTQIASTFIAVVQAIVRTAGGWAAALDSRKGGEPAGY

SEQ ID NO: 14137 - protein, 559 aa, Homo sapiens
MKKKLVVLGLLAVVLVLVIVGLCLWLPSASKEPDNHVYTRAAMAADAKQCLEIGRDTLRDGGSAVDAAIAALLCVGLMNAHSMGIGVGLFLTIYNSTTGKAEVINAREVAPRLAFASMFNSSEQSQKGGLSVAVPGEIRGYELAHQRHGRLPWARLFQPSIQLARQGFPVGKGLAAVLENKRTVIEQQPVLWYVFCRDRKVLREGERLTLPRLADTYEMLAIEGAQAFYNGSLMAQIVKDIQAAGGIVTAEDLNNYRAELIEHPLNISLGDAVLYMPSARLSGPVLALILNILKGYNFSRESVETPEQKGLTYHRIVEAFRFAYAKRTLLGDPKFVDVTEVVRNMTSEFFAAQLRSQISDHTTHPISYYKPEFYTPDDGGTAHLSVVAEDGSAVSATSTINLYGILFNNEWTTSALPAFTNEFGAPPSPANFIQPGKQPLLSMCLTIMVGQDGQVRMVVGAAGGTQITTDTALAIIYNLWFGYDVKRAVEEPRLHNKLLPNVTTVERNIDQAVTAALETRHHHTQIASTFIAVVQAIVRTAGGWAAALDSRKGGEPAGY

SEQ ID NO: 14138 - protein, 574 aa, Homo sapiens
MKKKLVVLGLLAVVLVLVIVGLCLWLPSASKEPDNHVYTRAAMAADAKQCLEIGRDTLRDGGSAVDAAIAALLCVGLMNAHSMGIGVGLFLTIYNSTTGKAEVINAREVAPRLAFASMFNSSEQSQKGGLSVAVPGEIRGYELAHQRHGRLPWARLFQPSIQLARQGFPVGKGLAAVLENKRTVIEQQPVLCPLCPGEVFCRDRKVLREGERLTLPRLADTYEMLAIEGAQAFYNGSLMAQIVKDIQAAGGIVTAEDLNNYRAELIEHPLNISLGDAVLYMPSARLSGPVLALILNILKGYNFSRESVETPEQKGLTYHRIVEAFRFAYAKRTLLGDPKFVDVTEVVRNMTSEFFAAQLRSQISDHTTHPISYYKPEFYTPDDGGTAHLSVVAEDGSAVSATSTINLYFGSKVCSPVSGILFNNEWTTSALPAFTNEFGAPPSPANFIQPGKQPLLSMCLTIMVGQDGQVRMVVGAAGGTQITTDTALAIIYNLWFGYDVKRAVEEPRLHNKLLPNVTTVERNIDQAVTAALETRHHHTQIASTFIAVVQAIVRTAGGWAAALDSRKGGEPAGY

SEQ ID NO: 14139 - protein, 568 aa, Homo sapiens
MKKKLVVLGLLAVVLVLVIVGLCLWLPSASKEPDNHVYTRAAVAADAKQCLEIGRDTLRDGGSAVDAAIAALLCVGLMNAHSMGIGVGLFLTIYNSTTRKAEVINAREVAPRLAFASMFNSSEQSQKGGLSVAVPGEIRGYELAHQRHGRLPWARLFQPSIQLARQGFPVGKGLAAVLENKRTVIEQQPVLCEVFCRDRKVLREGERLTLPRLADTYEMLAIEGAQAFYNGSLMAQIVKDIQAAGGIVTAEDLNNYCAELIEHPLNISLGDAVLYMPSARLSGPVLALILNILKGYNFSRESVETPEQKGLTYHRIVEAFRFAYAKRTLLGDPKFVDVTEVVRNMTSEFFAAQLRSQISDHTTHPISYYKPEFYTPDDGGTAHLSVVAEDGSAVSATSTINLYFGSKVCSPVSGILFNNMDDFSSPSITNEFGAPPSPANFIQPGKQPLLSMCPTIMVGQDGQVRMVVGAAGGTQITTDTALAIIYNLWFGYDVKRAVEEPRLHNKLLPNVTTVERNIDQAVTAALETRHHHTQIASTFIAVVQAIVRTAGGWAAASDSRKGGEPAGY

SEQ ID NO: 14140 - protein, 586 aa, Homo sapiens
MARGYGATVSLVLLGLGLALAVIVLAVVLSRHQAPCGPQAFAHAAVAADSKVCSDIGRAILQQQGSPVDATIAALVCTSVVNPQSMGLGGGVIFTIYNVTTGKVEVINARETVPASHAPSLLDQCAQALPLGTGAQWIGVPGELRGYAEAHRRHGRLPWAQLFQPTIALLRGGHVVAPVLSRFLHNSILRPSLQASTLRQLFFNGTEPLRPQDPLPWPALATTLETVATEGVEVFYTGRLGQMLVEDIAKEGSQLTLQDLAKFQPEVVDALEVPLGDYTLYSPPPPAGGAILSFILNVLRGFNFSTESMARPEGRVNVYHHLVETLKFAKGQRWRLGDPRSHPKLQNASRDLLGETLAQLIRQQIDGRGDHQLSHYSLAEAWGHGTGTSHVSVLGEDGSAVAATSTINTPFGAMVYSPRTGIILNNELLDLCERCPRGSGTTPSPVSGDRVGGAPGRCWPPVPGERSPSSMVPSILINKAQGSKLVIGGAGGELIISAVAQAIMSKLWLGFDLRAAIAAPILHVNSKGCVEYEPNFSQEVQRGLQDRGQNQTQRPFFLNVVQAVSQEGACVYAVSDLRKSGEAAGY

SEQ ID NO: 14141 - protein, 554 aa, Homo sapiens
MARGYGATVSLVLLGLGLALAVIVLAVVLSRHQAPCGPQAFAHAAVAADSKVCSDIGRAILQQQGSPVDATIAALVCTSVVNPQSMGLGGGVIFTIYNVTTGAQWIGVPGELRGYAEAHRRHGRLPWAQLFQPTIALLRGGHVVAPVLSRFLHNSILRPSLQASTLRQLFFNGTEPLRPQDPLPWPALATTLETVATEGVEVFYTGRLGQMLVEDIAKEGSQLTLQDLAKFQPEVVDALEVPLGDYTLYSPPPPAGGAILSFILNVLRGFNFSTESMARPEGRVNVYHHLVETLKFAKGQRWRLGDPRSHPKLQNASRDLLGETLAQLIRQQIDGRGDHQLSHYSLAEAWGHGTGTSHVSVLGEDGSAVAATSTINTPFGAMVYSPRTGIILNNELLDLCERCPRGSGTTPSPVSGDRVGGAPGRCWPPVPGERSPSSMVPSILINKAQGSKLVIGGAGGELIISAVAQAIMSKLWLGFDLRAAIAAPILHVNSKGCVEYEPNFSQEVQRGLQDRGQNQTQRPFFLNVVQAVSQEGACVYAVSDLRKSGEAAGY

SEQ ID NO: 14142 - protein, 587 aa, Homo sapiens
MARGYGATVSLVLLGLGLALAVIVLAVVLSRHQAPCGPQAFAHAAVAADSKVCSDIGRAILQQQGSPVDATIAALVCTSVVNPQSMGLGGGVIFTIYNVTTGKVEVINARETVPASHAPSLLDQCAQALPLGTGAQWIGVPGELRGYAEAHRRHGRLPWAQLFQPTIALLRGGHVVAPVLSRFLHNSILRPSLQASTLRQLFFNGTEPLRPQDPLPWPALATTLETVATEGVEVFYTGRLGQMLVEDIAKEGSQLTLQDLAKFQPEVVDALEVPLGDYTLYSPPPPAGGAILSFILNVLRGFNFSTESMARPEGRVNVYHHLVETLKFAKGQRWRLGDPRSHPKLQNASRDLLGETLAQLIRQQIDGRGDHQLSHYSLAEAWGHGTGTSHVSVLGEDGSAVAATSTINTPFGAMVYSPRTGIILNNELLDLCERCPRGSGTTPSPAVSGDRVGGAPGRCWPPVPGERSPSSMVPSILINKAQGSKLVIGGAGGELIISAVAQAIMSKLWLGFDLRAAIAAPILHVNSKGCVEYEPNFSQEVQRGLQDRGQNQTQRPFFLNVVQAVSQEGACVYAVSDLRKSGEAAGY

SEQ ID NO: 14143 - protein, 636 aa, Homo sapiens
MTTWSLRRRPARTLGLLLLVVLGFLVLRRLDWSTLVPLRLRHRQLGLQAKGWNFMLEDSTFWIFGGSIHYFRVPREYWRDRLLKMKACGLNTLTTYVPWNLHEPERGKFDFSGNLDLEAFVLMAAEIGLWVILRPGPYICSEMDLGGLPSWLLQDPGMRLRTTYKGFTEAVDLYFDHLMSRVVPLQYKRGGPIIAVQVENEYGSYNKDPAYMPYVKKALEDRGIVELLLTSDNKDGLSKGIVQGVLATINLQSTHELQLLTTFLFNVQGTQPKMVMEYWTGWFDSWGGPHNILDSSEVLKTVSAIVDAGSSINLYMFHGGTNFGFMNGAMHFHDYKSDVTSYDYDAVLTEAGDYTAKYMKLRDFFGSISGIPLPPPPDLLPKMPYEPLTPVLYLSLWDALKYLGEPIKSEKPINMENLPVNGGNGQSFGYILYETSITSSGILSGHVHDRGQVFVNTVSIGFLDYKTTKIAVPLIQGYTVLRILVENRGRVNYGENIDDQRKGLIGNLYLNDSPLKNFRIYSLDMKKSFFQRFGLDKWSSLPETPTLPAFFLGSLSISSTPCDTFLKLEGWEKGVVFINGQNLGRYWNIGPQKTLYLPGPWLSSGINQVIVFEETMAGPALQFTETPHLGRNQYIK

SEQ ID NO: 14144 - protein, 348 aa, Homo sapiens
MAAGVAGWGVEAEEFEDAPDVEPLEPTLSNIIEQRSLKWIFVGGKGGVGKTTCSCSLAVQLSKGRESVLIISTDPAHNISDAFDQKFSKVPTKVKGYDNLFAMEIDPSLGVAELPDEFFEEDNMLSMGKKMMQEAMSAFPGIDEAMSYAEVMRLVKGMNFSVVVFDTAPTGHTLRLLNFPTIVERGLGRLMQIKNQISPFISQMCNMLGLGDMNADQLASKLEETLPVIRSVSEQFKDPEQTTFICVCIAEFLSLYETERLIQELAKCKIDTHNIIVNQLVFPDPEKPCKMCEARHKIQAKYLDQMEDLYEDFHIVKLPLLPHEVRGADKVNTFSALLLEPYKPPSAQ

SEQ ID NO: 14145 - protein, 638 aa, Homo sapiens
MDLWQLLLTLALAGSSDAFSGSEATAAILSRAPWSLQSVNPGLKTNSSKEPKFTKCRSPERETFSCHWTDEVHHGTKNLGPIQLFYTRRNTQEWTQEWKECPDYVSAGENSCYFNSSFTSIWIPYCIKLTSNGGTVDEKCFSVDEIVQPDPPIALNWTLLNVSLTGIHADIQVRWEAPRNADIQKGWMVLEYELQYKEVNETKWKMMDPILTTSVPVYSLKVDKEYEVRVRSKQRNSGNYGEFSEVLYVTLPQMSQFTCEEDFYFPWLLIIIFGIFGLTVMLFVFLFSKQQRIKMLILPPVPVPKIKGIDPDLLKEGKLEEVNTILAIHDSYKPEFHSDDSWVEFIELDIDEPDEKTEESDTDRLLSSDHEKSHSNLGVKDGDSGRTSCCEPDILETDFNANDIHEGTSEVAQPQRLKGEADLLCLDQKNQNNSPYHDACPATQQPSVIQAEKNKPQPLPTEGAESTHQAAHIQLSNPSSLSNIDFYAQVSDITPAGSVVLSPGQKNKAGMSQCDMHPEMVSLCQENFLMDNAYFCEADAKKCIPVAPHIKVESHIQPSLNQEDIYITTESLTTAAGRPGTGEHVPGSEMPVPDYTSIHIVQSPQGLILNATALPLPDKEFLSSCGYVSTDQLNKIMP

SEQ ID NO: 14146 - protein, 297 aa, Homo sapiens
MDLWQLLLTLALAGSSDAFSGSEATAAILSRAPWSLQSVNPGLKTNSSKEPKFTKCRSPERETFSCHWTDEVHHGTKNLGPIQLFYTRRNTQEWTQEWKECPDYVSAGENSCYFNSSFTSIWIPYCIKLTSNGGTVDEKCFSVDEIVQPDPPIALNWTLLNVSLTGIHADIQVRWEAPRNADIQKGWMVLEYELQYKEVNETKWKMMDPILTTSVPVYSLKVDKEYEVRVRSKQRNSGNYGEFSEVLYVTLPQMSQFTCEEDFYFPWLLIIIFGIFGLTVMLFVFLFSKQQSSSSKD

SEQ ID NO: 14147 - protein, 294 aa, Homo sapiens
MDLWQLLLTLALAGSSDAFSGSEATAAILSRAPWSLQSVNPGLKTNSSKEPKFTKCRSPERETFSCHWTDEVHHGTKNLGPIQLFYTRRNTQEWTQEWKECPDYVSAGENSCYFNSSFTSIWIPYCIKLTSNGGTVDEKCFSVDEIVQPDPPIALNWTLLNVSLTGIHADIQVRWEAPRNADIQKGWMVLEYELQYKEVNETKWKMMDPILTTSVPVYSLKVDKEYEVRVRSKQRNSGNYGEFSEVLYVTLPQMSQFTCEEDFYFPWLLIIIFGIFGLTVMLFVFLFSKQQKEN

SEQ ID NO: 14148 - protein, 616 aa, Homo sapiens
MDLWQLLLTLALAGSSDAFSGSEDSSKEPKFTKCRSPERETFSCHWTDEVHHGTKNLGPIQLFYTRRNTQEWTQEWKECPDYVSAGENSCYFNSSFTSIWIPYCIKLTSNGGTVDEKCFSVDEIVQPDPPIALNWTLLNVSLTGIHADIQVRWEAPRNADIQKGWMVLEYELQYKEVNETKWKMMDPILTTSVPVYSLKVDKEYEVRVRSKQRNSGNYGEFSEVLYVTLPQMSQFTCEEDFYFPWLLIIIFGIFGLTVMLFVFLFSKQQRIKMLILPPVPVPKIKGIDPDLLKEGKLEEVNTILAIHDSYKPEFHSDDSWVEFIELDIDEPDEKTEESDTDRLLSSDHEKSHSNLGVKDGDSGRTSCCEPDILETDFNANDIHEGTSEVAQPQRLKGEADLLCLDQKNQNNSPYHDACPATQQPSVIQAEKNKPQPLPTEGAESTHQAAHIQLSNPSSLSNIDFYAQVSDITPAGSVVLSPGQKNKAGMSQCDMHPEMVSLCQENFLMDNAYFCEADAKKCIPVAPHIKVESHIQPSLNQEDIYITTESLTTAAGRPGTGEHVPGSEMPVPDYTSIHIVQSPQGLILNATALPLPDKEFLSSCGYVSTDQLNKIMP

SEQ ID NO: 14149 - protein, 653 aa, Homo sapiens
MKSPPLLSPCLSWKRMAGIFFLPFISSGFAPRFKQEENFMLGRAHPSQPRFNWSHLTPLELKNRSVGLGTESTGRGKPHFTLEGHKFLIFGGSIHYFRVPREYWRDRLLKLKACGFNTVTTYVPWNLHEPERGKFDFSGNLDLEAFVLMAAEIGLWVILRPGRYICSEMDLGGLPSWLLQDPRLLLRTTNKSFIEAVEKYFDHLIPRVIPLQYRQAGPVIAVQVENEYGSFNKDKTYMPYLHKALLRRGIVELLLTSDGEKHVLSGHTKGVLAAINLQKLHQDTFNQLHKVQRDKPLLIMEYWVGWFDRWGDKHHVKDAKEVEHAVSEFIKYEISFNVYMFHGGTNFGFMNGATYFGKHSGIVTSYDYDAVLTEAGDYTEKYLKLQKLFQSVSATPLPRVPKLPPKAVYPPVRPSLYLPLWDALSYLNEPVRSRQPVNMENLPINNGSGQSYGLVLYEKSICSGGRLRAHAHDVAQVFLDETMIGILNENNKDLHIPELRDCRYLRILVENQGRVNFSWQIQNEQKGITGSVSINNSSLEGFTIYSLEMKMSFFERLRSATWKPVPDSHQGPAFYCGTLKAGPSPKDTFLSLLNWNYGFVFINGRNLGRYWNIGPQKTLYLPGVWLHPEDNEVILFEKMMSGSDIKSTDKPTL

SEQ ID NO: 14150 - protein, 314 aa, Homo sapiens
MFHGGTNFGFMNGATYFGKHSGIVTSYDYDAVLTEAGDYTEKYLKLQKLFQSVSATPLPRVPKLPPKAVYPPVRPSLYLPLWDALSYLNEPVRSRQPVNMENLPINNGSGQSYGLVLYEKSICSGGRLRAHAHDVAQVFLDETMIGILNENNKDLHIPELRDCRYLRILVENQGRVNFSWQIQNEQKGITGSVSINNSSLEGFTIYSLEMKMSFFERLRSATWKPVPDSHQGPAFYCGTLKAGPSPKDTFLSLLNWNYGFVFINGRNLGRYWNIGPQKTLYLPGVWLHPEDNEVILFEKMMSGSDIKSTDKPTL

SEQ ID NO: 14151 - protein, 313 aa, Homo sapiens
MKSPPLLSPCLSWKRMAGIFFLPFISSGFAPRFKQEENFMLGRAHPSQPRFNWSHLTPLELKNRSVGLGTESTGRGKPHFTLEGHKFLIFGGSIHYFRVPREYWRDRLLKLKACGFNTVTTYVPWNLHEPERGKFDFSGNLDLEAFVLMAAEIGLWVILRPGRYICSEMDLGGLPSWLLQDPRLLLRTTNKSFIEAVEKYFDHLIPRVIPLQYRQAGPVIAVQVENEYGSFNKDKTYMPYLHKALLRRGIVELLLTSDGEKHVLSGHTKGVLAAINLQKLHQDTFNQLHKVQGASIDAGLLSDASQAATSSSL

SEQ ID NO: 14152 - protein, 493 aa, Homo sapiens
MERAEEPVVYQKLLPWEPSLESEEEVEEEETSEALVLNPRRHQDSSRNKAGGLPGTWARVVAALLLLAVGCSLAVRQLQNQGRSTGSLGSVAPPPGGHSHGPGVYHHGAIISPAGRELLVAGGNVVDAGVGAALCLAVVHPHATGLGAMFWGLFHDSSSGNSTALTSGPAQTLAPGLGLPAALPTLHLLHARFGRLPWPRLLVGPTTLAQEGFLVDTPLARALVARGTEGLCPLLCHADGTPLGAGARATNPQLAAVLRSAALAPTSDLAGDALLSLLAGDLGVEVPSAVPRPTLEPAEQLPVPQGILFTTPSPSAGPELLALLEAALRSGAPIPDPCPPFLQTAVSPESSALAAVDSSGSVLLLTSSLNCSFGSAHLSPSTGVLLSNLVAKSTTSAWACPLILRGSLDDTEADVLGLVASGTPDVARAMTHTLLRHLAARPPTQAQHQHQGQQEPTEHPSTCGQGTLLQVAAHTEHAHVSSVPHACCPFQGF

SEQ ID NO: 14153 - protein, 461 aa, Homo sapiens
MERAEEPVVYQKLLPWEPSLESEEEVEEEETSEALVLNPRRHQDSSRNKAGGLPGTWARVVAALLLLAVGCSLAVRQLQNQGRSTGSLGSVAPPPGGHSHGPGVYHHGAIISPAGAMFWGLFHDSSSGNSTALTSGPAQTLAPGLGLPAALPTLHLLHARFGRLPWPRLLVGPTTLAQEGFLVDTPLARALVARGTEGLCPLLCHADGTPLGAGARATNPQLAAVLRSAALAPTSDLAGDALLSLLAGDLGVEVPSAVPRPTLEPAEQLPVPQGILFTTPSPSAGPELLALLEAALRSGAPIPDPCPPFLQTAVSPESSALAAVDSSGSVLLLTSSLNCSFGSAHLSPSTGVLLSNLVAKSTTSAWACPLILRGSLDDTEADVLGLVASGTPDVARAMTHTLLRHLAARPPTQAQHQHQGQQEPTEHPSTCGQGTLLQVAAHTEHAHVSSVPHACCPFQGF

SEQ ID NO: 14154 - protein, 782 aa, Homo sapiens
MAPHRPAPALLCALSLALCALSLPVRAATASRGASQAGAPQGRVPEARPNSMVVEHPEFLKAGKEPGLQIWRVEKFDLVPVPTNLYGDFFTGDAYVILKTVQLRNGNLQYDLHYWLGNECSQDESGAAAIFTVQLDDYLNGRAVQHREVQGFESATFLGYFKSGLKYKKGGVASGFKHVVPNEVVVQRLFQVKGRRVVRATEVPVSWESFNNGDCFILDLGNNIHQWCGSNSNRYERLKATQVSKGIRDNERSGRARVHVSEEGTEPEAMLQVLGPKPALPAGTEDTAKEDAANRKLAKLYKVSNGAGTMSVSLVADENPFAQGALKSEDCFILDHGKDGKIFVWKGKQANTEERKAALKTASDFITKMDYPKQTQVSVLPEGGETPLFKQFFKNWRDPDQTDGLGLSYLSSHIANVERVPFDAATLHTSTAMAAQHGMDDDGTGQKQIWRIEGSNKVPVDPATYGQFYGGDSYIILYNYRHGGRQGQIIYNWQGAQSTQDEVAASAILTAQLDEELGGTPVQSRVVQGKEPAHLMSLFGGKPMIIYKGGTSREGGQTAPASTRLFQVRANSAGATRAVEVLPKAGALNSNDAFVLKTPSAAYLWVGTGASEAEKTGAQELLRVLRAQPVQVAEGSEPDGFWEALGGKAAYRTSPRLKDKKMDAHPPRLFACSNKIGRFVIEEVPGELMQEDLATDDVMLLDTWDQVFVWVGKDSQEEEKTEALTSAKRYIETDPANRDRRTPITVVKQGFEPPSFVGWFLGWDDDYWSVDPLDRAMAELAA

SEQ ID NO: 14155 - protein, 731 aa, Homo sapiens
MVVEHPEFLKAGKEPGLQIWRVEKFDLVPVPTNLYGDFFTGDAYVILKTVQLRNGNLQYDLHYWLGNECSQDESGAAAIFTVQLDDYLNGRAVQHREVQGFESATFLGYFKSGLKYKKGGVASGFKHVVPNEVVVQRLFQVKGRRVVRATEVPVSWESFNNGDCFILDLGNNIHQWCGSNSNRYERLKATQVSKGIRDNERSGRARVHVSEEGTEPEAMLQVLGPKPALPAGTEDTAKEDAANRKLAKLYKVSNGAGTMSVSLVADENPFAQGALKSEDCFILDHGKDGKIFVWKGKQANTEERKAALKTASDFITKMDYPKQTQVSVLPEGGETPLFKQFFKNWRDPDQTDGLGLSYLSSHIANVERVPFDAATLHTSTAMAAQHGMDDDGTGQKQIWRIEGSNKVPVDPATYGQFYGGDSYIILYNYRHGGRQGQIIYNWQGAQSTQDEVAASAILTAQLDEELGGTPVQSRVVQGKEPAHLMSLFGGKPMIIYKGGTSREGGQTAPASTRLFQVRANSAGATRAVEVLPKAGALNSNDAFVLKTPSAAYLWVGTGASEAEKTGAQELLRVLRAQPVQVAEGSEPDGFWEALGGKAAYRTSPRLKDKKMDAHPPRLFACSNKIGRFVIEEVPGELMQEDLATDDVMLLDTWDQVFVWVGKDSQEEEKTEALTSAKRYIETDPANRDRRTPITVVKQGFEPPSFVGWFLGWDDDYWSVDPLDRAMAELAA

SEQ ID NO: 14156 - protein, 742 aa, Homo sapiens
MEKLFCCFPNSMVVEHPEFLKAGKEPGLQIWRVEKFDLVPVPTNLYGDFFTGDAYVILKTVQLRNGNLQYDLHYWLGNECSQDESGAAAIFTVQLDDYLNGRAVQHREVQGFESATFLGYFKSGLKYKKGGVASGFKHVVPNEVVVQRLFQVKGRRVVRATEVPVSWESFNNGDCFILDLGNNIHQWCGSNSNRYERLKATQVSKGIRDNERSGRARVHVSEEGTEPEAMLQVLGPKPALPAGTEDTAKEDAANRKLAKLYKVSNGAGTMSVSLVADENPFAQGALKSEDCFILDHGKDGKIFVWKGKQANTEERKAALKTASDFITKMDYPKQTQVSVLPEGGETPLFKQFFKNWRDPDQTDGLGLSYLSSHIANVERVPFDAATLHTSTAMAAQHGMDDDGTGQKQIWRIEGSNKVPVDPATYGQFYGGDSYIILYNYRHGGRQGQIIYNWQGAQSTQDEVAASAILTAQLDEELGGTPVQSRVVQGKEPAHLMSLFGGKPMIIYKGGTSREGGQTAPASTRLFQVRANSAGATRAVEVLPKAGALNSNDAFVLKTPSAAYLWVGTGASEAEKTGAQELLRVLRAQPVQVAEGSEPDGFWEALGGKAAYRTSPRLKDKKMDAHPPRLFACSNKIGRFVIEEVPGELMQEDLATDDVMLLDTWDQVFVWVGKDSQEEEKTEALTSAKRYIETDPANRDRRTPITVVKQGFEPPSFVGWFLGWDDDYWSVDPLDRAMAELAA

SEQ ID NO: 14157 - protein, 739 aa, Homo sapiens
MPLCTPNSMVVEHPEFLKAGKEPGLQIWRVEKFDLVPVPTNLYGDFFTGDAYVILKTVQLRNGNLQYDLHYWLGNECSQDESGAAAIFTVQLDDYLNGRAVQHREVQGFESATFLGYFKSGLKYKKGGVASGFKHVVPNEVVVQRLFQVKGRRVVRATEVPVSWESFNNGDCFILDLGNNIHQWCGSNSNRYERLKATQVSKGIRDNERSGRARVHVSEEGTEPEAMLQVLGPKPALPAGTEDTAKEDAANRKLAKLYKVSNGAGTMSVSLVADENPFAQGALKSEDCFILDHGKDGKIFVWKGKQANTEERKAALKTASDFITKMDYPKQTQVSVLPEGGETPLFKQFFKNWRDPDQTDGLGLSYLSSHIANVERVPFDAATLHTSTAMAAQHGMDDDGTGQKQIWRIEGSNKVPVDPATYGQFYGGDSYIILYNYRHGGRQGQIIYNWQGAQSTQDEVAASAILTAQLDEELGGTPVQSRVVQGKEPAHLMSLFGGKPMIIYKGGTSREGGQTAPASTRLFQVRANSAGATRAVEVLPKAGALNSNDAFVLKTPSAAYLWVGTGASEAEKTGAQELLRVLRAQPVQVAEGSEPDGFWEALGGKAAYRTSPRLKDKKMDAHPPRLFACSNKIGRFVIEEVPGELMQEDLATDDVMLLDTWDQVFVWVGKDSQEEEKTEALTSAKRYIETDPANRDRRTPITVVKQGFEPPSFVGWFLGWDDDYWSVDPLDRAMAELAA

SEQ ID NO: 14158 - protein, 662 aa, Homo sapiens
MAAENEASQESALGAYSPVDYMSITSFPRLPEDEPAPAAPLRGRKDEDAFLGDPDTDPDSFLKSARLQRLPSSSSEMGSQDGSPLRETRKDPFSAAAAECSCRQDGLTVIVTACLTFATGVTVALVMQIYFGDPQIFQQGAVVTDAARCTSLGIEVLSKQGSSVDAAVAAALCLGIVAPHSSGLGGGGVMLVHDIRRNESHLIDFRESAPGALREETLQRSWETKPGLLVGVPGMVKGLHEAHQLYGRLPWSQVLAFAAAVAQDGFNVTHDLARALAEQLPPNMSERFRETFLPSGRPPLPGSLLHRPDLAEVLDVLGTSGPAAFYAGGNLTLEMVAEAQHAGGVITEEDFSNYSALVEKPVCGVYRGHLVLSPPPPHTGPALISALNILEGFNLTSLVSREQALHWVAETLKIALALASRLGDPVYDSTITESMDDMLSKVEAAYLRGHINDSQAAPAPLLPVYELDGAPTAAQVLIMGPDDFIVAMVSSLNQPFGSGLITPSGILLNSQMLDFSWPNRTANHSAPSLENSVQPGKRPLSFLLPTVVRPAEGLCGTYLALGANGAARGLSGLTQVLLNVLTLNRNLSDSLARGRLHPDLQSNLLQVDSEFTEEEIEFLEARGHHVEKVDVLSWVHGSRRTNNFIIAVKDPRSPDAAGATIL

SEQ ID NO: 14159 - protein, 213 aa, Homo sapiens
MGSQDGSPLRETRKDPFSAAAAECSCRQDGLTVIVTACLTFATGVTVALVMQIYFGDPQIFQQGAVVTDAARCTSLGIEVLSKQGSSVDAAVAAALCLGIVAPHSSGLGGGGVMLVHDIRRNESHLIDFRESAPGALREETLQRSWETKPGLLVGVPGMVKGLHEAHQLYGRLPWSQVLAFAAAVAQDGFNVTHDLGQWGLGIWERHEVDGEG

SEQ ID NO: 14160 - protein, 251 aa, Homo sapiens
MAAENEASQESALGAYSPVDYMSITSFPRLPEDEPAPAAPLRGRKDEDAFLGDPDTDPDSFLKSARLQRLPSSSSEMGSQDGSPLRETRKDPFSAAAAECSCRQDGLTVIVTACLTFATGVTVALVMQIYFGDPQIFQQGAVVTDAARCTSLGIEVLSKQGSSVDAAVAAALCLGIVAPHSSGLGGGGVMLVHDIRRNESHLIDFRESAPGALREETLQRSWETKVGTLVRRESSGESLFIALLLTQALIC

SEQ ID NO: 14161 - protein, 142 aa, Homo sapiens
MSERFRETFLPSGRPPLPGSLLHRPDLAEVLDVLGTSGPAAFYAGGNLTLEMVAEAQHAGGVITEEDFSNYSALVEKPVCGVYRGDLSPGSQGPPSGEASQSMATSFWPRDSSPFHRRETKAVSYLGSQLLKQTRVSPPSEK

SEQ ID NO: 14162 - protein, 366 aa, Homo sapiens
MWNATPSEEPGFNLTLADLDWDASPGNDSLGDELLQLFPAPLLAGVTATCVALFVVGIAGNLLTMLVVSRFRELRTTTNLYLSSMAFSDLLIFLCMPLDLVRLWQYRPWNFGDLLCKLFQFVSESCTYATVLTITALSVERYFAICFPLRAKVVVTKGRVKLVIFVIWAVAFCSAGPIFVLVGVEHENGTDPWDTNECRPTEFAVRSGLLTVMVWVSSIFFFLPVFCLTVLYSLIGRKLWRRRRGDAVVGASLRDQNHKQTVKMLAVVVFAFILCWLPFHVGRYLFSKSFEPGSLEIAQISQYCNLVSFVLFYLSAAINPILYNIMSKKYRVAVFRLLGFEPFSQRKLSTLKDESSRAWTESSINT

SEQ ID NO: 14163 - protein, 289 aa, Homo sapiens
MWNATPSEEPGFNLTLADLDWDASPGNDSLGDELLQLFPAPLLAGVTATCVALFVVGIAGNLLTMLVVSRFRELRTTTNLYLSSMAFSDLLIFLCMPLDLVRLWQYRPWNFGDLLCKLFQFVSESCTYATVLTITALSVERYFAICFPLRAKVVVTKGRVKLVIFVIWAVAFCSAGPIFVLVGVEHENGTDPWDTNECRPTEFAVRSGLLTVMVWVSSIFFFLPVFCLTVLYSLIGRKLWRRRRGDAVVGASLRDQNHKQTVKMLGGSQRALRLSLAGPILSLCLLPSL

SEQ ID NO: 14164 - protein, 100 aa, Homo sapiens
MNVKGKVILSMLVVSTVIIVFWEFINSTEGSFLWIYHSKNPEVDDSSAQKGWWFLSWFNNGIHNYQQGEEDIDKEKGREETKGRKMTQQSFGYGTGLIQT

SEQ ID NO: 14165 - protein, 2012 aa, Homo sapiens
MWILALSLFQSFANVFSEDLHSSLYFVNASLQEVVFASTTGTLVPCPAAGIPPVTLRWYLATGEEIYDVPGIRHVHPNGTLQIFPFPPSSFSTLIHDNTYYCTAENPSGKIRSQDVHIKAVLREPYTVRVEDQKTMRGNVAVFKCIIPSSVEAYITVVSWEKDTVSLVSGSRFLITSTGALYIKDVQNEDGLYNYRCITRHRYTGETRQSNSARLFVSDPANSAPSILDGFDHRKAMAGQRVELPCKALGHPEPDYRWLKDNMPLELSGRFQKTVTGLLIENIRPSDSGSYVCEVSNRYGTAKVIGRLYVKQPLKATISPRKVKSSVGSQVSLSCSVTGTEDQELSWYRNGEILNPGKNVRITGINHENLIMDHMVKSDGGAYQCFVRKDKLSAQDYVQVVLEDGTPKIISAFSEKVVSPAEPVSLMCNVKGTPLPTITWTLDDDPILKGGSHRISQMITSEGNVVSYLNISSSQVRDGGVYRCTANNSAGVVLYQARINVRGPASIRPMKNITAIAGRDTYIHCRVIGYPYYSIKWYKNSNLLPFNHRQVAFENNGTLKLSDVQKEVDEGEYTCNVLVQPQLSTSQSVHVTVKVPPFIQPFEFPRFSIGQRVFIPCVVVSGDLPITITWQKDGRPIPGSLGVTIDNIDFTSSLRISNLSLMHNGNYTCIARNEAAAVEHQSQLIVRVPPKFVVQPRDQDGIYGKAVILNCSAEGYPVPTIVWKFSKGAGVPQFQPIALNGRIQVLSNGSLLIKHVVEEDSGYYLCKVSNDVGADVSKSMYLTVKIPAMITSYPNTTLATQGQKKEMSCTAHGEKPIIVRWEKEDRIINPEMARYLVSTKEVGEEVISTLQILPTVREDSGFFSCHAINSYGEDRGIIQLTVQEPPDPPEIEIKDVKARTITLRWTMGFDGNSPITGYDIECKNKSDSWDSAQRTKDVSPQLNSATIIDIHPSSTYSIRMYAKNRIGKSEPSNELTITADEAAPDGPPQEVHLEPISSQSIRVTWKAPKKHLQNGIIRGYQIGYREYSTGGNFQFNIISVDTSGDSEVYTLDNLNKFTQYGLVVQACNRAGTGPSSQEIITTTLEDVPSYPPENVQAIATSPESISISWSTLSKEALNGILQGFRVIYWANLMDGELGEIKNITTTQPSLELDGLEKYTNYSIQVLAFTRAGDGVRSEQIFTRTKEDVPGPPAGVKAAAASASMVFVSWLPPLKLNGIIRKYTVFCSHPYPTVISEFEASPDSFSYRIPNLSRNRQYSVWVVAVTSAGRGNSSEIITVEPLAKAPARILTFSGTVTTPWMKDIVLPCKAVGDPSPAVKWMKDSNGTPSLVTIDGRRSIFSNGSFIIRTVKAEDSGYYSCIANNNWGSDEIILNLQVQVPPDQPRLTVSKTTSSSITLSWLPGDNGGSSIRGYILQYSEDNSEQWGSFPISPSERSYRLENLKCGTWYKFTLTAQNGVGPGRISEIIEAKTLGKEPQFSKEQELFASINTTRVRLNLIGWNDGGCPITSFTLEYRPFGTTVWTTAQRTSLSKSYILYDLQEATWYELQMRVCNSAGCAEKQANFATLNYDGSTIPPLIKSVVQNEEGLTTNEGLKMLVTISCILVGVLLLFVLLLVVRRRRREQRLKRLRDAKSLAEMLMSKNTRTSDTLSKQQQTLRMHIDIPRAQLLIEERDTMETIDDRSTVLLTDADFGEAAKQKSLTVTHTVHYQSVSQATGPLVDVSDARPGTNPTTRRNAKAGPTARNRYASQWTLNRPHPTISAHTLTTDWRLPTPRAAGSVDKESDSYSVSPSQDTDRARSSMVSTESASSTYEELARAYEHAKMEEQLRHAKFTITECFISDTSSEQLTAGTNEYTDSLTSSTPSESGICRFTASPPKPQDGGRVMNMAVPKAHRPGDLIHLPPYLRMDFLLNRGGPGTSRDLSLGQACLEPQKSRTLKRPTVLEPIPMEAASSASSTREGQSWQPGAVATLPQREGAELGQAAKMSSSQESLLDSRGHLKGNNPYAKSYTLV

SEQ ID NO: 14166 - protein, 1571 aa, Homo sapiens
MWILALSLFQSFANVFSEDLHSSLYFVNASLQEVVFASTTGTLVPCPAAGIPPVTLRWYLATGEEIYDVPGIRHVHPNGTLQIFPFPPSSFSTLIHDNTYYCTAENPSGKIRSQDVHIKAVLREPYTVRVEDQKTMRGNVAVFKCIIPSSVEAYITVVSWEKDTVSLVSGSRFLITSTGALYIKDVQNEDGLYNYRCITRHRYTGETRQSNSARLFVSDPANSAPSILDGFDHRKAMAGQRVELPCKALGHPEPDYRWLKDNMPLELSGRFQKTVTGLLIENIRPSDSGSYVCEVSNRYGTAKVIGRLYVKQPLKATISPRKVKSSVGSQVSLSCSVTGTEDQELSWYRNGEILNPGKNVRITGINHENLIMDHMVKSDGGAYQCFVRKDKLSAQDYVQVVLEDGTPKIISAFSEKVVSPAEPVSLMCNVKGTPLPTITWTLDDDPILKGGSHRISQMITSEGNVVSYLNISSSQVRDGGVYRCTANNSAGVVLYQARINVRGPASIRPMKNITAIAGRDTYIHCRVIGYPYYSIKWYKNSNLLPFNHRQVAFENNGTLKLSDVQKEVDEGEYTCNVLVQPQLSTSQSVHVTVKVPPFIQPFEFPRFSIGQRVFIPCVVVSGDLPITITWQKDGRPIPGSLGVTIDNIDFTSSLRISNLSLMHNGNYTCIARNEAAAVEHQSQLIVRVPPKFVVQPRDQDGIYGKAVILNCSAEGYPVPTIVWKFSKGAGVPQFQPIALNGRIQVLSNGSLLIKHVVEEDSGYYLCKVSNDVGADVSKSMYLTVKIPAMITSYPNTTLATQGQKKEMSCTAHGEKPIIVRWEKEDRIINPEMARYLVSTKEVGEEVISTLQILPTVREDSGFFSCHAINSYGEDRGIIQLTVQEPPDPPEIEIKDVKARTITLRWTMGFDGNSPITGYDIECKNKSDSWDSAQRTKDVSPQLNSATIIDIHPSSTYSIRMYAKNRIGKSEPSNELTITADEAAPDGPPQEVHLEPISSQSIRVTWKAPKKHLQNGIIRGYQIGYREYSTGGNFQFNIISVDTSGDSEVYTLDNLNKFTQYGLVVQACNRAGTGPSSQEIITTTLEDVPSYPPENVQAIATSPESISISWSTLSKEALNGILQGFRVIYWANLMDGELGEIKNITTTQPSLELDGLEKYTNYSIQVLAFTRAGDGVRSEQIFTRTKEDVPGPPAGVKAAAASASMVFVSWLPPLKLNGIIRKYTVFCSHPYPTVISEFEASPDSFSYRIPNLSRNRQYSVWVVAVTSAGRGNSSEIITVEPLAKAPARILTFSGTVTTPWMKDIVLPCKAVGDPSPAVKWMKDSNGTPSLVTIDGRRSIFSNGSFIIRTVKAEDSGYYSCIANNNWGSDEIILNLQVQVPPDQPRLTVSKTTSSSITLSWLPGDNGGSSIRGYILQYSEDNSEQWGSFPISPSERSYRLENLKCGTWYKFTLTAQNGVGPGRISEIIEAKTLGKEPQFSKEQELFASINTTRVRLNLIGWNDGGCPITSFTLEYRPFGTTVWTTAQRTSLSKSYILYDLQEATWYELQMRVCNSAGCAEKQAKEAARCKEFS

SEQ ID NO: 14167 - protein, 564 aa, Homo sapiens
MSSHGNSLFLRESGQRLGRVGWLQRLQESLQQRALRTRLRLQTMTLEHVLRFLRRNAFILLTVSAVVIGVSLAFALRPYQLTYRQIKYFSFPGELLMRMLQMLVLPLIVSSLVTGMASLDNKATGRMGMRAAVYYMVTTIIAVFIGILMVTIIHPGKGSKEGLHREGRIETIPTADAFMDLIRNMFPPNLVEACFKQFKTQYSTRVVTRTMVRTENGSEPGASMPPPFSVENGTSFLENVTRALGTLQEMLSFEETVPVPGSANGINALGLVVFSVAFGLVIGGMKHKGRVLRDFFDSLNEAIMRLVGIIIWYAPVGILFLIAGKILEMEDMAVLGGQLGMYTLTVIVGLFLHAGIVLPLIYFLVTHRNPFPFIGGMLQALITAMGTSSSSATLPITFRCLEEGLGVDRRITRFVLPVGATVNMDGTALYEALAAIFIAQVNNYELNLGQITTISITATAASVGAAGIPQAGLVTMVIVLTSVGLPTEDITLIIAVDWFLDRLRTMTNVLGDSIGAAVIEHLSQRELELQEAELTLPSLGKPYKSLMAQEKGASRGRGGNESAM

SEQ ID NO: 14168 - protein, 312 aa, Homo sapiens
MSSHGNSLFLRESGQRLGRVGWLQRLQESLQQRALRTRLRLQTMTLEHVLRFLRRNAFILLTVSAVVIGVSLAFALRPYQLTYRQIKYFSFPGELLMRMLQMLVLPLIVSSLVTGMASLDNKATGRMGMRAAVYYMVTTIIAVFIGILMVTIIHPGKGSKEGLHREGRIETIPTADAFMDLIRNMFPPNLVEACFKQFKTQYSTRVVTRTMVRTENGSEPGASMPPPFSVENGTSFLENVTRALGTLQEMLSFEETVPVPGSANGINALGLVVFSVAFGLVIGGMKHKGRVLRDFFDSLNEAIMRLVGIIIW

SEQ ID NO: 14169 - protein, 3056 aa, Homo sapiens
MSLVLNDLLICCRQLEHDRATERKKEVEKFKRLIRDPETIKHLDRHSDSKQGKYLNWDAVFRFLQKYIQKETECLRIAKPNVSASTQASRQKKMQEISSLVKYFIKCANRRAPRLKCQELLNYIMDTVKDSSNGAIYGADCSNILLKDILSVRKYWCEISQQQWLELFSVYFRLYLKPSQDVHRVLVARIIHAVTKGCCSQTDGLNSKFLDFFSKAIQCARQEKSSSGLNHILAALTIFLKTLAVNFRIRVCELGDEILPTLLYIWTQHRLNDSLKEVIIELFQLQIYIHHPKGAKTQEKGAYESTKWRSILYNLYDLLVNEISHIGSRGKYSSGFRNIAVKENLIELMADICHQVFNEDTRSLEISQSYTTTQRESSDYSVPCKRKKIELGWEVIKDHLQKSQNDFDLVPWLQIATQLISKYPASLPNCELSPLLMILSQLLPQQRHGERTPYVLRCLTEVALCQDKRSNLESSQKSDLLKLWNKIWCITFRGISSEQIQAENFGLLGAIIQGSLVEVDREFWKLFTGSACRPSCPAVCCLTLALTTSIVPGTVKMGIEQNMCEVNRSFSLKESIMKWLLFYQLEGDLENSTEVPPILHSNFPHLVLEKILVSLTMKNCKAAMNFFQSVPECEHHQKDKEELSFSEVEELFLQTTFDKMDFLTIVRECGIEKHQSSIGFSVHQNLKESLDRCLLGLSEQLLNNYSSEITNSETLVRCSRLLVGVLGCYCYMGVIAEEEAYKSELFQKAKSLMQCAGESITLFKNKTNEEFRIGSLRNMMQLCTRCLSNCTKKSPNKIASGFFLRLLTSKLMNDIADICKSLASFIKKPFDRGEVESMEDDTNGNLMEVEDQSSMNLFNDYPDSSVSDANEPGESQSTIGAINPLAEEYLSKQDLLFLDMLKFLCLCVTTAQTNTVSFRAADIRRKLLMLIDSSTLEPTKSLHLHMYLMLLKELPGEEYPLPMEDVLELLKPLSNVCSLYRRDQDVCKTILNHVLHVVKNLGQSNMDSENTRDAQGQFLTVIGAFWHLTKERKYIFSVRMALVNCLKTLLEADPYSKWAILNVMGKDFPVNEVFTQFLADNHHQVRMLAAESINRLFQDTKGDSSRLLKALPLKLQQTAFENAYLKAQEGMREMSHSAENPETLDEIYNRKSVLLTLIAVVLSCSPICEKQALFALCKSVKENGLEPHLVKKVLEKVSETFGYRRLEDFMASHLDYLVLEWLNLQDTEYNLSSFPFILLNYTNIEDFYRSCYKVLIPHLVIRSHFDEVKSIANQIQEDWKSLLTDCFPKILVNILPYFAYEGTRDSGMAQQRETATKVYDMLKSENLLGKQIDHLFISNLPEIVVELLMTLHEPANSSASQSTDLCDFSGDLDPAPNPPHFPSHVIKATFAYISNCHKTKLKSILEILSKSPDSYQKILLAICEQAAETNNVYKKHRILKIYHLFVSLLLKDIKSGLGGAWAFVLRDVIYTLIHYINQRPSCIMDVSLRSFSLCCDLLSQVCQTAVTYCKDALENHLHVIVGTLIPLVYEQVEVQKQVLDLLKYLVIDNKDNENLYITIKLLDPFPDHVVFKDLRITQQKIKYSRGPFSLLEEINHFLSVSVYDALPLTRLEGLKDLRRQLELHKDQMVDIMRASQDNPQDGIMVKLVVNLLQLSKMAINHTGEKEVLEAVGSCLGEVGPIDFSTIAIQHSKDASYTKALKLFEDKELQWTFIMLTYLNNTLVEDCVKVRSAAVTCLKNILATKTGHSFWEIYKMTTDPMLAYLQPFRTSRKKFLEVPRFDKENPFEGLDDINLWIPLSENHDIWIKTLTCAFLDSGGTKCEILQLLKPMCEVKTDFCQTVLPYLIHDILLQDTNESWRNLLSTHVQGFFTSCLRHFSQTSRSTTPANLDSESEHFFRCCLDKKSQRTMLAVVDYMRRQKRPSSGTIFNDAFWLDLNYLEVAKVAQSCAAHFTALLYAEIYADKKSMDDQEKRSLAFEEGSQSTTISSLSEKSKEETGISLQDLLLEIYRSIGEPDSLYGCGGGKMLQPITRLRTYEHEAMWGKALVTYDLETAIPSSTRQAGIIQALQNLGLCHILSVYLKGLDYENKDWCPELEELHYQAAWRNMQWDHCTSVSKEVEGTSYHESLYNALQSLRDREFSTFYESLKYARVKEVEEMCKRSLESVYSLYPTLSRLQAIGELESIGELFSRSVTHRQLSEVYIKWQKHSQLLKDSDFSFQEPIMALRTVILEILMEKEMDNSQRECIKDILTKHLVELSILARTFKNTQLPERAIFQIKQYNSVSCGVSEWQLEEAQVFWAKKEQSLALSILKQMIKKLDASCAANNPSLKLTYTECLRVCGNWLAETCLENPAVIMQTYLEKAVEVAGNYDGESSDELRNGKMKAFLSLARFSDTQYQRIENYMKSSEFENKQALLKRAKEEVGLLREHKIQTNRYTVKVQRELELDELALRALKEDRKRFLCKAVENYINCLLSGEEHDMWVFRLCSLWLENSGVSEVNGMMKRDGMKIPTYKFLPLMYQLAARMGTKMMGGLGFHEVLNNLISRISMDHPHHTLFIILALANANRDEFLTKPEVARRSRITKNVPKQSSQLDEDRTEAANRIICTIRSRRPQMVRSVEALCDAYIILANLDATQWKTQRKGINIPADQPITKLKNLEDVVVPTMEIKVDHTGEYGNLVTIQSFKAEFRLAGGVNLPKIIDCVGSDGKERRQLVKGRDDLRQDAVMQQVFQMCNTLLQRNTETRKRKLTICTYKVVPLSQRSGVLEWCTGTVPIGEFLVNNEDGAHKRYRPNDFSAFQCQKKMMEVQKKSFEEKYEVFMDVCQNFQPVFRYFCMEKFLDPAIWFEKRLAYTRSVATSSIVGYILGLGDRHVQNILINEQSAELVHIDLGVAFEQGKILPTPETVPFRLTRDIVDGMGITGVEGVFRRCCEKTMEVMRNSQETLLTIVEVLLYDPLFDWTMNPLKALYLQQRPEDETELHPTLNADDQECKRNLSDIDQSFNKVAERVLMRLQEKLKGVEEGTVLSVGGQVNLLIQQAIDPKNLSRLFPGWKAWV

SEQ ID NO: 14170 - protein, 619 aa, Homo sapiens
MAGPGVPGAPAARWKRHIVRQLRLRDRTQKALFLELVPAYNHLLEKAELLDKFSKKLQPEPNSVTPTTHQGPWEESELDSDQVPSLVALRVKWQEEEEGLRLVCGEMAYQVVEKGAALGTLESELQQRQSRLAALEARVAQLREARAQQAQQVEEWRAQNAVQRAAYEALRAHVGLREAALRRLQEEARDLLERLVQRKARAAAERNLRNERRERAKQARVSQELKKAAKRTVSISEGPDTLGDGMRERRETLALAPEPEPLEKEACEKWKRPFRSASATSLTLSHCVDVVKGLLDFKKRRGHSIGGAPEQRYQIIPVCVAARLPTRAQDVLDAHLSEVNAVRFGPNSSLLATGGADRLIHLWNVVGSRLEANQTLEGAGGSITSVDFDPSGYQVLAATYNQAAQLWKVGEAQSKETLSGHKDKVTAAKFKLTRHQAVTGSRDRTVKEWDLGRAYCSRTINVLSYCNDVVCGDHIIISGHNDQKIRFWDSRGPHCTQVIPVQGRVTSLSLSHDQLHLLSCSRDNTLKVIDLRVSNIRQVFRADGFKCGSDWTKAVFSPDRSYALAGSCDGALYIWDVDTGKLESRLQGPHCAAVNAVAWCYSGSHMVSVDQGRKVVLWQ

SEQ ID NO: 14171 - protein, 513 aa, Homo sapiens
MAYQVVEKGAALGTLESELQQRQSRLAALEARVAQLREARAQQAQQVEEWRAQNAVQRAAYEALRAHVGLREAALRRLQEEARDLLERLVQRKARAAAERNLRNERRERAKQARVSQELKKAAKRTVSISEGPDTLGDGMRERRETLALAPEPEPLEKEACEKWKRPFRSASATSLTLSHCVDVVKGLLDFKKRRGHSIGGAPEQRYQIIPVCVAARLPTRAQDVLDAHLSEVNAVRFGPNSSLLATGGADRLIHLWNVVGSRLEANQTLEGAGGSITSVDFDPSGYQVLAATYNQAAQLWKVGEAQSKETLSGHKDKVTAAKFKLTRHQAVTGSRDRTVKEWDLGRAYCSRTINVLSYCNDVVCGDHIIISGHNDQKIRFWDSRGPHCTQVIPVQGRVTSLSLSHDQLHLLSCSRDNTLKVIDLRVSNIRQVFRADGFKCGSDWTKAVFSPDRSYALAGSCDGALYIWDVDTGKLESRLQGPHCAAVNAVAWCYSGSHMVSVDQGRKVVLWQ

SEQ ID NO: 14172 - protein, 275 aa, Homo sapiens
MAGPGVPGAPAARWKRHIVRQLRLRDRTQKALFLELVPAYNHLLEKAELLDKFSKKLQPEPNSVTPTTHQGPWEESELDSDQVPSLVALRVKWQEEEEGLRLVCGEMAYQVVEKGAALGTLESELQQRQSRLAALEARVAQLREARAQQAQQVEEWRAQNAVQRAAYEALRAHVGLREAALRRLQEEARDLLERLVQRKARAAAERNLRNERRERAKQARVSQELKKAAKRTVSISEGPDTLGDGMRERRETLALAPEPEPLEKEACEKWKRPFR

SEQ ID NO: 14173 - protein, 398 aa, Homo sapiens
MRKRTEPVALEHERCAAAGSSSSGSAAAALDADCRLKQNLRLTGPAAAEPRCAADAGMKRALGRRKGVWLRLRKILFCVLGLYIAIPFLIKLCPGIQAKLIFLNFVRVPYFIDLKKPQDQGLNHTCNYYLQPEEDVTIGVWHTVPAVWWKNAQGKDQMWYEDALASSHPIILYLHGNAGTRGGDHRVELYKVLSSLGYHVVTFDYRGWGDSVGTPSERGMTYDALHVFDWIKARSGDNPVYIWGHSLGTGVATNLVRRLCERETPPDALILESPFTNIREEAKSHPFSVIYRYFPGFDWFFLDPITSSGIKFANDENVKHISCPLLILHAEDDPVVPFQLGRKLYSIAAPARSFRDFKVQFVPFHSDLGYRHKYIYKSPELPRILREFLGKSEPEHQH

SEQ ID NO: 14174 - protein, 404 aa, Homo sapiens
MRKRTEPVALEHERCAAAGSSSSGSAAAALDADCRLKQNLRLTGPAAAEPRCAADAGMKRALGRRKGVWLRLRKILFCVLGLYIAIPFLIKLCPGIQAKLIFLNFVRVPYFIDLKKPQDQGLNHTCNYYLQPEEDVTIGVWHTVPAVWWKNAQGKDQMWYEDALASSHPIILYLHGNAGTRGGDHRVELYKVLSSLGYHVVTFDYRGWGDSVGTPSERGMTYDALHVFDWIKARSGDNPVYIWGHSLGTGVATNLVRRLCERETPPDALILESPFTNIREEAKSHPFSVIYRYFPGFDWFFLDPITSSGIKFANDENVKHISCPLLILHAEDDPVVPFQLGRKLYSIAAPARSFRDFKVQFVPFHSDLGYRHKYIYKSPELPRILRPQQGPGSSPDPSMWSELV

SEQ ID NO: 14175 - protein, 360 aa, Homo sapiens
MRKRTEPVALEPRCAADAGMKRALGRRKGVWLRLRKILFCVLGLYIAIPFLIKLCPGIQAKLIFLNFVRVPYFIDLKKPQDQGLNHTCNYYLQPEEDVTIGVWHTVPAVWWKNAQGKDQMWYEDALASSHPIILYLHGNAGTRGGDHRVELYKVLSSLGYHVVTFDYRGWGDSVGTPSERGMTYDALHVFDWIKARSGDNPVYIWGHSLGTGVATNLVRRLCERETPPDALILESPFTNIREEAKSHPFSVIYRYFPGFDWFFLDPITSSGIKFANDENVKHISCPLLILHAEDDPVVPFQLGRKLYSIAAPARSFRDFKVQFVPFHSDLGYRHKYIYKSPELPRILREFLGKSEPEHQH

SEQ ID NO: 14176 - protein, 415 aa, Homo sapiens
MAASISGYTFSAVCFHSANSNADHEGFLLGEVRQEETFSISDSQISNTEFLQVIEIHNHQPCSKLFSFYDYASKVNEESLDRILKDRRKKVIGWYRFRRNTQQQMSYREQVLHKQLTRILGVPDLVFLLFSFISTANNSTHALEYVLFRPNRRYNQRISLAIPNLGNTSQQEYKVSSVPNTSQSYAKVIKEHGTDFFDKDGVMKDIRAIYQVYNALQEKVQAVCADVEKSERVVESCQAEVNKLRRQITQRKNEKEQERRLQQAVLSRQMPSESLDPAFSPRMPSSGFAAEGRSTLGDAEASDPPPPYSDFHPNNQESTLSHSRMERSVFMPRPQAVGSSNYASTSAGLKYPGSGADLPPPQRAAGDSGEDSDDSDYENLIDPTEPSNSEYSHSKDSRPMAHPDEDPRNTQTSQI

SEQ ID NO: 14177 - protein, 541 aa, Homo sapiens
MLSPQRVAAAASRGADDAMESSKPGPVQVVLVQKDQHSFELDEKALASILLQDHIRDLDVVVVSVAGAFRKGKSFILDFMLRYLYSQKESGHSNWLGDPEEPLTGFSWRGGSDPETTGIQIWSEVFTVEKPGGKKVAVVLMDTQGAFDSQSTVKDCATIFALSTMTSSVQIYNLSQNIQEDDLQQLQLFTEYGRLAMDEIFQKPFQTLMFLVRDWSFPYEYSYGLQGGMAFLDKRLQVKEHQHEEIQNVRNHIHSCFSDVTCFLLPHPGLQVATSPDFDGKLKDIAGEFKEQLQALIPYVLNPSKLMEKEINGSKVTCRGLLEYFKAYIKIYQGEDLPHPKSMLQATAEANNLAAAASAKDIYYNNMEEVCGGEKPYLSPDILEEKHCEFKQLALDHFKKTKKMGGKDFSFRYQQELEEEIKELYENFCKHNGSKNVFSTFRTPAVLFTGIVALYIASGLTGFIGLEVVAQLFNCMVGLLLIALLTWGYIRYSGQYRELGGAIDFGAAYVLEQASSHIGNSTQATVRDAVVGRPSMDKKAQ

SEQ ID NO: 14178 - protein, 468 aa, Homo sapiens
MPPWGAALALILAVLALLGLLGPRLRGPWGRAVGERTLPGAQDRDDGEEADGGGPADQFSDGREPLPGGCSLVCKPSALAQCLLRALRRSEALEAGPRSWFSGPHLQTLCHFVLPVAPGPELAREYLQLADDGLVALDWVVGPCVRGRRITSAGGLPAVLLVIPNAWGRLTRNVLGLCLLALERGYYPVIFHRRGHHGCPLVSPRLQPFGDPSDLKEAVTYIRFRHPAAPLFAVSEGSGSALLLSYLGECGSSSYVTGAACISPVLRCREWFEAGLPWPYERGFLLHQKIALSRYATALEDTVDTSRLFRSRSLREFEEALFCHTKSFPISWDTYWDRNDPLRDVDEAAVPVLCICSADDPVCGPPDHTLTTELFHSNPYFFLLLSRHGGHCGFLRQEPLPAWSHEVILESFRALTEFFRTEERIKGLSRHRASFLGGRRRGGALQRREVSSSSNLEEIFNWKRSYTR

SEQ ID NO: 14179 - protein, 349 aa, Homo sapiens
MAAEEEEVDSADTGERSGWLTGWLPTWCPTSISHLKEAEEKMLKCVPCTYKKEPVRISNGNKIWTLKFSHNISNKTPLVLLHGFGGGLGLWALNFGDLCTNRPVYAFDLLGFGRSSRPRFDSDAEEVENQFVESIEEWRCALGLDKMILLGHNLGGFLAAAYSLKYPSRVNHLILVEPWGFPERPDLADQDRPIPVWIRALGAALTPFNPLAGLRIAGPFGLSLVQRLRPDFKRKYSSMFEDDTVTEYIYHCNVQTPSGETAFKNMTIPYGWAKRPMLQRIGKMHPDIPVSVIFGARSCIDGNSGTSIQSLRPHSYVKTIAILGAGHYVYADQPEEFNQKVKEICDTVD

SEQ ID NO: 14180 - protein, 495 aa, Homo sapiens
MSMLVVFLLLWGVTWGPVTEAAIFYETQPSLWAESESLLKPLANVTLTCQAHLETPDFQLFKNGVAQEPVHLDSPAIKHQFLLTGDTQGRYRCRSGLSTGWTQLSKLLELTGPKSLPAPWLSMAPVSWITPGLKTTAVCRGVLRGVTFLLRREGDHEFLEVPEAQEDVEATFPVHQPGNYSCSYRTDGEGALSEPSATVTIEELAAPPPPVLMHHGESSQVLHPGNKVTLTCVAPLSGVDFQLRRGEKELLVPRSSTSPDRIFFHLNAVALGDGGHYTCRYRLHDNQNGWSGDSAPVELILSDETLPAPEFSPEPESGRALRLRCLAPLEGARFALVREDRGGRRVHRFQSPAGTEALFELHNISVADSANYSCVYVDLKPPFGGSAPSERLELHVDGPPPRPQLRATWSGAVLAGRDAVLRCEGPIPDVTFELLREGETKAVKTVRTPGAAANLELIFVGPQHAGNYRCRYRSWVPHTFESELSDPVELLVAES

SEQ ID NO: 14181 - protein, 373 aa, Homo sapiens
MAPVSWITPGLKTTAVCRGVLRGVTFLLRREGDHEFLEVPEAQEDVEATFPVHQPGNYSCSYRTDGEGALSEPSATVTIEELAAPPPPVLMHHGESSQVLHPGNKVTLTCVAPLSGVDFQLRRGEKELLVPRSSTSPDRIFFHLNAVALGDGGHYTCRYRLHDNQNGWSGDSAPVELILSDETLPAPEFSPEPESGRALRLRCLAPLEGARFALVREDRGGRRVHRFQSPAGTEALFELHNISVADSANYSCVYVDLKPPFGGSAPSERLELHVDGPPPRPQLRATWSGAVLAGRDAVLRCEGPIPDVTFELLREGETKAVKTVRTPGAAANLELIFVGPQHAGNYRCRYRSWVPHTFESELSDPVELLVAES

SEQ ID NO: 14182 - protein, 172 aa, Homo sapiens
MSVPGPSSPDGALTRPPYCLEAGEPTPGLSDTSPDEGLIEDLTIEDKAVEQLAEGLLSHYLPDLQRSKQALQELTQNQVVLLDTLEQEISKFKECHSMLDINALFAEAKHYHAKLVNIRKEMLMLHEKTSKLKKRALKLQQKRQKEELEREQQREKEFEREKQLTARPAKRM

SEQ ID NO: 14183 - protein, 80 aa, Homo sapiens
MSVPGPSSPDGALTRPPYCLEAGEPTPGLSDTSPDEGLIEDLTIEDKAVEQLAEGLLSHYLPDLQRSKQALQELTTKLYC

SEQ ID NO: 14184 - protein, 729 aa, Homo sapiens
MNKGWLELESDPGLFTLLVEDFGVKGVQVEEIYDLQSKCQGPVYGFIFLFKWIEERRSRRKVSTLVDDTSVIDDDIVNNMFFAHQLIPNSCATHALLSVLLNCSSVDLGPTLSRMKDFTKGFSPESKGYAIGNAPELAKAHNSHARPEPRHLPEKQNGLSAVRTMEAFHFVSYVPITGRLFELDGLKVYPIDHGPWGEDEEWTDKARRVIMERIGLATAGEPYHDIRFNLMAVVPDRRIKYEARLHVLKVNRQTVLEALQQLIRVTQPELIQTHKSQESQLPEESKSASNKSPLVLEANRAPAASEGNHTDGAEEAAGSCAQAPSHSPPNKPKLVVKPPGSSLNGVHPNPTPIVQRLPAFLDNHNYAKSPMQEEEDLAAGVGRSRVPVRPPQQYSDDEDDYEDDEEDDVQNTNSALRYKGKGTGKPGALSGSADGQLSVLQPNTINVLAEKLKESQKDLSIPLSIKTSSGAGSPAVAVPTHSQPSPTPSNESTDTASEIGSAFNSPLRSPIRSANPTRPSSPVTSHISKVLFGEDDSLLRVDCIRYNRAVRDLGPVISTGLLHLAEDGVLSPLALTEGGKGSSPSIRPIQGSQGSSSPVEKEVVEATDSREKTGMVRPGEPLSGEKYSPKELLALLKCVEAEIANYEACLKEEVEKRKKFKIDDQRRTHNYDEFICTFISMLAQEGMLANLVEQNISVRRRQGVSIGRLHKQRKPDRRKRSRPYKAKRQ

SEQ ID NO: 14185 - protein, 2595 aa, Homo sapiens
MASLFHQLQILVWKNWLGVKRQPLWTLVLILWPVIIFIILAITRTKFPPTAKPTCYLAPRNLPSTGFFPFLQTLLCDTDSKCKDTPYGPQDLLRRKGIDDALFKDSEILRKSSNLDKDSSLSFQSTQVPERRHASLATVFPSPSSDLEIPGTYTFNGSQVLARILGLEKLLKQNSTSEDIRRELCDSYSGYIVDDAFSWTFLGRNVFNKFCLSNMTLLESSLQELNKQFSQLSSDPNNQKIVFQEIVRMLSFFSQVQEQKAVWQLLSSFPNVFQNDTSLSNLFDVLRKANSVLLVVQKVYPRFATNEGFRTLQKSVKHLLYTLDSPAQGDSDNITHVWNEDDGQTLSPSSLAAQLLILENFEDALLNISANSPYIPYLACVRNVTDSLARGSPENLRLLQSTIRFKKSFLRNGSYEDYFPPVPEVLKSKLSQLRNLTELLCESETFSLIEKSCQLSDMSFGSLCEESEFDLQLLEAAELGTEIAASLLYHDNVISKKVRDLLTGDPSKINLNMDQFLEQALQMNYLENITQLIPIIEAMLHVNNSADASEKPGQLLEMFKNVEELKEDLRRTTGMSNRTIDKLLAIPIPDNRAEIISQVFWLHSCDTNITTPKLEDAMKEFCNLSLSERSRQSYLIGLTLLHYLNIYNFTYKVFFPRKDQKPVEKMMELFIRLKEILNQMASGTHPLLDKMRSLKQMHLPRSVPLTQAMYRSNRMNTPQGSFSTISQALCSQGITTEYLTAMLPSSQRPKGNHTKDFLTYKLTKEQIASKYGIPINSTPFCFSLYKDIINMPAGPVIWAFLKPMLLGRILYAPYNPVTKAIMEKSNVTLRQLAELREKSQEWMDKSPLFMNSFHLLNQAIPMLQNTLRNPFVQVFVKFSVGLDAVELLKQIDELDILRLKLENNIDIIDQLNTLSSLTVNISSCVLYDRIQAAKTIDEMEREAKRLYKSNELFGSVIFKLPSNRSWHRGYDSGNVFLPPVIKYTIRMSLKTAQTTRSLRTKIWAPGPHNSPSHNQIYGRAFIYLQDSIERAIIELQTGRNSQEIAVQVQAIPYPCFMKDNFLTSVSYSLPIVLMVAWVVFIAAFVKKLVYEKDLRLHEYMKMMGVNSCSHFFAWLIESVGFLLVTIVILIIILKFGNILPKTNGFILFLYFSDYSFSVIAMSYLISVFFNNTNIAALIGSLIYIIAFFPFIVLVTVENELSYVLKVFMSLLSPTAFSYASQYIARYEEQGIGLQWENMYTSPVQDDTTSFGWLCCLILADSFIYFLIAWYVRNVFPGTYGMAAPWYFPILPSYWKERFGCAEVKPEKSNGLMFTNIMMQNTNPSASPEYMFSSNIEPEPKDLTVGVALHGVTKIYGSKVAVDNLNLNFYEGHITSLLGPNGAGKTTTISMLTGLFGASAGTIFVYGKDIKTDLHTVRKNMGVCMQHDVLFSYLTTKEHLLLYGSIKVPHWTKKQLHEEVKRTLKDTGLYSHRHKRVGTLSGGMKRKLSISIALIGGSRVVILDEPSTGVDPCSRRSIWDVISKNKTARTIILSTHHLDEAEVLSDRIAFLEQGGLRCCGSPFYLKEAFGDGYHLTLTKKKSPNLNANAVCDTMAVTAMIQSHLPEAYLKEDIGGELVYVLPPFSTKVSGAYLSLLRALDNGMGDLNIGCYGISDTTVEEVFLNLTKESQKNSAMSLEHLTQKKIGNSNANGISTPDDLSVSSSNFTDRDDKILTRGERLDGFGLLLKKIMAILIKRFHHTRRNWKGLIAQVILPIVFVTTAMGLGTLRNSSNSYPEIQISPSLYGTSEQTAFYANYHPSTEALVSAMWDFPGIDNMCLNTSDLQCLNKDSLEKWNTSGEPITNFGVCSCSENVQECPKFNYSPPHRRTYSSQVIYNLTGQRVENYLISTANEFVQKRYGGWSFGLPLTKDLRFDITGVPANRTLAKVWYDPEGYHSLPAYLNSLNNFLLRVNMSKYDAARHGIIMYSHPYPGVQDQEQATISSLIDILVALSILMGYSVTTASFVTYVVREHQTKAKQLQHISGIGVTCYWVTNFIYDMVFYLVPVAFSIGIIAIFKLPAFYSENNLGAVSLLLLLFGYATFSWMYLLAGLFHETGMAFITYVCVNLFFGINSIVSLSVVYFLSKEKPNDPTLELISETLKRIFLIFPQFCFGYGLIELSQQQSVLDFLKAYGVEYPNETFEMNKLGAMFVALVSQGTMFFSLRLLINESLIKKLRLFFRKFNSSHVRETIDEDEDVRAERLRVESGAAEFDLVQLYCLTKTYQLIHKKIIAVNNISIGIPAGECFGLLGVNGAGKTTIFKMLTGDIIPSSGNILIRNKTGSLGHVDSHSSLVGYCPQEDALDDLVTVEEHLYFYARVHGIPEKDIKETVHKLLRRLHLMPFKDRATSMCSYGTKRKLSTALALIGKPSILLLDEPSSGMDPKSKRHLWKIISEEVQNKCSVILTSHSMEECEALCTRLAIMVNGKFQCIGSLQHIKSRFGRGFTVKVHLKNNKVTMETLTKFMQLHFPKTYLKDQHLSMLEYHVPVTAGGVANIFDLLETNKTALNITNFLVSQTTLEEVFINFAKDQKSYETADTSSQGSTISVDSQDDQMES

SEQ ID NO: 14186 - protein, 2277 aa, Homo sapiens
MFTYIKIITSGDSDNITHVWNEDDGQTLSPSSLAAQLLILENFEDALLNISANSPYIPYLACVRNVTDSLARGSPENLRLLQSTIRFKKSFLRNGSYEDYFPPVPEVLKSKLSQLRNLTELLCESETFSLIEKSCQLSDMSFGSLCEESEFDLQLLEAAELGTEIAASLLYHDNVISKKVRDLLTGDPSKINLNMDQFLEQALQMNYLENITQLIPIIEAMLHVNNSADASEKPGQLLEMFKNVEELKEDLRRTTGMSNRTIDKLLAIPIPDNRAEIISQVFWLHSCDTNITTPKLEDAMKEFCNLSLSERSRQSYLIGLTLLHYLNIYNFTYKVFFPRKDQKPVEKMMELFIRLKEILNQMASGTHPLLDKMRSLKQMHLPRSVPLTQAMYRSNRMNTPQGSFSTISQALCSQGITTEYLTAMLPSSQRPKGNHTKDFLTYKLTKEQIASKYGIPINSTPFCFSLYKDIINMPAGPVIWAFLKPMLLGRILYAPYNPVTKAIMEKSNVTLRQLAELREKSQEWMDKSPLFMNSFHLLNQAIPMLQNTLRNPFVQVFVKFSVGLDAVELLKQIDELDILRLKLENNIDIIDQLNTLSSLTVNISSCVLYDRIQAAKTIDEMEREAKRLYKSNELFGSVIFKLPSNRSWHRGYDSGNVFLPPVIKYTIRMSLKTAQTTRSLRTKIWAPGPHNSPSHNQIYGRAFIYLQDSIERAIIELQTGRNSQEIAVQVQAIPYPCFMKDNFLTSVSYSLPIVLMVAWVVFIAAFVKKLVYEKDLRLHEYMKMMGVNSCSHFFAWLIESVGFLLVTIVILIIILKFGNILPKTNGFILFLYFSDYSFSVIAMSYLISVFFNNTNIAALIGSLIYIIAFFPFIVLVTVENELSYVLKVFMSLLSPTAFSYASQYIARYEEQGIGLQWENMYTSPVQDDTTSFGWLCCLILADSFIYFLIAWYVRNVFPGTYGMAAPWYFPILPSYWKERFGCAEVKPEKSNGLMFTNIMMQNTNPSASPEYMFSSNIEPEPKDLTVGVALHGVTKIYGSKVAVDNLNLNFYEGHITSLLGPNGAGKTTTISMLTGLFGASAGTIFVYGKDIKTDLHTVRKNMGVCMQHDVLFSYLTTKEHLLLYGSIKVPHWTKKQLHEEVKRTLKDTGLYSHRHKRVGTLSGGMKRKLSISIALIGGSRVVILDEPSTGVDPCSRRSIWDVISKNKTARTIILSTHHLDEAEVLSDRIAFLEQGGLRCCGSPFYLKEAFGDGYHLTLTKKKSPNLNANAVCDTMAVTAMIQSHLPEAYLKEDIGGELVYVLPPFSTKVSGAYLSLLRALDNGMGDLNIGCYGISDTTVEEVFLNLTKESQKNSAMSLEHLTQKKIGNSNANGISTPDDLSVSSSNFTDRDDKILTRGERLDGFGLLLKKIMAILIKRFHHTRRNWKGLIAQVILPIVFVTTAMGLGTLRNSSNSYPEIQISPSLYGTSEQTAFYANYHPSTEALVSAMWDFPGIDNMCLNTSDLQCLNKDSLEKWNTSGEPITNFGVCSCSENVQECPKFNYSPPHRRTYSSQVIYNLTGQRVENYLISTANEFVQKRYGGWSFGLPLTKDLRFDITGVPANRTLAKVWYDPEGYHSLPAYLNSLNNFLLRVNMSKYDAARHGIIMYSHPYPGVQDQEQATISSLIDILVALSILMGYSVTTASFVTYVVREHQTKAKQLQHISGIGVTCYWVTNFIYDMVFYLVPVAFSIGIIAIFKLPAFYSENNLGAVSLLLLLFGYATFSWMYLLAGLFHETGMAFITYVCVNLFFGINSIVSLSVVYFLSKEKPNDPTLELISETLKRIFLIFPQFCFGYGLIELSQQQSVLDFLKAYGVEYPNETFEMNKLGAMFVALVSQGTMFFSLRLLINESLIKKLRLFFRKFNSSHVRETIDEDEDVRAERLRVESGAAEFDLVQLYCLTKTYQLIHKKIIAVNNISIGIPAGECFGLLGVNGAGKTTIFKMLTGDIIPSSGNILIRNKTGSLGHVDSHSSLVGYCPQEDALDDLVTVEEHLYFYARVHGIPEKDIKETVHKLLRRLHLMPFKDRATSMCSYGTKRKLSTALALIGKPSILLLDEPSSGMDPKSKRHLWKIISEEVQNKCSVILTSHSMEECEALCTRLAIMVNGKFQCIGSLQHIKSRFGRGFTVKVHLKNNKVTMETLTKFMQLHFPKTYLKDQHLSMLEYHVPVTAGGVANIFDLLETNKTALNITNFLVSQTTLEEVFINFAKDQKSYETADTSSQGSTISVDSQDDQMES

SEQ ID NO: 14187 - protein, 1257 aa, Homo sapiens
MENSERAEEMQENYQRNGTAEEQPKLRKEAVGSIEIFRFADGLDITLMILGILASLVNGACLPLMPLVLGEMSDNLISGCLVQTNTTNYQNCTQSQEKLNEDMTLLTLYYVGIGVAALIFGYIQISLWIITAARQTKRIRKQFFHSVLAQDIGWFDSCDIGELNTRMTDDIDKISDGIGDKIALLFQNMSTFSIGLAVGLVKGWKLTLVTLSTSPLIMASAAACSRMVISLTSKELSAYSKAGAVAEEVLSSIRTVIAFRAQEKELQRYTQNLKDAKDFGIKRTIASKVSLGAVYFFMNGTYGLAFWYGTSLILNGEPGYTIGTVLAVFFSVIHSSYCIGAAVPHFETFAIARGAAFHIFQVIDKKPSIDNFSTAGYKPESIEGTVEFKNVSFNYPSRPSIKILKGLNLRIKSGETVALVGLNGSGKSTVVQLLQRLYDPDDGFIMVDENDIRALNVRHYRDHIGVVSQEPVLFGTTISNNIKYGRDDVTDEEMERAAREANAYDFIMEFPNKFNTLVGEKGAQMSGGQKQRIAIARALVRNPKILILDEATSALDSESKSAVQAALEKASKGRTTIVVAHRLSTIRSADLIVTLKDGMLAEKGAHAELMAKRGLYYSLVMSQDIKKADEQMESMTYSTERKTNSLPLHSVKSIKSDFIDKAEESTQSKEISLPEVSLLKILKLNKPEWPFVVLGTLASVLNGTVHPVFSIIFAKIITMFGNNDKTTLKHDAEIYSMIFVILGVICFVSYFMQGLFYGRAGEILTMRLRHLAFKAMLYQDIAWFDEKENSTGGLTTILAIDIAQIQGATGSRIGVLTQNATNMGLSVIISFIYGWEMTFLILSIAPVLAVTGMIETAAMTGFANKDKQELKHAGKIATEALENIRTIVSLTREKAFEQMYEEMLQTQHRNTSKKAQIIGSCYAFSHAFIYFAYAAGFRFGAYLIQAGRMTPEGMFIVFTAIAYGAMAIGETLVLAPEYSKAKSGAAHLFALLEKKPNIDSRSQEGKKPDTCEGNLEFREVSFFYPCRPDVFILRGLSLSIERGKTVAFVGSSGCGKSTSVQLLQRLYDPVQGQVLFDGVDAKELNVQWLRSQIAIVPQEPVLFNCSIAENIAYGDNSRVVPLDEIKEAANAANIHSFIEGLPEKYNTQVGLKGAQLSGGQKQRLAIARALLQKPKILLLDEATSALDNDSEKVVQHALDKARTGRTCLVVTHRLSAIQNADLIVVLHNGKIKEQGTHQELLRNRDIYFKLVNAQSVQ

SEQ ID NO: 14188 - protein, 131 aa, Homo sapiens
MVDENDIRALNVRHYRDHIGVVSQEPVLFGTTISNNIKYGRDDVTDEEMERAAREANAYDFIMEFPNKFNTLVGEKGAQMSGGQKQRIAIARALVRNPKILILDEATSALDSESKSAVQAALEKDTPRYSF

SEQ ID NO: 14189 - protein, 126 aa, Homo sapiens
MVDENDIRALNVRHYRDHIGVVSQEPVLFGTTISNNIKYGRDDVTDEEMERAAREANAYDFIMEFPNKFNTLVGEKGAQMSGGQKQRIAIARALVRNPKILILDEATSALDSESKSAVQAALEKKK

SEQ ID NO: 14190 - protein, 812 aa, Homo sapiens
MVDENDIRALNVRHYRDHIGVVSQEPVLFGTTISNNIKYGRDDVTDEEMERAAREANAYDFIMEFPNKFNTLVGEKGAQMSGGQKQRIAIARALVRNPKILILDEATSALDSESKSAVQAALEKASKGRTTIVVAHRLSTIRSADLIVTLKDGMLAEKGAHAELMAKRGLYYSLVMSQDIKKADEQMESMTYSTERKTNSLPLHSVKSIKSDFIDKAEESTQSKEISLPEVSLLKILKLNKPEWPFVVLGTLASVLNGTVHPVFSIIFAKIITMFGNNDKTTLKHDAEIYSMIFVILGVICFVSYFMQGLFYGRAGEILTMRLRHLAFKAMLYQDIAWFDEKENSTGGLTTILAIDIAQIQGATGSRIGVLTQNATNMGLSVIISFIYGWEMTFLILSIAPVLAVTGMIETAAMTGFANKDKQELKHAGKIATEALENIRTIVSLTREKAFEQMYEEMLQTQHRNTSKKAQIIGSCYAFSHAFIYFAYAAGFRFGAYLIQAGRMTPEGMFIVFTAIAYGAMAIGETLVLAPEYSKAKSGAAHLFALLEKKPNIDSRSQEGKKPDTCEGNLEFREVSFFYPCRPDVFILRGLSLSIERGKTVAFVGSSGCGKSTSVQLLQRLYDPVQGQVLFDGVDAKELNVQWLRSQIAIVPQEPVLFNCSIAENIAYGDNSRVVPLDEIKEAANAANIHSFIEGLPEKYNTQVGLKGAQLSGGQKQRLAIARALLQKPKILLLDEATSALDNDSEKVVQHALDKARTGRTCLVVTHRLSAIQNADLIVVLHNGKIKEQGTHQELLRNRDIYFKLVNAQSVQ

SEQ ID NO: 14191 - protein, 179 aa, Homo sapiens
MMKDIIPASSWASEESTDLQNGSFPLSVAPRSEFPRRRALEDWLLSVFLADQAESEGQLVLERVRDTPPPVTSPRGDGICVSRGKAPSSPGGSTHAWLYLTRHFPWSPFPHGGWTDTSEPCVLETLGGSSLAALRGNSLWVQSSGACAFCVYESLIEQSLPNERFEELLLGPSPGEVMK

SEQ ID NO: 14192 - protein, 439 aa, Homo sapiens
MLTGVTDGIFCCLLGTPPNAVGPLESVESSDGYTFVEVKPGRVLRVKHAGPAPAAAPPPPSSASSDAAQGDLSGLVRCQRRITVYRNGRLLVENLGRAPRADLLHGQNGSGEPPAALEVELADPAGSDGRLAPGSAGSGSGSGSGGRRRRARRPKRTIHIDCEKRITSCKGAQADVVLFFIHGVGGSLAIWKEQLDFFVRLGYEVVAPDLAGHGASSAPQVAAAYTFYALAEDMRAIFKRYAKKRNVLIGHSYGVSFCTFLAHEYPDLVHKVIMINGGGPTALEPSFCSIFNMPTCVLHCLSPCLAWSFLKAGFARQGAKEKQLLKEGNAFNVSSFVLRAMMSGQYWPEGDEVYHAELTVPVLLVHGMHDKFVPVEEDQRMAEILLLAFLKLIDEGSHMVMLECPETVNTLLHEFLLWEPEPSPKALPEPLPAPPEDKK

SEQ ID NO: 14193 - protein, 502 aa, Homo sapiens
MARRCGPVALLLGFGLLRLCSGVWGTDTEERLVEHLLDPSRYNKLIRPATNGSELVTVQLMVSLAQLISVHEREQIMTTNVWLTQEWEDYRLTWKPEEFDNMKKVRLPSKHIWLPDVVLYNNADGMYEVSFYSNAVVSYDGSIFWLPPAIYKSACKIEVKHFPFDQQNCTMKFRSWTYDRTEIDLVLKSEVASLDDFTPSGEWDIVALPGRRNENPDDSTYVDITYDFIIRRKPLFYTINLIIPCVLITSLAILVFYLPSDCGEKMTLCISVLLALTVFLLLISKIVPPTSLDVPLVGKYLMFTMVLVTFSIVTSVCVLNVHHRSPTTHTMAPWVKVVFLEKLPALLFMQQPRHHCARQRLRLRRRQREREGAGALFFREAPGADSCTCFVNRASVQGLAGAFGAEPAPVAGPGRSGEPCGCGLREAVDGVRFIADHMRSEDDDQSVSEDWKYVAMVIDRLFLWIFVFVCVFGTIGMFLQPLFQNYTTTTFLHSDHSAPSSK

SEQ ID NO: 14194 - protein, 501 aa, Homo sapiens
MTPGALLMLLGALGAPLAPGVRGSEAEGRLREKLFSGYDSSVRPAREVGDRVRVSVGLILAQLISLNEKDEEMSTKVYLDLEWTDYRLSWDPAEHDGIDSLRITAESVWLPDVVLLNNNDGNFDVALDISVVVSSDGSVRWQPPGIYRSSCSIQVTYFPFDWQNCTMVFSSYSYDSSEVSLQTGLGPDGQGHQEIHIHEGTFIENGQWEIIHKPSRLIQPPGDPRGGREGQRQEVIFYLIIRRKPLFYLVNVIAPCILITLLAIFVFYLPPDAGEKMGLSIFALLTLTVFLLLLADKVPETSLSVPIIIKYLMFTMVLVTFSVILSVVVLNLHHRSPHTHQMPLWVRQIFIHKLPLYLRLKRPKPERDLMPEPPHCSSPGSGWGRGTDEYFIRKPPSDFLFPKPNRFQPELSAPDLRRFIDGPNRAVALLPELREVVSSISYIARQLQEQEDHDALKEDWQFVAMVVDRLFLWTFIIFTSVGTLVIFLDATYHLPPPDPFP

SEQ ID NO: 14195 - protein, 429 aa, Homo sapiens
MSTKVYLDLEWTDYRLSWDPAEHDGIDSLRITAESVWLPDVVLLNNNDGNFDVALDISVVVSSDGSVRWQPPGIYRSSCSIQVTYFPFDWQNCTMVFSSYSYDSSEVSLQTGLGPDGQGHQEIHIHEGTFIENGQWEIIHKPSRLIQPPGDPRGGREGQRQEVIFYLIIRRKPLFYLVNVIAPCILITLLAIFVFYLPPDAGEKMGLSIFALLTLTVFLLLLADKVPETSLSVPIIIKYLMFTMVLVTFSVILSVVVLNLHHRSPHTHQMPLWVRQIFIHKLPLYLRLKRPKPERDLMPEPPHCSSPGSGWGRGTDEYFIRKPPSDFLFPKPNRFQPELSAPDLRRFIDGPNRAVALLPELREVVSSISYIARQLQEQEDHDALKEDWQFVAMVVDRLFLWTFIIFTSVGTLVIFLDATYHLPPPDPFP

SEQ ID NO: 14196 - protein, 660 aa, Homo sapiens
MNPDLRRERDSASFNPELLTHILDGSPEKTRRRREIENMILNDPDFQHEDLNFLTRSQRYEVAVRKSAIMVKKMREFGIADPDEIMWFKKLHLVNFVEPVGLNYSMFIPTLLNQGTTAQKEKWLLSSKGLQIIGTYAQTEMGHGTHLRGLETTATYDPETQEFILNSPTVTSIKWWPGGLGKTSNHAIVLAQLITKGKCYGLHAFIVPIREIGTHKPLPGITVGDIGPKFGYDEIDNGYLKMDNHRIPRENMLMKYAQVKPDGTYVKPLSNKLTYGTMVFVRSFLVGEAARALSKACTIAIRYSAVRHQSEIKPGEPEPQILDFQTQQYKLFPLLATAYAFQFVGAYMKETYHRINEGIGQGDLSELPELHALTAGLKAFTSWTANTGIEACRMACGGHGYSHCSGLPNIYVNFTPSCTFEGENTVMMLQTARFLMKSYDQVHSGKLVCGMVSYLNDLPSQRIQPQQVAVWPTMVDINSPESLTEAYKLRAARLVEIAAKNLQKEVIHRKSKEVAWNLTSVDLVRASEAHCHYVVVKLFSEKLLKIQDKAIQAVLRSLCLLYSLYGISQNAGDFLQGSIMTEPQITQVNQRVKELLTLIRSDAVALVDAFDFQDVTLGSVLGRYDGNVYENLFEWAKNSPLNKAEVHESYKHLKSLQSKL

SEQ ID NO: 14197 - protein, 660 aa, Homo sapiens
MNPDLRRERDSASFNPELLTHILDGSPEKTRRRREIENMILNDPDFQHEDLNFLTRSQRYEVAVRKSAIMVKKMREFGIADPDEIMWFKNFVHRGRPEPLDLHLGMFLPTLLHQATAEQQERFFMPAWNLEIIGTYAQTEMGHGTHLRGLETTATYDPETQEFILNSPTVTSIKWWPGGLGKTSNHAIVLAQLITKGKCYGLHAFIVPIREIGTHKPLPGITVGDIGPKFGYDEIDNGYLKMDNHRIPRENMLMKYAQVKPDGTYVKPLSNKLTYGTMVFVRSFLVGEAARALSKACTIAIRYSAVRHQSEIKPGEPEPQILDFQTQQYKLFPLLATAYAFQFVGAYMKETYHRINEGIGQGDLSELPELHALTAGLKAFTSWTANTGIEACRMACGGHGYSHCSGLPNIYVNFTPSCTFEGENTVMMLQTARFLMKSYDQVHSGKLVCGMVSYLNDLPSQRIQPQQVAVWPTMVDINSPESLTEAYKLRAARLVEIAAKNLQKEVIHRKSKEVAWNLTSVDLVRASEAHCHYVVVKLFSEKLLKIQDKAIQAVLRSLCLLYSLYGISQNAGDFLQGSIMTEPQITQVNQRVKELLTLIRSDAVALVDAFDFQDVTLGSVLGRYDGNVYENLFEWAKNSPLNKAEVHESYKHLKSLQSKL

SEQ ID NO: 14198 - protein, 622 aa, Homo sapiens
MILNDPDFQHEDLNFLTRSQRYEVAVRKSAIMVKKMREFGIADPDEIMWFKNFVHRGRPEPLDLHLGMFLPTLLHQATAEQQERFFMPAWNLEIIGTYAQTEMGHGTHLRGLETTATYDPETQEFILNSPTVTSIKWWPGGLGKTSNHAIVLAQLITKGKCYGLHAFIVPIREIGTHKPLPGITVGDIGPKFGYDEIDNGYLKMDNHRIPRENMLMKYAQVKPDGTYVKPLSNKLTYGTMVFVRSFLVGEAARALSKACTIAIRYSAVRHQSEIKPGEPEPQILDFQTQQYKLFPLLATAYAFQFVGAYMKETYHRINEGIGQGDLSELPELHALTAGLKAFTSWTANTGIEACRMACGGHGYSHCSGLPNIYVNFTPSCTFEGENTVMMLQTARFLMKSYDQVHSGKLVCGMVSYLNDLPSQRIQPQQVAVWPTMVDINSPESLTEAYKLRAARLVEIAAKNLQKEVIHRKSKEVAWNLTSVDLVRASEAHCHYVVVKLFSEKLLKIQDKAIQAVLRSLCLLYSLYGISQNAGDFLQGSIMTEPQITQVNQRVKELLTLIRSDAVALVDAFDFQDVTLGSVLGRYDGNVYENLFEWAKNSPLNKAEVHESYKHLKSLQSKL

SEQ ID NO: 14199 - protein, 447 aa, Homo sapiens
MDMGNQHPSISRLQEIQKEVKSVEQQVIGFSGLSDDKNYKKLERILTKQLFEIDSVDTEGKGDIQQARKRAAQETERLLKELEQNANHPHRIEIQNIFEEAQSLVREKIVPFYNGGNCVTDEFEEGIQDIILRLTHVKTGGKISLRKARYHTLTKICAVQEIIEDCMKKQPSLPLSEDAHPSVAKINFVMCEVNKARGVLIALLMGVNNNETCRHLSCVLSGLIADLDALDVCGRTEIRNYRREVVEDINKLLKYLDLEEEADTTKAFDLRQNHSILKIEKVLKRMREIKNELLQAQNPSELYLSSKTELQGLIGQLDEVSLEKNPCIREARRRAVIEVQTLITYIDLKEALEKRKLFACEEHPSHKAVWNVLGNLSEIQGEVLSFDGNRTDKNYIRLEELLTKQLLALDAVDPQGEEKCKAARKQAVRLAQNILSYLDLKSDEWEY

SEQ ID NO: 14200 - protein, 488 aa, Homo sapiens
MRFHWLPTLSEPFDRNQELETCIRPLWTPSGSACETEHNKSMDMGNQHPSISRLQEIQKEVKSVEQQVIGFSGLSDDKNYKKLERILTKQLFEIDSVDTEGKGDIQQARKRAAQETERLLKELEQNANHPHRIEIQNIFEEAQSLVREKIVPFYNGGNCVTDEFEEGIQDIILRLTHVKTGGKISLRKARYHTLTKICAVQEIIEDCMKKQPSLPLSEDAHPSVAKINFVMCEVNKARGVLIALLMGVNNNETCRHLSCVLSGLIADLDALDVCGRTEIRNYRREVVEDINKLLKYLDLEEEADTTKAFDLRQNHSILKIEKVLKRMREIKNELLQAQNPSELYLSSKTELQGLIGQLDEVSLEKNPCIREARRRAVIEVQTLITYIDLKEALEKRKLFACEEHPSHKAVWNVLGNLSEIQGEVLSFDGNRTDKNYIRLEELLTKQLLALDAVDPQGEEKCKAARKQAVRLAQNILSYLDLKSDEWEY

SEQ ID NO: 14201 - protein, 1099 aa, Homo sapiens
MAHLGPTPPPHSLNYKSEDRLSEQDWPAYFKVPCCGVDTSQIESEEAEVDVRERETQRDREPKRARDLTLRDSCTDNSMQFGTRTTTAEPGFMGTWQNADTNLLFRMSQQAIRCTLVNCTCECFQPGKINLRTCDQCKHGWVAHALDKLSTQHLYHPTQVEIVQSNVVFDISSLMLYGTQAVPVRLKILLDRLFSVLKQEEVLHILHGLGWTLRDYVRGYILQDAAGKVLDRWAIMSREEEIITLQQFLRFGETKSIVELMAIQEKEGQAVAVPSSKTDSDIRTFIESNNRTRSPSLLAHLENSNPSSIHHFENIPNSLAFLLPFQYINPVSAPLLGLPPNGLLLEQPGLRLREPSLSTQNEYNESSESEVSPTPYKNDQTPNRNALTSITNVEPKTEPACVSPIQNSAPVSDLTKTEHPKSSFRIHRMRRMGSASRKGRVFCNACGKTFYDKGTLKIHYNAVHLKIKHRCTIEGCNMVFSSLRSRNRHSANPNPRLHMPMLRNNRDKDLIRATSGAATPVIASTKSNLALTSPGRPPMGFTTPPLDPVLQNPLPSQLVFSGLKTVQPVPPFYRSLLTPGEMVSPPTSLPTSPIIPTSGTIEQHPPPPSEPVVPAVMMATHEPSADLAPKKKPRKSSMPVKIEKEIIDTADEFDDEDDDPNDGGAVVNDMSHDNHCHSQEEMSPGMSVKDFSKHNRTRCISRTEIRRADSMTSEDQEPERDYENESESSEPKLGEESMEGDEHIHSEVSEKVLMNSERPDENHSEPSHQDVIKVKEEFTDPTYDMFYMSQYGLYNGGGASMAALHESFTSSLNYGSPQKFSPEGDLCSSPDPKICYVCKKSFKSSYSVKLHYRNVHLKEMHVCTVAGCNAAFPSRRSRDRHSANINLHRKLLTKELDDMGLDSSQPSLSKDLRDEFLVKIYGAQHPMGLDVREDASSPAGTEDSHLNGYGRGMAEDYMVLDLSTTSSLQSSSSIHSSRESDAGSDEGILLDDIDGASDSGESAHKAEAPALPGSLGAEVSGSLMFSSLSGSNGGIMCNICHKMYSNKGTLRVHYKTVHLREMHKCKVPGCNMMFSSVRSRNRHSQNPNLHKNIPFTSVD

SEQ ID NO: 14202 - protein, 903 aa, Homo sapiens
MAHLGPTPPPHSLNYKSEDRLSEQDWPAYFKVPCCGVDTSQIESEEAEVDVRERETQRDREPKRARDLTLRDSCTDNSMQFGTRTTTAEPGFMGTWQNADTNLLFRMSQQAIRCTLVNCTCECFQPGKINLRTCDQCKHGWVAHALDKLSTQHLYHPTQVEIVQSNVVFDISSLMLYGTQAVPVRLKILLDRLFSVLKQEEVLHILHGLGWTLRDYVRGYILQDAAGKVLDRWAIMSREEEIITLQQFLRFGETKSIVELMAIQEKEGQAVAVPSSKTDSDIRTFIESNNRTRSPSLLAHLENSNPSSIHHFENIPNSLAFLLPFQYINPVSAPLLGLPPNGLLLEQPGLRLREPSLSTQNEYNESSESEVSPTPYKNDQTPNRNALTSITNVEPKTEPACVSPIQNSAPVSDLTKTEHPKSSFRIHRMRRMGSASRKGRVFCNACGKTFYDKGTLKIHYNAVHLKIKHRCTIEGCNMVFSSLRSRNRHSANPNPRLHMPMLRNNRDKDLIRATSGAATPVIASTKSNLALTSPGRPPMGFTTPPLDPVLQNPLPSQLVFSGLKTVQPVPPFYRSLLTPGEMVSPPTSLPTSPIIPTSGTIEQHPPPPSEPVVPAVMMATHEPSADLAPKKKPRKSSMPVKIEKEIIDTADEFDDEDDDPNDGGAVVNDMSHDNHCHSQEEMSPGMSVKDFSKHNRTRCISRTEIRRADSMTSEDQEPERDYENESESSEPKLGEESMEGDEHIHSEVSEKVLMNSERPDENHSEPSHQDVIKVKEEFTDPTYDMFYMSQYGLYNGGGASMAALHESFTSSLNYGSPQKFSPEGDLCSSPDPKICYVCKKSFKSSYSVKLHYRNVHLKEMHVCTVAGCNAAFPSRRSRDRYWEKSNEQNGLLVSWGETLSSLK

SEQ ID NO: 14203 - protein, 455 aa, Homo sapiens
MSSSGLNSEKVAALIQKLNSDPQFVLAQNVGTTHDLLDICLKRATVQRAQHVFQHAVPQEGKPITNQKSSGRCWIFSCLNVMRLPFMKKLNIEEFEFSQSYLFFWDKVERCYFFLSAFVDTAQRKEPEDGRLVQFLLMNPANDGGQWDMLVNIVEKYGVIPKKCFPESYTTEATRRMNDILNHKMREFCIRLRNLVHSGATKGEISATQDVMMEEIFRVVCICLGNPPETFTWEYRDKDKNYQKIGPITPLEFYREHVKPLFNMEDKICLVNDPRPQHKYNKLYTVEYLSNMVGGRKTLYNNQPIDFLKKMVAASIKDGEAVWFGCDVGKHFNSKLGLSDMNLYDHELVFGVSLKNMNKAERLTFGESLMTHAMTFTAVSEKDDQDGAFTKWRVENSWGEDHGHKGYLCMTDEWFSEYVYEVVVDRKHVPEEVLAVLEQEPIILPAWDPMGALAE

SEQ ID NO: 14204 - protein, 418 aa, Homo sapiens
MIQLTATPVSALVDEPVHIRATGLIPFQMVSFQASLEDENGDMFYSQAHYRANEFGEVDLNHASSLGGDYMGVHPMGLFWSLKPEKLLTRLLKRDVMNRPFQVQVKLYDLELIVNNKVASAPKASLTLERWYVAPGVTRIKVREGRLRGALFLPPGEGLFPGVIDLFGGLGGLLEFRASLLASRGFASLALAYHNYEDLPRKPEVTDLEYFEEAANFLLRHPKVFGSGVGVVSVCQGVQIGLSMAIYLKQVTATVLINGTNFPFGIPQVYHGQIHQPLPHSAQLISTNALGLLELYRTFETTQVGASQYLFPIEEAQGQFLFIVGEGDKTINSKAHAEQAIGQLKRHGKNNWTLLSYPGAGHLIEPPYSPLCCASTTHDLRLHWGGEVIPHAAAQEHAWKEIQRFLRKHLIPDVTSQL

SEQ ID NO: 14205 - protein, 414 aa, Homo sapiens
MGVSKLDILYRRLLLTKLFIRGWGRPEDLKRLFEFRKMIGNRERCQNLVSSDYPVHIDKIEEQSDCKILDGHFVSPMAHYVPDIMPIESVIARFQFIVPKEWNSKYRPVCIHLAGTGDHHYWRRRTLMARPMIKEARMASLLLENPYYGCRKPKDQVRSSLKNVSDLFVMGGALVLESAALLHWLEREGYGPLGMTGISMGGHMASLAVSNWPKPMPLIPCLSWSTASGVFTTTDSFKMGQEFVKHFTSSADKLTNLNLVSRTLNLDISNQVVSQKPADCHNSSKTSVSATSEGLLLQDTSKMKRFNQTLSTNKSGYTSRNPQSYHLLSKEQSRNSLRKESLIFMKGVMDECTHVANFSVPVDPSLIIVVQAKEDAYIPRTGVRSLQEIWPGCEIRYLEGGHISAYLFKQGLFR

SEQ ID NO: 14206 - protein, 332 aa, Homo sapiens
MLDTNLILLPLFQFIVPKEWNSKYRPVCIHLAGTGDHHYWRRRTLMARPMIKEARMASLLLENPYYGCRKPKDQVRSSLKNVSDLFVMGGALVLESAALLHWLEREGYGPLGMTGISMGGHMASLAVSNWPKPMPLIPCLSWSTASGVFTTTDSFKMGQEFVKHFTSSADKLTNLNLVSRTLNLDISNQVVSQKPADCHNSSKTSVSATSEGLLLQDTSKMKRFNQTLSTNKSGYTSRNPQSYHLLSKEQSRNSLRKESLIFMKGVMDECTHVANFSVPVDPSLIIVVQAKEDAYIPRTGVRSLQEIWPGCEIRYLEGGHISAYLFKQGLFR

SEQ ID NO: 14207 - protein, 321 aa, Homo sapiens
MARPMIKEARMASLLLENPYYGCRKPKDQVRSSLKNVSDLFVMGGALVLESAALLHWLEREGYGPLGMTGISMGGHMASLAVSNWPKPMPLIPCLSWSTASGVFTTGVLSKSINWRELEKQYYTQTVYEEEIIHMLEYCGTDSFKMGQEFVKHFTSSADKLTNLNLVSRTLNLDISNQVVSQKPADCHNSSKTSVSATSEGLLLQDTSKMKRFNQTLSTNKSGYTSRNPQSYHLLSKEQSRNSLRKESLIFMKGVMDECTHVANFSVPVDPSLIIVVQAKEDAYIPRTGVRSLQEIWPGCEIRYLEGGHISAYLFKQGLFR

SEQ ID NO: 14208 - protein, 245 aa, Homo sapiens
MASLAVSNWPKPMPLIPCLSWSTASGVFTTGVLSKSINWRELEKQYYTQTVYEEEIIHMLEYCGTDSFKMGQEFVKHFTSSADKLTNLNLVSRTLNLDISNQVVSQKPADCHNSSKTSVSATSEGLLLQDTSKMKRFNQTLSTNKSGYTSRNPQSYHLLSKEQSRNSLRKESLIFMKGVMDECTHVANFSVPVDPSLIIVVQAKEDAYIPRTGVRSLQEIWPGCEIRYLEGGHISAYLFKQGLFR

SEQ ID NO: 14209 - protein, 125 aa, Homo sapiens
MDHKPLLQERPPAYNLEAGQGDYACGPHGYGAIPAAPPPPPYPYLVTGIPTHHPRVYNIHSRTVTRYPANSIVVVGGCPVCRVGVLEDCFTFLGIFLAIILFPFGFICCFALRKRRCPNCGATFA

SEQ ID NO: 14210 - protein, 98 aa, Homo sapiens
MDHKPLLQERPPAYNLEAGQGDYACGPHGYGAIPAAPPPPPYPYLVTGIPTHHPRVYNIHSRTVTRYPANSIVVVGGCPVCRHQRSSWLYTYPLRVCT

SEQ ID NO: 14211 - protein, 552 aa, Homo sapiens
MSLSRSEEMHRLTENVYKTIMEQFNPSLRNFIAMGKNYEKALAGVTYAAKGYFDALVKMGELASESQGSKELGDVLFQMAEVHRQIQNQLEEMLKSFHNELLTQLEQKVELDSRYLSAALKKYQTEQRSKGDALDKCQAELKKLRKKSQGSKNPQKYSDKELQYIDAISNKQGELENYVSDGYKTALTEERRRFCFLVEKQCAVAKNSAAYHSKGKELLAQKLPLWQQACADPSKIPERAVQLMQQVASNGATLPSALSASKSNLVISDPIPGAKPLPVPPELAPFVGRMSAQESTPIMNGVTGPDGEDYSPWADRKAAQPKSLSPPQSQSKLSDSYSNTLPVRKSVTPKNSYATTENKTLPRSSSMAAGLERNGRMRVKAIFSHAAGDNSTLLSFKEGDLITLLVPEARDGWHYGESEKTKMRGWFPFSYTRVLDSDGSDRLHMSLQQGKSSSTGNLLDKDDLAIPPPDYGAASRAFPAQTASGFKQRPYSVAVPAFSQGLDDYGARSMSRNPFAHVQLKPTVTNDRCDLSAQGPEGREHGDGSARTLAGR

SEQ ID NO: 14212 - protein, 534 aa, Homo sapiens
MSLSRSEEMHRLTENVYKTIMEQFNPSLRNFIAMGKNYEKALAGVTYAAKGYFDALVKMGELASESQGSKELGDVLFQMAEVHRQIQNQLEEMLKSFHNELLTQLEQKVELDSRYLSAALKKYQTEQRSKGDALDKCQAELKKLRKKSQGSKNPQKYSDKELQYIDAISNKQGELENYVSDGYKTALTEERRRFCFLVEKQCAVAKNSAAYHSKGKELLAQKLPLWQQACADPSKIPERAVQLMQQVASNGATLPSALSASKSNLVISDPIPGAKPLPVPPELAPFVGRMSAQESTPIMNGVTGPDGEDYSPWADRKAAQPKSLSPPQSQSKLSDSYSNTLPVRKSVTPKNSYATTENKTLPRSSSMAAGLERNGRMRVKAIFSHAAGDNSTLLSFKEGDLITLLVPEARDGWHYGESEKTKMRGWFPFSYTRVLDSDGSDRLHMSLQQGKSSSTGNLLDKDDLAIPPPDYGAASRAFPAQTASGFKQRPYSVAVPAFSQGLDDYGARSMSRNPFAHVQLKPTVTNDRSAPLLS

SEQ ID NO: 14213 - protein, 512 aa, Homo sapiens
MSLSRSEEMHRLTENVYKTIMEQFNPSLRNFIAMGKNYEKALAGVTYAAKGYFDALVKMGELASESQGSKELGDVLFQMAEVHRQIQNQLEEMLKSFHNELLTQLEQKVELDSRYLSAALKKYQTEQRSKGDALDKCQAELKKLRKKSQGSKNPQKYSDKELQYIDAISNKQGELENYVSDGYKTALTEERRRFCFLVEKQCAVAKNSAAYHSKGKELLAQKLPLWQQACADPSKIPERAVQLMQQVASNGATLPSALSASKSNLVISDPIPGAKPLPVPPELAPFVGRMSAQESTPIMNGVTGPDGEDYSPWADRKAAQPKSLSPPQSQSKLSDSYSNTLPVRKSVTPKNSYATTENKTLPRSSSMAAGLERNGRMRVKAIFSHAAGDNSTLLSFKEGDLITLLVPEARDGWHYGESEKTKMRGWFPFSYTRVLDSDGSDRLHMSLQQGKSSSTGNLLDKDDLAIPPPDYGAASRAFPAQTASGFKQRPYSVAVPAFSQGLDDYGARSMSR

SEQ ID NO: 14214 - protein, 521 aa, Homo sapiens
MSLSRSEEMHRLTENVYKTIMEQFNPSLRNFIAMGKNYEKALAGVTYAAKGYFDALVKMGELASESQGSKELGDVLFQMAEVHRQIQNQLEEMLKSFHNELLTQLEQKVELDSRYLSAALKKYQTEQRSKGDALDKCQAELKKLRKKSQGSKNPQKYSDKELQYIDAISNKQGELENYVSDGYKTALTEERRRFCFLVEKQCAVAKNSAAYHSKGKELLAQKLPLWQQACADPSKIPERAVQLMQQVASNGATLPSALSASKSNLVISDPIPGAKPLPVPPELAPFVGRMSAQESTPIMNGVTGPDGEDYSPWADRKAAQPKSLSPPQSQSKLSDSYSNTLPVRKSVTPKNSYATTENKTLPRSSSMAAGLERNGRMRVKAIFSHAAGDNSTLLSFKEGDLITLLVPEARDGWHYGESEKTKMRGWFPFSYTRVLDSDGSDRLHMSLQQGKSSSTGNLLDKDDLAIPPPDYGAASRAFPAQTASGFKQRPYSVAVPAFSQGLDDYGARSMSSGSGTLVSTV

SEQ ID NO: 14215 - protein, 520 aa, Homo sapiens
MSLSRSEEMHRLTENVYKTIMEQFNPSLRNFIAMGKNYEKALAGVTYAAKGYFDALVKMGELASESQGSKELGDVLFQMAEVHRQIQNQLEEMLKSFHNELLTQLEQKVELDSRYLSAALKKYQTEQRSKGDALDKCQAELKKLRKKSQGSKNPQKYSDKELQYIDAISNKQGELENYVSDGYKTALTEERRRFCFLVEKQCAVAKNSAAYHSKGKELLAQKLPLWQQACADPSKIPERAVQLMQQVASNGATLPSALSASKSNLVISDPIPGAKPLPVPPELAPFVGRMSAQESTPIMNGVTGPDGEDYSPWADRKAAQPKSLSPPQSQSKLSDSYSNTLPVRKSVTPKNSYATTENKTLPRSSSMAAGLERNGRMRVKAIFSHAAGDNSTLLSFKEGDLITLLVPEARDGWHYGESEKTKMRGWFPFSYTRVLDSDGSDRLHMSLQQGKSSSTGNLLDKDDLAIPPPDYGAASRAFPAQTASGFKQRPYSVAVPAFSQGLDDYGARSMSSADVEVARF

SEQ ID NO: 14216 - protein, 522 aa, Homo sapiens
MSLSRSEEMHRLTENVYKTIMEQFNPSLRNFIAMGKNYEKALAGVTYAAKGYFDALVKMGELASESQGSKELGDVLFQMAEVHRQIQNQLEEMLKSFHNELLTQLEQKVELDSRYLSAALKKYQTEQRSKGDALDKCQAELKKLRKKSQGSKNPQKYSDKELQYIDAISNKQGELENYVSDGYKTALTEERRRFCFLVEKQCAVAKNSAAYHSKGKELLAQKLPLWQQACADPSKIPERAVQLMQQVASNGATLPSALSASKSNLVISDPIPGAKPLPVPPELAPFVGRMSAQESTPIMNGVTGPDGEDYSPWADRKAAQPKSLSPPQSQSKLSDSYSNTLPVRKSVTPKNSYATTAENKTLPRSSSMAAGLERNGRMRVKAIFSHAAGDNSTLLSFKEGDLITLLVPEARDGWHYGESEKTKMRGWFPFSYTRVLDSDGSDRLHMSLQQGKSSSTGNLLDKDDLAIPPPDYGAASRAFPAQTASGFKQRPYSVAVPAFSQGLDDYGARSMSSGSGTLVSTV

SEQ ID NO: 14217 - protein, 974 aa, Homo sapiens
MAAQGEPGYLAAQSDPGSNSERSTDSPVPGSEDDLVAGATLHSPEWSEERFRVDRKKLEAMLQAAAEGKGRSGEDFFQKIMEETNTQIAWPSKLKIGAKSKKDPHIKVSGKKEDVKEAKEMIMSVLDTKSNRVTLKMDVSHTEHSHVIGKGGNNIKKVMEETGCHIHFPDSNRNNQAEKSNQVSIAGQPAGVESARVRIRELLPLVLMFELPIAGILQPVPDPNSPSIQHISQTYNISVSFKQRSRMYGATVIVRGSQNNTSAVKEGTAMLLEHLAGSLASAIPVSTQLDIAAQHHLFMMGRNGSNIKHIMQRTGAQIHFPDPSNPQKKSTVYLQGTIESVCLARQYLMGCLPLVLMFDMKEEIEVDPQFIAQLMEQLDVFISIKPKPKQPSKSVIVKSVERNALNMYEARKCLLGLESSGVTIATSPSPASCPAGLACPSLDILASAGLGLTGLGLLGPTTLSLNTSTTPNSLLNALNSSVSPLQSPSSGTPSPTLWAPPLANTSSATGFSAIPHLMIPSTAQATLTNILLSGVPTYGHTAPSPPPGLTPVDVHINSMQTEGKKISAALNGHAQSPDIKYGAISTSSLGEKVLSANHGDPSIQTSGSEQTSPKSSPTEGCNDAFVEVGMPRSPSHSGNAGDLKQMMCPSKVSCAKRQTVELLQGTKNSHLHSTDRLLSDPELSATESPLADKKAPGSERAAERAAAAQQNSERAHLAPRSSYVNMQAFDYEQKKLLATKAMLKKPVVTEVRTPTNTWSGLGFSKSMPAETIKELRRANHVSYKPTMTTTYEGSSMSLSRSNSREHLGGGSESDNWRDRNGIGPGSHSEFAASIGSPKRKQNKSTEHYLSSSNYMDCISSLTGSNGCNLNSSFKGSDLPELFSKLGLGKYTDVFQQQEIDLQTFLTLTDQDLKELGITTFGARRKMLLAISELNKNRRKLFESPNARTSFLEGGASGRLPRQYHSDIASVSGRW

SEQ ID NO: 14218 - protein, 880 aa, Homo sapiens
MAAQGEPGYLAAQSDPGSNSERSTDSPVPGSEDDLVAGATLHSPEWSEERFRVDRKKLEAMLQAAAEGKGRSGEDFFQKIMEETNTQIAWPSKLKIGAKSKKDPHIKVSGKKEDVKEAKEMIMSVLDTKSNRVTLKMDVSHTEHSHVIGKGGNNIKKVMEETGCHIHFPDSNRNNQAEKSNQVSIAGQPAGVESARVRIRELLPLVLMFELPIAGILQPVPDPNSPSIQHISQTYNISVSFKQRSRMYGATVIVRGSQNNTSAVKEGTAMLLEHLAGSLASAIPVSTQLDIAAQHHLFMMGRNGSNIKHIMQRTGAQIHFPDPSNPQKKSTVYLQGTIESVCLARQYLMGCLPLVLMFDMKEEIEVDPQFIAQLMEQLDVFISIKPKPKQPSKSVIVKSVERNALNMYEARKCLLGLESSGVTIATSPSPASCPAGLACPSLDILASAGLGLTGLGLLGPTTLSLNTSTTPNSLLNALNSSVSPLQSPSSGTPSPTLWAPPLANTSSATGFSAIPHLMIPSTAQATLTNILLSGVPTYGHTAPSPPPGLTPVDVHINSMQTEGKKISAALNGHAQSPDIKYGAISTSSLGEKVLSANHGDPSIQTSGSEQTSPKSSPTEGCNDAFVEVGMPRSPSHSGNAGDLKQMMCPSKVSCAKRQTVELLQGTKNSHLHSTDRLLSDPELSATESPLADKKAPGSERAAERAAAAQQNSERAHLAPRSSYVNMQAFDYEQKKLLATKAMLKKPVVTEVRTPTNTWSGLGFSKSMPAETIKELRRANHVSYKPTMTTTYEGSSMSLSRSNSREHLGGGSESDNWRDRNGIGPGSHSEFAASIGSPKRKQNKSSELCVLCTLLGIPRLECVYLGWSITDCGLSDFKCLV

SEQ ID NO: 14219 - protein, 561 aa, Homo sapiens
MAAEEMHWPVPMKAIGAQNLLTMPGGVAKAGYLHKKGGTQLQLLKWPLRFVIIHKRCVYYFKSSTSASPQGAFSLSGYNRVMRAAEETTSNNVFPFKIIHISKKHRTWFFSASSEEERKSWMALLRREIGHFHEKKDLPLDTSDSSSDTDSFYGAVERPVDISLSPYPTDNEDYEHDDEDDSYLEPDSPEPGRLEDALMHPPAYPPPPVPTPRKPAFSDMPRAHSFTSKGPGPLLPPPPPKHGLPDVGLAAEDSKRDPLCPRRAEPCPRVPATPRRMSDPPLSTMPTAPGLRKPPCFRESASPSPEPWTPGHGACSTSSAAIMATATSRNCDKLKSFHLSPRGPPTSEPPPVPANKPKFLKIAEEDPPREAAMPGLFVPPVAPRPPALKLPVPEAMARPAVLPRPEKPQLPHLQRSPPDGQSFRSFSFEKPRQPSQADTGGDDSDEDYEKVPLPNSVFVNTTESCEVERLFKATSPRGEPQDGLYCIRNSSTKSGKVLVVWDETSNKVRNYRIFEKDSKFYLEGEVLFVSVGSMVEHYHTHVLPSHQSLLLRHPYGYTGPR

SEQ ID NO: 14220 - protein, 97 aa, Homo sapiens
MAAEEMHWPVPMKAIGAQNLLTMPGGVAKAGYLHKKGGTQLQLLKWPLRFVIIHKRCVYYFKSSTSASPQGAFSLSGYNRQPRPQPAQALSQTEAGP

SEQ ID NO: 14221 - protein, 589 aa, Homo sapiens
MASLGPRTPAPSRSRGRRAMCWVSTISFMAAEEMHWPVPMKAIGAQNLLTMPGGVAKAGYLHKKGGTQLQLLKWPLRFVIIHKRCVYYFKSSTSASPQGAFSLSGYNRVMRAAEETTSNNVFPFKIIHISKKHRTWFFSASSEEERKSWMALLRREIGHFHEKKDLPLDTSDSSSDTDSFYGAVERPVDISLSPYPTDNEDYEHDDEDDSYLEPDSPEPGRLEDALMHPPAYPPPPVPTPRKPAFSDMPRAHSFTSKGPGPLLPPPPPKHGLPDVGLAAEDSKRDPLCPRRAEPCPRVPATPRRMSDPPLSTMPTAPGLRKPPCFRESASPSPEPWTPGHGACSTSSAAIMATATSRNCDKLKSFHLSPRGPPTSEPPPVPANKPKFLKIAEEDPPREAAMPGLFVPPVAPRPPALKLPVPEAMARPAVLPRPEKPQLPHLQRSPPDGQSFRSFSFEKPRQPSQADTGGDDSDEDYEKVPLPNSVFVNTTESCEVERLFKATSPRGEPQDGLYCIRNSSTKSGKVLVVWDETSNKVRNYRIFEKDSKFYLEGEVLFVSVGSMVEHYHTHVLPSHQSLLLRHPYGYTGPR

SEQ ID NO: 14222 - protein, 618 aa, Homo sapiens
MAGSGPRPRSWGRREAGARDEAAAAGGRGPGPCRCSQGRRAWIAPGKPAMPAAWTPFMAAEEMHWPVPMKAIGAQNLLTMPGGVAKAGYLHKKGGTQLQLLKWPLRFVIIHKRCVYYFKSSTSASPQGAFSLSGYNRVMRAAEETTSNNVFPFKIIHISKKHRTWFFSASSEEERKSWMALLRREIGHFHEKKDLPLDTSDSSSDTDSFYGAVERPVDISLSPYPTDNEDYEHDDEDDSYLEPDSPEPGRLEDALMHPPAYPPPPVPTPRKPAFSDMPRAHSFTSKGPGPLLPPPPPKHGLPDVGLAAEDSKRDPLCPRRAEPCPRVPATPRRMSDPPLSTMPTAPGLRKPPCFRESASPSPEPWTPGHGACSTSSAAIMATATSRNCDKLKSFHLSPRGPPTSEPPPVPANKPKFLKIAEEDPPREAAMPGLFVPPVAPRPPALKLPVPEAMARPAVLPRPEKPQLPHLQRSPPDGQSFRSFSFEKPRQPSQADTGGDDSDEDYEKVPLPNSVFVNTTESCEVERLFKATSPRGEPQDGLYCIRNSSTKSGKVLVVWDETSNKVRNYRIFEKDSKFYLEGEVLFVSVGSMVEHYHTHVLPSHQSLLLRHPYGYTGPR

SEQ ID NO: 14223 - protein, 184 aa, Homo sapiens
MEPSQCVEELEDDVFQPEDGEPVTQPGSLLSADLFAQSLLDCPLSRLQLFPLTHCCGPGLRPTSQEDKATQTLSPASPSQGVMLPCGVTEEPQRLFYGNAGYRLPLPASFPAVLPIGEQPPEGQWQHQAEVQIARKLQCIADQFHRLHVQQHQQNQNRVWWQILLFLHNLALNGEENRNGAGPR

SEQ ID NO: 14224 - protein, 163 aa, Homo sapiens
MEPSQCVEELEDDVFQPEDGEPVTQPGSLLSADLFAQSLLDCPLSRLQLFPLTHCCGPGLRPTSQEDKATQTLSPASPSQGVMLPCGVTEEPQRLFYGNAGYRLPLPASFPAVLPIGEQPPEGQWQHQAEHQQNQNRVWWQILLFLHNLALNGEENRNGAGPR

SEQ ID NO: 14225 - protein, 129 aa, Homo sapiens
MEPSQCVEELEDDVFQPEDGEPVTQPGSLLSADLFAQSLLDCPLSRLQLFPLTHCCGPGLRPTSQEDKATQTLSPASPSQGVMLPCGVTEEPQRLFYAPAEPKSCVVADPPLPAQPCFEWRREQERGRP

SEQ ID NO: 14226 - protein, 508 aa, Homo sapiens
MSSPDGPSFPSGPLSGGASPSGDEGFFPFVLERRDSFLGGGPGPEEPEDLALQLQQKEKDLLLAAELGKMLLERNEELRRQLETLSAQHLEREERLQQENHELRRGLAARGAEWEARAVELEGDVEALRAQLGEQRSEQQDSGRERARALSELSEQNLRLSQQLAQASQTEQELQRELDALRGQCQAQALAGAELRTRLESLQGENQMLQSRRQDLEAQIRGLREEVEKGEGRLQTTHEELLLLRRERREHSLELERARSEAGEALSALRRLQRRVSELEEESRLQDADVSAASLQSELAHSLDDGDQGQGADAPGDTPTTRSPKTRKASSPQPSPPEEILEPPKKRTSLSPAEILEEKEVEVAKLQDEISLQQAELQSLREELQRQKELRAQEDPGEALHSALSDRDEAVNKALELSLQLNRVSLERDSLSRELLRAIRQKVALTQELEAWQDDMQVVIGQQLRSQRQKELSASASSSTPRRAAPRFSLRLGPGPAGGFLSNLFRRT

SEQ ID NO: 14227 - protein, 301 aa, Homo sapiens
MLQSRRQDLEAQIRGLREEVEKGEGRLQTTHEELLLLRRERREHSLELERARSEAGEALSALRRLQRRVSELEEESRLQDADVSAASLQSELAHSLDDGDQGQGADAPGDTPTTRSPKTRKASSPQPSPPEEILEPPKKRTSLSPAEILEEKEVEVAKLQDEISLQQAELQSLREELQRQKELRAQEDPGEALHSALSDRDEAVNKALELSLQLNRVSLERDSLSRELLRAIRQKVALTQELEAWQDDMQVVIGQQLRSQRQKELSASASSSTPRRAAPRFSLRLGPGPAGGFLSNLFRRT

SEQ ID NO: 14228 - protein, 1079 aa, Homo sapiens
MDDDDDSCLLDLIGDPQALNYFLHGPSNKSSNDDLTNAGYSAANSNSIFANSSNADPKSSLKGVSNQLGEGPSDGLPLSSSLQFLEDELESSPLPDLTEDQPFDILQKSLQEANITEQTLAEEAYLDASIGSSQQFAQAQLHPSSSASFTQASNVSNYSGQTLQPIGVTHVPVGASFASNTVGVQHGFMQHVGISVPSQHLSNSSQISGSGQIQLIGSFGNHPSMMTINNLDGSQIILKGSGQQAPSNVSGGLLVHRQTPNGNSLFGNSSSSPVAQPVTVPFNSTNFQTSLPVHNIIIQRGLAPNSNKVPINIQPKPIQMGQQNTYNVNNLGIQQHHVQQGISFASASSPQGSVVGPHMSVNIVNQQNTRKPVTSQAVSSTGGSIVIHSPMGQPHAPQSQFLIPTSLSVSSNSVHHVQTINGQLLQTQPSQLISGQVASEHVMLNRNSSNMLRTNQPYTGPMLNNQNTAVHLVSGQTFAASGSPVIANHASPQLVGGQMPLQQASPTVLHLSPGQSSVSQGRPGFATMPSVTSMSGPSRFPAVSSASTAHPSLGSAVQSGSSGSNFTGDQLTQPNRTPVPVSVSHRLPVSSSKSTSTFSNTPGTGTQQQFFCQAQKKCLNQTSPISAPKTTDGLRQAQIPGLLSTTLPGQDSGSKVISASLGTAQPQQEKVVGSSPGHPAVQVESHSGGQKRPAAKQLTKGAFILQQLQRDQAHTVTPDKSHFRSLSDAVQRLLSYHVCQGSMPTEEDLRKVDNEFETVATQLLKRTQAMLNKYRCLLLEDAMRINPSAEMVMIDRMFNQEERASLSRDKRLALVDPEGFQADFCCSFKLDKAAHETQFGRSDQHGSKASSSLQPPAKAQGRDRAKTGVTEPMNHDQFHLVPNHIVVSAEGNISKKTECLGRALKFDKVGLVQYQSTSEEKASRREPLKASQCSPGPEGHRKTSSRSDHGTESKLSSILADSHLEMTCNNSFQDKSLRNSPKNEVLHTDIMKGSGEPQPDLQLTKSLETTFKNILELKKAGRQPQSDPTVSGSVELDFPNFSPMASQENCLEKFIPDHSEGVVETDSILEAAVNSILEC

SEQ ID NO: 14229 - protein, 195 aa, Homo sapiens
MDCEVNNGSSLRDECITNLLVFGFLQSCSDNSFRRELDALGHELPVLAPQWEGYDELQTDGNRSSHSRLGRIEADSESQEDIIRNIARHLAQVGDSMDRSIPPGLVNGLALQLRNTSRSEEDRNRDLATALEQLLQAYPRDMEKEKTMLVLALLLAKKVASHTPSLLRDVFHTTVNFINQNLRTYVRSLARNGMD

SEQ ID NO: 14230 - protein, 241 aa, Homo sapiens
MCSGAGVMMARWAARGRAGWRSTVRILSPLGHCEPGVSRSCRAAQAMDCEVNNGSSLRDECITNLLVFGFLQSCSDNSFRRELDALGHELPVLAPQWEGYDELQTDGNRSSHSRLGRIEADSESQEDIIRNIARHLAQVGDSMDRSIPPGLVNGLALQLRNTSRSEEDRNRDLATALEQLLQAYPRDMEKEKTMLVLALLLAKKVASHTPSLLRDVFHTTVNFINQNLRTYVRSLARNGMD

SEQ ID NO: 14231 - protein, 137 aa, Homo sapiens
MDCEVNNGSSLRDECITNLLVFGFLQSCSDNSFRRELDALGHELPVLAPQWEGYDELQTDGNRSSHSRLGRIEAGASDNNTASAEEETEAAGSVAVERGLHGAATVILKVKKTSSGILPGTSPRSGTAWTVASLRAW

SEQ ID NO: 14232 - protein, 99 aa, Homo sapiens
MDRSIPPGLVNGLALQLRNTSRSEEDRNRDLATALEQLLQAYPRDMEKEKTMLVLALLLAKKVASHTPSLLRDVFHTTVNFINQNLRTYVRSLARNGMD

SEQ ID NO: 14233 - protein, 296 aa, Homo sapiens
MNAEPERKFGVVVVGVGRAGSVRMRDLRNPHPSSAFLNLIGFVSRRELGSIDGVQQISLEDALSSQEVEVAYICSESSSHEDYIRQFLNAGKHVLVEYPMTLSLAAAQELWELAEQKGKVLHEEHVELLMEEFAFLKKEVVGKDLLKGSLLFTAGPLEEERFGFPAFSGISRLTWLVSLFGELSLVSATLEERKEDQYMKMTVCLETEKKSPLSWIEEKGPGLKRNRYLSFHFKSGSLENVPNVGVNKNIFLKDQNIFVQKLLGQFSEKELAAEKKRILHCLGLAEEIQKYCCSRK

SEQ ID NO: 14234 - protein, 424 aa, Homo sapiens
MGSLVLTLCALFCLAAYLVSGSPIMNLEQSPLEEDMSLFGDVFSEQDGVDFNTLLQSMKDEFLKTLNLSDIPTQDSAKVDPPEYMLELYNKFATDRTSMPSANIIRSFKNEDLFSQPVSFNGLRKYPLLFNVSIPHHEEVIMAELRLYTLVQRDRMIYDGVDRKITIFEVLESKGDNEGERNMLVLVSGEIYGTNSEWETFDVTDAIRRWQKSGSSTHQLEVHIESKHDEAEDASSGRLEIDTSAQNKHNPLLIVFSDDQSSDKERKEELNEMISHEQLPELDNLGLDSFSSGPGEEALLQMRSNIIYDSTARIRRNAKGNYCKRTPLYIDFKEIGWDSWIIAPPGYEAYECRGVCNYPLAEHLTPTKHAIIQALVHLKNSQKASKACCVPTKLEPISILYLDKGVVTYKFKYEGMAVSECGCR

SEQ ID NO: 14235 - protein, 614 aa, Homo sapiens
MRPPQCLLHTPSLASPLLLLLLWLLGGGVGAEGREDAELLVTVRGGRLRGIRLKTPGGPVSAFLGIPFAEPPMGPRRFLPPEPKQPWSGVVDATTFQSVCYQYVDTLYPGFEGTEMWNPNRELSEDCLYLNVWTPYPRPTSPTPVLVWIYGGGFYSGASSLDVYDGRFLVQAERTVLVSMNYRVGAFGFLALPGSREAPGNVGLLDQRLALQWVQENVAAFGGDPTSVTLFGESAGAASVGMHLLSPPSRGLFHRAVLQSGAPNGPWATVGMGEARRRATQLAHLVGCPPGGTGGNDTELVACLRTRPAQVLVNHEWHVLPQESVFRFSFVPVVDGDFLSDTPEALINAGDFHGLQVLVGVVKDEGSYFLVYGAPGFSKDNESLISRAEFLAGVRVGVPQVSDLAAEAVVLHYTDWLHPEDPARLREALSDVVGDHNVVCPVAQLAGRLAAQGARVYAYVFEHRASTLSWPLWMGVPHGYEIEFIFGIPLDPSRNYTAEEKIFAQRLMRYWANFARTGDPNEPRDPKAPQWPPYTAGAQQYVSLDLRPLEVRRGLRAQACAFWNRFLPKLLSATDTLDEAERQWKAEFHRWSSYMVHWKNQFDHYSKQDRCSDL

SEQ ID NO: 14236 - protein, 617 aa, Homo sapiens
MRPPQCLLHTPSLASPLLLLLLWLLGGGVGAEGREDAELLVTVRGGRLRGIRLKTPGGPVSAFLGIPFAEPPMGPRRFLPPEPKQPWSGVVDATTFQSVCYQYVDTLYPGFEGTEMWNPNRELSEDCLYLNVWTPYPRPTSPTPVLVWIYGGGFYSGASSLDVYDGRFLVQAERTVLVSMNYRVGAFGFLALPGSREAPGNVGLLDQRLALQWVQENVAAFGGDPTSVTLFGESAGAASVGMHLLSPPSRGLFHRAVLQSGAPNGPWATVGMGEARRRATQLAHLVGCPPGGTGGNDTELVACLRTRPAQVLVNHEWHVLPQESVFRFSFVPVVDGDFLSDTPEALINAGDFHGLQVLVGVVKDEGSYFLVYGAPGFSKDNESLISRAEFLAGVRVGVPQVSDLAAEAVVLHYTDWLHPEDPARLREALSDVVGDHNVVCPVAQLAGRLAAQGARVYAYVFEHRASTLSWPLWMGVPHGYEIEFIFGIPLDPSRNYTAEEKIFAQRLMRYWANFARTGDPNEPRDPKAPQWPPYTAGAQQYVSLDLRPLEVRRGLRAQACAFWNRFLPKLLSATASEAPSTCPGFTHGEAAPRPGLPLPLLLLHQLLLLFLSHLRRL

SEQ ID NO: 14237 - protein, 603 aa, Homo sapiens
MRPPQCLLHTPSLASPLLLLLLWLLGGGVGAEGREDAELLVTVRGGRLRGIRLKTPGGPVSAFLGIPFAEPPMGPRRFLPPEPKQPWSGVVDATTFQSVCYQYVDTLYPGFEGTEMWNPNRELSEDCLYLNVWTPYPRPTSPTPVLVWIYGGGFYSGASSLDVYDGRFLVQAERTVLVSMNYRVGAFGFLALPGSREAPGNVGLLDQRLALQWVQENVAAFGGDPTSVTLFGESAGAASVGMHLLSPPSRGLFHRAVLQSGAPNGPWATVGMGEARRRATQLAHLVGCPPGGTGGNDTELVACLRTRPAQVLVNHEWHVLPQESVFRFSFVPVVDGDFLSDTPEALINAGDFHGLQVLVGVVKDEGSYFLVYGAPGFSKDNESLISRAEFLAGVRVGVPQVSDLAAEAVVLHYTDWLHPEDPARLREALSDVVGDHNVVCPVAQLAGRLAAQGARVYAYVFEHRASTLSWPLWMGVPHGYEIEFIFGIPLDPSRNYTAEEKIFAQRLMRYWANFARTGDPNEPRDPKAPQWPPYTAGAQQYVSLDLRPLEVRRGLRAQACAFWNRFLPKLLSATGMQGPAGSAGRRGVGARQCNPSLLPLASE

SEQ ID NO: 14238 - protein, 526 aa, Homo sapiens
MRPPQCLLHTPSLASPLLLLLLWLLGGGVGAEGREDAELLVTVRGGRLRGIRLKTPGGPVSAFLGIPFAEPPMGPRRFLPPEPKQPWSGVVDATTFQSVCYQYVDTLYPGFEGTEMWNPNRELSEDCLYLNVWTPYPRPTSPTPVLVWIYGGGFYSGASSLDVYDGRFLVQAERTVLVSMNYRVGAFGFLALPGSREAPGNVGLLDQRLALQWVQENVAAFGGDPTSVTLFGESAGAASVGMHLLSPPSRGLFHRAVLQSGAPNGPWATVGMGEARRRATQLAHLVGCPPGGTGGNDTELVACLRTRPAQVLVNHEWHVLPQESVFRFSFVPVVDGDFLSDTPEALINAGDFHGLQLAGRLAAQGARVYAYVFEHRASTLSWPLWMGVPHGYEIEFIFGIPLDPSRNYTAEEKIFAQRLMRYWANFARTGDPNEPRDPKAPQWPPYTAGAQQYVSLDLRPLEVRRGLRAQACAFWNRFLPKLLSATDTLDEAERQWKAEFHRWSSYMVHWKNQFDHYSKQDRCSDL

SEQ ID NO: 14239 - protein, 432 aa, Homo sapiens
MEGLAVRLLRGSRLLRRNFLTCLSSWKIPPHVSKSSQSEALLNITNNGIHFAPLQTFTDEEMMIKSSVKKFAQEQIAPLVSTMDENSKMEKSVIQGLFQQGLMGIEVDPEYGGTGASFLSTVLVIEELAKVDASVAVFCEIQNTLINTLIRKHGTEEQKATYLPQLTTEKVGSFCLSEAGAGSDSFALKTRADKEGDYYVLNGSKMWISSAEHAGLFLVMANVDPTIGYKGITSFLVDRDTPGLHIGKPENKLGLRASSTCPLTFENVKVPEANILGQIGHGYKYAIGSLNEGRIGIAAQMLGLAQGCFDYTIPYIKERIQFGKRLFDFQGLQHQVAHVATQLEAARLLTYNAARLLEAGKPFIKEASMAKYYASEIAGQTTSKCIEWMGGVGYTKDYPVEKYFRDAKIGTIYEGASNIQLNTIAKHIDAEY

SEQ ID NO: 14240 - protein, 330 aa, Homo sapiens
MGIEVDPEYGGTGASFLSTVLVIEELAKVDASVAVFCEIQNTLINTLIRKHGTEEQKATYLPQLTTEKVGSFCLSEAGAGSDSFALKTRADKEGDYYVLNGSKMWISSAEHAGLFLVMANVDPTIGYKGITSFLVDRDTPGLHIGKPENKLGLRASSTCPLTFENVKVPEANILGQIGHGYKYAIGSLNEGRIGIAAQMLGLAQGCFDYTIPYIKERIQFGKRLFDFQGLQHQVAHVATQLEAARLLTYNAARLLEAGKPFIKEASMAKYYASEIAGQTTSKCIEWMGGVGYTKDYPVEKYFRDAKIGTIYEGASNIQLNTIAKHIDAEY

SEQ ID NO: 14241 - protein, 746 aa, Homo sapiens
MAGSRGAGRTAAPSVRPEKRRSEPELEPEPEPEPPLLCTSPLSHSTGSDSGVSDSEESVFSGLEDSGSDSSEDDDEGDEEGEDGALDDEGHSGIKKTTEEQVQASTPCPRTEMASARIGDEYAEDSSDEEDIRNTVGNVPLEWYDDFPHVGYDLDGRRIYKPLRTRDELDQFLDKMDDPDYWRTVQDPMTGRDLRLTDEQVALVRRLQSGQFGDVGFNPYEPAVDFFSGDVMIHPVTNRPADKRSFIPSLVEKEKVSRMVHAIKMGWIQPRRPRDPTPSFYDLWAQEDPNAVLGRHKMHVPAPKLALPGHAESYNPPPEYLLSEEERLAWEQQEPGERKLSFLPRKFPSLRAVPAYGRFIQERFERCLDLYLCPRQRKMRVNVDPEDLIPKLPRPRDLQPFPTCQALVYRGHSDLVRCLSVSPGGQWLVSGSDDGSLRLWEVATARCVRTVPVGGVVKSVAWNPSPAVCLVAAAVEDSVLLLNPALGDRLVAGSTDQLLSAFVPPEEPPLQPARWLEASEEERQVGLRLRICHGKPVTQVTWHGRGDYLAVVLATQGHTQVLIHQLSRRRSQSPFRRSHGQVQRVAFHPARPFLLVASQRSVRLYHLLRQELTKKLMPNCKWVSSLAVHPAGDNVICGSYDSKLVWFDLDLSTKPYRMLRHHKKALRAVAFHPRYPLFASGSDDGSVIVCHGMVYNDLLQNPLLVPVKVLKGHVLTRDLGVLDVIFHPTQPWVFSSGADGTVRLFT

SEQ ID NO: 14242 - protein, 634 aa, Homo sapiens
MASARIGDEYAEDSSDEEDIRNTVGNVPLEWYDDFPHVGYDLDGRRIYKPLRTRDELDQFLDKMDDPDYWRTVQDPMTGRDLRLTDEQVALVRRLQSGQFGDVGFNPYEPAVDFFSGDVMIHPVTNRPADKRSFIPSLVEKEKVSRMVHAIKMGWIQPRRPRDPTPSFYDLWAQEDPNAVLGRHKMHVPAPKLALPGHAESYNPPPEYLLSEEERLAWEQQEPGERKLSFLPRKFPSLRAVPAYGRFIQERFERCLDLYLCPRQRKMRVNVDPEDLIPKLPRPRDLQPFPTCQALVYRGHSDLVRCLSVSPGGQWLVSGSDDGSLRLWEVATARCVRTVPVGGVVKSVAWNPSPAVCLVAAAVEDSVLLLNPALGDRLVAGSTDQLLSAFVPPEEPPLQPARWLEASEEERQVGLRLRICHGKPVTQVTWHGRGDYLAVVLATQGHTQVLIHQLSRRRSQSPFRRSHGQVQRVAFHPARPFLLVASQRSVRLYHLLRQELTKKLMPNCKWVSSLAVHPAGDNVICGSYDSKLVWFDLDLSTKPYRMLRHHKKALRAVAFHPRYPLFASGSDDGSVIVCHGMVYNDLLQNPLLVPVKVLKGHVLTRDLGVLDVIFHPTQPWVFSSGADGTVRLFT

SEQ ID NO: 14243 - protein, 1085 aa, Homo sapiens
MDTPENVLQMLEAHMQSYKGNDPLGEWERYIQWVEENFPENKEYLITLLEHLMKEFLDKKKYHNDPRFISYCLKFAEYNSDLHQFFEFLYNHGIGTLSSPLYIAWAGHLEAQGELQHASAVLQRGIQNQAEPREFLQQQYRLFQTRLTETHLPAQARTSEPLHNVQVLNQMITSKSNPGNNMACISKNQGSELSGVISSACDKESNMERRVITISKSEYSVHSSLASKVDVEQVVMYCKEKLIRGESEFSFEELRAQKYNQRRKHEQWVNEDRHYMKRKEANAFEEQLLKQKMDELHKKLHQVVETSHEDLPASQERSEVNPARMGPSVGSQQELRAPCLPVTYQQTPVNMEKNPREAPPVVPPLANAISAALVSPATSQSIAPPVPLKAQTVTDSMFAVASKDAGCVNKSTHEFKPQSGAEIKEGCETHKVANTSSFHTTPNTSLGMVQATPSKVQPSPTVHTKEALGFIMNMFQAPTLPDISDDKDEWQSLDQNEDAFEAQFQKNVRSSGAWGVNKIISSLSSAFHVFEDGNKENYGLPQPKNKPTGARTFGERSVSRLPSKPKEEVPHAEEFLDDSTVWGIRCNKTLAPSPKSPGDFTSAAQLASTPFHKLPVESVHILEDKENVVAKQCTQATLDSCEENMVVPSRDGKFSPIQEKSPKQALSSHMYSASLLRLSQPAAGGVLTCEAELGVEACRLTDTDAAIAEDPPDAIAGLQAEWMQMSSLGTVDAPNFIVGNPWDDKLIFKLLSGLSKPVSSYPNTFEWQCKLPAIKPKTEFQLGSKLVYVHHLLGEGAFAQVYEATQGDLNDAKNKQKFVLKVQKPANPWEFYIGTQLMERLKPSMQHMFMKFYSAHLFQNGSVLVGELYSYGTLLNAINLYKNTPEKVMPQGLVISFAMRMLYMIEQVHDCEIIHGDIKPDNFILGNGFLEQDDEDDLSAGLALIDLGQSIDMKLFPKGTIFTAKCETSGFQCVEMLSNKPWNYQIDYFGVAATVYCMLFGTYMKVKNEGGECKPEGLFRRLPHLDMWNEFFHVMLNIPDCHHLPSLDLLRQKLKKVFQQHYTNKIRALRNRLIVLLLECKRSRK

SEQ ID NO: 14244 - protein, 1028 aa, Homo sapiens
MDTPENVLQMLEAHMQSYKGNDPLGEWERYIQWVEENFPENKEYLITLLEHLMKEFLDKKKYHNDPRFISYCLKFAEYNSDLHQFFEFLYNHGIGTLSSPLYIAWAGHLEAQGELQHASAVLQRGIQNQAEPREFLQQQYRLFQTRLTETHLPAQARTSEPLHNVQVLNQMITSKSNPGNNMACISKNQGSELSGVISSACDKESNMERRVITISKSEYSVHSSLASKVDVEQVVMYCKEKLIRGESEFSFEELRAQKYNQRRKHEQWVNEDRHYMKRKEANAFEEQLLKQKMDELHKKLHQVVETSHEDLPASQERSEVNPARMGPSVGSQQELRAPCLPVTYQQTPVNMEKNPREAPPVVPPLANAISAALVSPATSQSIAPPVPLKAQTVTDSMFAVASKDAGCVNKSTHEFKPQSGAEIKEGCETHKVANTSSFHTTPNTSLGMVQATPSKVQPSPTVHTKEALGFIMNMFQAPTLPDISDDKDEWQSLDQNEDAFEAQFQKNVRSSGAWGVNKIISSLSSAFHVFEDGNKENYGLPQPKNKPTGARTFGERSVSRLPSKPKEEVPHAEEFLDDSTVWGIRCNKTLAPSPKSPGDFTSAAQLASTPFHKLPVESVHILEDKENVVAKQCTQATLDSCEENMVVPSRDGKFSPIQEKSPKQALSSHMYSASLLRLSQPAAGGVLTCEAELGVEACRLTDTDAAIAEDPPDAIAGLQAEWMQMSSLGTVDAPNFIVGNPWDDKLIFKLLSGLSKPVSSYPNTFEWQCKLPAIKPKTEFQLGSKLVYVHHLLGEGAFAQVYEATQGDLNDAKNKQKFVLKVQKPANPWEFYIGTQLMERLKPSMQHMFMKFYSAHLFQNGSVLVGELYSYGTLLDDEDDLSAGLALIDLGQSIDMKLFPKGTIFTAKCETSGFQCVEMLSNKPWNYQIDYFGVAATVYCMLFGTYMKVKNEGGECKPEGLFRRLPHLDMWNEFFHVMLNIPDCHHLPSLDLLRQKLKKVFQQHYTNKIRALRNRLIVLLLECKRSRK

SEQ ID NO: 14245 - protein, 1065 aa, Homo sapiens
MDTPENVLQYIQWVEENFPENKEYLITLLEHLMKEFLDKKKYHNDPRFISYCLKFAEYNSDLHQFFEFLYNHGIGTLSSPLYIAWAGHLEAQGELQHASAVLQRGIQNQAEPREFLQQQYRLFQTRLTETHLPAQARTSEPLHNVQVLNQMITSKSNPGNNMACISKNQGSELSGVISSACDKESNMERRVITISKSEYSVHSSLASKVDVEQVVMYCKEKLIRGESEFSFEELRAQKYNQRRKHEQWVNEDRHYMKRKEANAFEEQLLKQKMDELHKKLHQVVETSHEDLPASQERSEVNPARMGPSVGSQQELRAPCLPVTYQQTPVNMEKNPREAPPVVPPLANAISAALVSPATSQSIAPPVPLKAQTVTDSMFAVASKDAGCVNKSTHEFKPQSGAEIKEGCETHKVANTSSFHTTPNTSLGMVQATPSKVQPSPTVHTKEALGFIMNMFQAPTLPDISDDKDEWQSLDQNEDAFEAQFQKNVRSSGAWGVNKIISSLSSAFHVFEDGNKENYGLPQPKNKPTGARTFGERSVSRLPSKPKEEVPHAEEFLDDSTVWGIRCNKTLAPSPKSPGDFTSAAQLASTPFHKLPVESVHILEDKENVVAKQCTQATLDSCEENMVVPSRDGKFSPIQEKSPKQALSSHMYSASLLRLSQPAAGGVLTCEAELGVEACRLTDTDAAIAEDPPDAIAGLQAEWMQMSSLGTVDAPNFIVGNPWDDKLIFKLLSGLSKPVSSYPNTFEWQCKLPAIKPKTEFQLGSKLVYVHHLLGEGAFAQVYEATQGDLNDAKNKQKFVLKVQKPANPWEFYIGTQLMERLKPSMQHMFMKFYSAHLFQNGSVLVGELYSYGTLLNAINLYKNTPEKVMPQGLVISFAMRMLYMIEQVHDCEIIHGDIKPDNFILGNGFLEQDDEDDLSAGLALIDLGQSIDMKLFPKGTIFTAKCETSGFQCVEMLSNKPWNYQIDYFGVAATVYCMLFGTYMKVKNEGGECKPEGLFRRLPHLDMWNEFFHVMLNIPDCHHLPSLDLLRQKLKKVFQQHYTNKIRALRNRLIVLLLECKRSRK

SEQ ID NO: 14246 - protein, 336 aa, Homo sapiens
MGNCLHRAELSPSTENSSQLDFEDVWNSSYGVNDSFPDGDYGANLEAAAPCHSCNLLDDSALPFFILTSVLGILASSTVLFMLFRPLFRWQLCPGWPVLAQLAVGSALFSIVVPVLAPGLGSTRSSALCSLGYCVWYGSAFAQALLLGCHASLGHRLGAGQVPGLTLGLTVGIWGVAALLTLPVTLASGASGGLCTLIYSTELKALQATHTVACLAIFVLLPLGLFGAKGLKKALGMGPGPWMNILWAWFIFWWPHGVVLGLDFLVRSKLLLLSTCLAQQALDLLLNLAEALAILHCVATPLLLALFCHQATRTLLPSLPLPEGWSSHLDTLGSKS

SEQ ID NO: 14247 - protein, 338 aa, Homo sapiens
MASSGYVLQAELSPSTENSSQLDFEDVWNSSYGVNDSFPDGDYGANLEAAAPCHSCNLLDDSALPFFILTSVLGILASSTVLFMLFRPLFRWQLCPGWPVLAQLAVGSALFSIVVPVLAPGLGSTRSSALCSLGYCVWYGSAFAQALLLGCHASLGHRLGAGQVPGLTLGLTVGIWGVAALLTLPVTLASGASGGLCTLIYSTELKALQATHTVACLAIFVLLPLGLFGAKGLKKALGMGPGPWMNILWAWFIFWWPHGVVLGLDFLVRSKLLLLSTCLAQQALDLLLNLAEALAILHCVATPLLLALFCHQATRTLLPSLPLPEGWSSHLDTLGSKS

SEQ ID NO: 14248 - protein, 468 aa, Homo sapiens
MAARGSGPRALRLLLLVQLVAGRCGLAGAAGGAQRGLSEPSSIAKHEDSLLKDLFQDYERWVRPVEHLNDKIKIKFGLAISQLVDVDEKNQLMTTNVWLKQEWIDVKLRWNPDDYGGIKVIRVPSDSVWTPDIVLFDNADGRFEGTSTKTVIRYNGTVTWTPPANYKSSCTIDVTFFPFDLQNCSMKFGSWTYDGSQVDIILEDQDVDKRDFFDNGEWEIVSATGSKGNRTDSCCWYPYVTYSFVIKRLPLFYTLFLIIPCIGLSFLTVLVFYLPSNEGEKICLCTSVLVSLTVFLLVIEEIIPSSSKVIPLIGEYLVFTMIFVTLSIMVTVFAINIHHRSSSTHNAMAPLVRKIFLHTLPKLLCMRSHVDRYFTQKEETESGSGPKSSRNTLEAALDSIRYITRHIMKENDVREVVEDWKFIAQVLDRMFLWTFLFVSIVGSLGLFVPVIYKWANILIPVHIGNANK

SEQ ID NO: 14249 - protein, 245 aa, Homo sapiens
MASTALLALCSTGAFSGLAVEAGAGVCHATPIYAGHSWHQATFRLNVAGSTLSRYLRDLLVAANPDLLQQALPRKAITHLKKRSCYVSLDFEGDLRDPARHHPASFSVGNGCCVCLSSERFRCPEPIFQPGLLGQAEQGLPALAFRALQKMPKTLRTRLADTVVLAGGSTLFPGFAERLDKELEAQCRRHGYAALRPHLVAKHGRGMAVWTGGSMVASLHSFQRRWITRAMYQECGSRLLYDVFN

SEQ ID NO: 14250 - protein, 233 aa, Homo sapiens
MEPTAPSLTEEDLTEVKKDALENLRVYLCEKIIAERHFDHLRAKKILSREDTEEISCRTSSRKRAGKLLDYLQENPKGLDTLVESIRREKTQNFLIQKITDEVLKLRNIKLEHLKGLKCSSCEPFPDGATNNLSRSNSDESNFSEKLRASTVMYHPEGESSTTPFFSTNSSLNLPVLEVGRTENTIFSSTTLPRPGDPGAPPLPPDLQLEEEGTCANSSEMFLPLRSRTVSRQ

SEQ ID NO: 14251 - protein, 329 aa, Homo sapiens
MPEPGPRMNGFSLGELCWLFCCPPCPSRIAAKLAFLPPEPTYTVLAPEQRGAGASAPAPAQATAAAAAAQPAPQQPEEGAGAGPGACSLHLSERADWQYSQRELDAVEVFFSRTARDNRLGCMFVRCAPSSRYTLLFSHGNAVDLGQMCSFYIGLGSRINCNIFSYDYSGYGVSSGKPSEKNLYADIDAAWQALRTRYGVSPENIILYGQSIGTVPTVDLASRYECAAVILHSPLMSGLRVAFPDTRKTYCFDAFPSIDKISKVTSPVLVIHGTEDEVIDFSHGLAMYERCPRAVEPLWVEGAGHNDIELYAQYLERLKQFISHELPNS

SEQ ID NO: 14252 - protein, 295 aa, Homo sapiens
MPEPGPRMNGFSLGELCWLFCCPPCPSRIAAKLAFLPPEPTYTVLAPEQRGAGASAPAPAQATAAAAAAQPAPQQPEEGAGAGPGACSLHLSERADWQYSQRELDAVEVFFSRTARDNRLGCMFVRCAPSSRYTLLFSHGNAVDLGQMCSFYIGLGSRINCNIFSYDYSGYGVSSGKPSEKNLYADIDAAWQALRTRYGVSPENIILYGQSIGTVPTVDLASSIDKISKVTSPVLVIHGTEDEVIDFSHGLAMYERCPRAVEPLWVEGAGHNDIELYAQYLERLKQFISHELPNS

SEQ ID NO: 14253 - protein, 272 aa, Homo sapiens
MGNTTSDRVSGERHGAKAARSEGAGGHAPGKEHKIMVGSTDDPSVFSLPDSKLPGDKEFVSWQQDLEDSVKPTQQARPTVIRWSEGGKEVFISGSFNNWSTKIPLIKSHNDFVAILDLPEGEHQYKFFVDGQWVHDPSEPVVTSQLGTINNLIHVKKSDFEVFDALKLDSMESSETSCRDLSSSPPGPYGQEMYAFRSEERFKSPPILPPHLLQVILNKDTNISCDPALLPEPNHVMLNHLYALSIKDSVMVLSATHRYKKKYVTTLLYKPI

SEQ ID NO: 14254 - protein, 190 aa, Homo sapiens
MPRGRSTRSWWGVRTTPACSASLTPSHNDFVAILDLPEGEHQYKFFVDGQWVHDPSEPVVTSQLGTINNLIHVKKSDFEVFDALKLDSMESSETSCRDLSSSPPGPYGQEMYAFRSEERFKSPPILPPHLLQVILNKDTNISCDPALLPEPNHVMLNHLYALSIKDSVMVLSATHRYKKKYVTTLLYKPI

SEQ ID NO: 14255 - protein, 365 aa, Homo sapiens
MNITNCTTEASMAIRPKTITEKMLICMTLVVITTLTTLLNLAVIMAIGTTKKLHQPANYLICSLAVTDLLVAVLVMPLSIIYIVMDRWKLGYFLCEVWLSVDMTCCTCSILHLCVIALDRYWAITNAIEYARKRTAKRAALMILTVWTISIFISMPPLFWRSHRRLSPPPSQCTIQHDHVIYTIYSTLGAFYIPLTLILILYYRIYHAAKSLYQKRGSSRHLSNRSTDSQNSFASCKLTQTFCVSDFSTSDPTTEFEKFHASIRIPPFDNDLDHPGERQQISSTRERKAARILGLILGAFILSWLPFFIKELIVGLSIYTVSSEVADFLTWLGYVNSLINPLLYTSFNEDFKLAFKKLIRCREHT

SEQ ID NO: 14256 - protein, 332 aa, Homo sapiens
MLLETQDALYVALELVIAALSVAGNVLVCAAVGTANTLQTPTNYFLVSLAAADVAVGLFAIPFAITISLGFCTDFYGCLFLACFVLVLTQSSIFSLLAVAVDRYLAICVPLRYKSLVTGTRARGVIAVLWVLAFGIGLTPFLGWNSKDSATNNCTEPWDGTTNESCCLVKCLFENVVPMSYMVYFNFFGCVLPPLLIMLVIYIKIFLVACRQLQRTELMDHSRTTLQREIHAAKSLAMIVGIFALCWLPVHAVNCVTLFQPAQGKNKPKWAMNMAILLSHANSVVNPIVYAYRNRDFRYTFHKIISRYLLCQADVKSGNGQAGVQPALGVGL

SEQ ID NO: 14257 - protein, 447 aa, Homo sapiens
MEGGWPARQSALLCLTVSLLLQGRGDAFTINCSGFDQHGVDPAVFQAVFDRKAFRPFTNYSIPTRVNISFTLSAILGVDAQLQLLTSFLWMDLVWDNPFINWNPKECVGINKLTVLAENLWLPDIFIVESMDVDQTPSGLTAYISSEGRIKYDKPMRVTSICNLDIFYFPFDQQNCTFTFSSFLYTVDSMLLGMDKEVWEITDTSRKVIQTQGEWELLGINKATPKMSMGNNLYDQIMFYVAIRRRPSLYIINLLVPSSFLVAIDALSFYLPAESENRAPFKITLLLGYNVFLLMMNDLLPASGTPLISVYFALCLSLMVVSLLETVFITYLLHVATTQPPPMPRWLHSLLLHCTSPGRCCPTAPQKGNKGLGLTLTHLPGPKEPGELAGKKLGPRETEPDGGSGWTKTQLMELWVQFSHAMDTLLFRLYLLFMASSILTVIVLWNT

SEQ ID NO: 14258 - protein, 523 aa, Homo sapiens
MAGHTQQPSGRGNPRPAPSPSPVPGTVPGASERVALKKEIGLLSACTIIIGNIIGSGIFISPKGVLEHSGSVGLALFVWVLGGGVTALGSLCYAELGVAIPKSGGDYAYVTEIFGGLAGFLLLWSAVLIMYPTSLAVISMTFSNYVLQPVFPNCIPPTTASRVLSMACLMLLTWVNSSSVRWATRIQDMFTGGKLLALSLIIGVGLLQIFQGHFEELRPSNAFAFWMTPSVGHLALAFLQGSFAFSGWNFLNYVTEEMVDARKNLPRAIFISIPLVTFVYTFTNIAYFTAMSPQELLSSNAVAVTFGEKLLGYFSWVMPVSVALSTFGGINGYLFTYSRLCFSGAREGHLPSLLAMIHVRHCTPIPALLVCCGATAVIMLVGDTYTLINYVSFINYLCYGVTILGLLLLRWRRPALHRPIKVNLLIPVAYLVFWAFLLVFSFISEPMVCGVGVIIILTGVPIFFLGVFWRSKPKCVHRLTESMTHWGQELCFVVYPQDAPEEEENGPCPPSLLPATDKPSKPQ

SEQ ID NO: 14259 - protein, 425 aa, Homo sapiens
MNYARFITAASAARNPSPIRTMTDILSRGPKSMISLAGGLPNPNMFPFKTAVITVENGKTIQFGEEMMKRALQYSPSAGIPELLSWLKQLQIKLHNPPTIHYPPSQGQMDLCVTSGSQQGLCKVFEMIINPGDNVLLDEPAYSGTLQSLHPLGCNIINVASDESGIVPDSLRDILSRWKPEDAKNPQKNTPKFLYTVPNGNNPTGNSLTSERKKEIYELARKYDFLIIEDDPYYFLQFNKFRVPTFLSMDVDGRVIRADSFSKIISSGLRIGFLTGPKPLIERVILHIQVSTLHPSTFNQLMISQLLHEWGEEGFMAHVDRVIDFYSNQKDAILAAADKWLTGLAEWHVPAAGMFLWIKVKGINDVKELIEEKAVKMGVLMLPGNAFYVDSSAPSPYLRASFSSASPEQMDVAFQVLAQLIKESL

SEQ ID NO: 14260 - protein, 429 aa, Homo sapiens
MNYARFITAASAARNPSPIRTMSEKRADILSRGPKSMISLAGGLPNPNMFPFKTAVITVENGKTIQFGEEMMKRALQYSPSAGIPELLSWLKQLQIKLHNPPTIHYPPSQGQMDLCVTSGSQQGLCKVFEMIINPGDNVLLDEPAYSGTLQSLHPLGCNIINVASDESGIVPDSLRDILSRWKPEDAKNPQKNTPKFLYTVPNGNNPTGNSLTSERKKEIYELARKYDFLIIEDDPYYFLQFNKFRVPTFLSMDVDGRVIRADSFSKIISSGLRIGFLTGPKPLIERVILHIQVSTLHPSTFNQLMISQLLHEWGEEGFMAHVDRVIDFYSNQKDAILAAADKWLTGLAEWHVPAAGMFLWIKVKGINDVKELIEEKAVKMGVLMLPGNAFYVDSSAPSPYLRASFSSASPEQMDVAFQVLAQLIKESL

SEQ ID NO: 14261 - protein, 331 aa, Homo sapiens
METVISSDSSPAVENEHPQETPESNNSVYTSFMKSHRCYDLIPTSSKLVVFDTSLQVKKAFFALVTNGVRAAPLWDSKKQSFVGMLTITDFINILHRYYKSALVQIYELEEHKIETWREVYLQDSFKPLVCISPNASLFDAVSSLIRNKIHRLPVIDPESGNTLYILTHKRILKFLKLFITEFPKPEFMSKSLEELQIGTYANIAMVRTTTPVYVALGIFVQHRVSALPVVDEKGRVVDIYSKFDVINLAAEKTYNNLDVSVTKALQHRSHYFEGVLKCYLHETLETIINRLVEAEVHRLVVVDENDVVKGIVSLSDILQALVLTGGEKKP

SEQ ID NO: 14262 - protein, 299 aa, Homo sapiens
MKSHRCYDLIPTSSKLVVFDTSLQVKKAFFALVTNGVRAAPLWDSKKQSFVGMLTITDFINILHRYYKSALVQIYELEEHKIETWREVYLQDSFKPLVCISPNASLFDAVSSLIRNKIHRLPVIDPESGNTLYILTHKRILKFLKLFITEFPKPEFMSKSLEELQIGTYANIAMVRTTTPVYVALGIFVQHRVSALPVVDEKGRVVDIYSKFDVINLAAEKTYNNLDVSVTKALQHRSHYFEGVLKCYLHETLETIINRLVEAEVHRLVVVDENDVVKGIVSLSDILQALVLTGGEKKP

SEQ ID NO: 14263 - protein, 340 aa, Homo sapiens
METVISSDSSPAVENEHPQETPESNNSVYTSFMKSHRCYDLIPTSSKLVVFDTSLQVKKAFFALVTNGVRAAPLWDSKKQSFVVLRALSCPLGMLTITDFINILHRYYKSALVQIYELEEHKIETWREVYLQDSFKPLVCISPNASLFDAVSSLIRNKIHRLPVIDPESGNTLYILTHKRILKFLKLFITEFPKPEFMSKSLEELQIGTYANIAMVRTTTPVYVALGIFVQHRVSALPVVDEKGRVVDIYSKFDVINLAAEKTYNNLDVSVTKALQHRSHYFEGVLKCYLHETLETIINRLVEAEVHRLVVVDENDVVKGIVSLSDILQALVLTGGEKKP

SEQ ID NO: 14264 - protein, 199 aa, Homo sapiens
MLLGRLTSQLLRAVPWAGGRPPWPVSGVLGSRVCGPLYSTSPAGPGRAASLPRKGAQLELEEMLVPRKMSVSPLESWLTARCFLPRLDTGTAGTVAPPQSYQCPPSQIGEGAEQGDEGVADAPQIQCKNVLKIRRRKMNHHKYRKLVKKTRFLRRKVQEGRLRRKQIKFEKDLRRIWLKAGLKEAPEGWQTPKIYLRGK

SEQ ID NO: 14265 - protein, 198 aa, Homo sapiens
MAKQPSDVSSECDREGRQLQPAERPPQLRPGAPTSLQTEPQGNPEGNHGGEGDSCPHGSPQGPLAPPASPGPFATRSPLFIFMRRSSLLSRSSSGYFSFDTDRSPAPMSCDKSTQTPSPPCQAFNHYLSAMASMRQAEPADMRPEIWIAQELRRIGDEFNAYYARRVFLNNYQAAEDHPRMVILRLLRYIVRLVWRMH

SEQ ID NO: 14266 - protein, 138 aa, Homo sapiens
MAKQPSDVSSECDREGRQLQPAERPPQLRPGAPTSLQTEPQDRSPAPMSCDKSTQTPSPPCQAFNHYLSAMASMRQAEPADMRPEIWIAQELRRIGDEFNAYYARRVFLNNYQAAEDHPRMVILRLLRYIVRLVWRMH

SEQ ID NO: 14267 - protein, 108 aa, Homo sapiens
MAKQPSDVSSECDREGRQLQPAERPPQLRPGAPTSLQTEPQASMRQAEPADMRPEIWIAQELRRIGDEFNAYYARRVFLNNYQAAEDHPRMVILRLLRYIVRLVWRMH

SEQ ID NO: 14268 - protein, 169 aa, Homo sapiens
MAKQPSDVSSECDREGRQLQPAERPPQLRPGAPTSLQTEPQGNPEGNHGGEGDSCPHGSPQGPLAPPASPGPFATRSPLFIFMRRSSLLSRSSSGYFSFDTDRSPAPMSCDKSTQTPSPPCQAFNHYLSAMASMRQAEPADMRPEIWIAQELRRIGDEFNAYYARRLEK

SEQ ID NO: 14269 - protein, 109 aa, Homo sapiens
MAKQPSDVSSECDREGRQLQPAERPPQLRPGAPTSLQTEPQDRSPAPMSCDKSTQTPSPPCQAFNHYLSAMASMRQAEPADMRPEIWIAQELRRIGDEFNAYYARRLEK

SEQ ID NO: 14270 - protein, 79 aa, Homo sapiens
MAKQPSDVSSECDREGRQLQPAERPPQLRPGAPTSLQTEPQASMRQAEPADMRPEIWIAQELRRIGDEFNAYYARRLEK

SEQ ID NO: 14271 - protein, 85 aa, Homo sapiens
MAKQPSDVSSECDREGRQLQPAERPPQLRPGAPTSLQTEPQASMRQAEPADMRPEIWIAQELRRIGDEFNAYYARRLAKLLASST

SEQ ID NO: 14272 - protein, 172 aa, Homo sapiens
MAKQPSDVSSECDREGRQLQPAERPPQLRPGAPTSLQTEPQGNPEGNHGGEGDSCPHGSPQGPLAPPASPGPFATRSPLFIFMRRSSLLSRSSSGYFSFDTDRSPAPMSCDKSTQTPSPPCQAFNHYLSAMASMRQAEPADMRPEIWIAQELRRIGDEFNAYYARRMPLPPD

SEQ ID NO: 14273 - protein, 82 aa, Homo sapiens
MAKQPSDVSSECDREGRQLQPAERPPQLRPGAPTSLQTEPQASMRQAEPADMRPEIWIAQELRRIGDEFNAYYARRMPLPPD

SEQ ID NO: 14274 - protein, 135 aa, Homo sapiens
MAKQPSDVSSECDREGRQLQPAERPPQLRPGAPTSLQTEPQGNPEGNHGGEGDSCPHGSPQGPLAPPASPGPFATRSPLFIFMRRSSLLSRSSSGYFSFDTDRSPAPMSCDKSTQTPSPPCQAFNHYLSAMANWD

SEQ ID NO: 14275 - protein, 135 aa, Homo sapiens
MAKQPSDVSSECDREGRQLQPAERPPQLRPGAPTSLQTEPQGNPEGNHGGEGDSCPHGSPQGPLAPPASPGPFATRSPLFIFMRRSSLLSRSSSGYFSFDTDRSPAPMSCDKSTQTPSPPCQAFNHYLSAMGIFE

SEQ ID NO: 14276 - protein, 198 aa, Homo sapiens
MAKQPSDVSSECDREGRQLQPAERPPQLRPGAPTSLQTEPQVSLCHPGWSALVRSWLTATSNSQVQAVLLPQPPKRSPLFIFMRRSSLLSRSSSGYFSFDTDRSPAPMSCDKSTQTPSPPCQAFNHYLSAMASMRQAEPADMRPEIWIAQELRRIGDEFNAYYARRVFLNNYQAAEDHPRMVILRLLRYIVRLVWRMH

SEQ ID NO: 14277 - protein, 44 aa, Homo sapiens
MAKQPSDVSSECDREGRQLQPAERPPQLRPGAPTSLQTEPQGIF

SEQ ID NO: 14278 - protein, 140 aa, Homo sapiens
MAKQPSDVSSECDREGRQLQPAERPPQLRPGAPTSLQTEPQGNPEGNHGGEGDSCPHGSPQGPLAPPASPGPFATRSPLFIFMRRSSLLSRSSSGYFSFDTDRSPAPMSCDKSTQTPSPPCQAFNHYLSAMVREIEEVVV

SEQ ID NO: 14279 - protein, 75 aa, Homo sapiens
MAKQPSDVSSECDREGRQLQPAERPPQLRPGAPTSLQTEPQDRSPAPMSCDKSTQTPSPPCQAFNHYLSAMGIFE

SEQ ID NO: 14280 - protein, 80 aa, Homo sapiens
MAKQPSDVSSECDREGRQLQPAERPPQLRPGAPTSLQTEPQDRSPAPMSCDKSTQTPSPPCQAFNHYLSAMVREIEEVVV

SEQ ID NO: 14281 - protein, 112 aa, Homo sapiens
MAKQPSDVSSECDREGRQLQPAERPPQLRPGAPTSLQTEPQDRSPAPMSCDKSTQTPSPPCQAFNHYLSAMVVILEDIGDLSLCFGFIFTGLDLYGHHHSQDTEQLNHKDFS

SEQ ID NO: 14282 - protein, 103 aa, Homo sapiens
MAKQPSDVSSECDREGRQLQPAERPPQLRPGAPTSLQTEPQDRSPAPMSCDKSTQTPSPPCQAFNHYLSAMVFLNNYQAAEDHPRMVILRLLRYIVRLVWRMH

SEQ ID NO: 14283 - protein, 163 aa, Homo sapiens
MAKQPSDVSSECDREGRQLQPAERPPQLRPGAPTSLQTEPQGNPEGNHGGEGDSCPHGSPQGPLAPPASPGPFATRSPLFIFMRRSSLLSRSSSGYFSFDTDRSPAPMSCDKSTQTPSPPCQAFNHYLSAMVFLNNYQAAEDHPRMVILRLLRYIVRLVWRMH

SEQ ID NO: 14284 - protein, 73 aa, Homo sapiens
MAKQPSDVSSECDREGRQLQPAERPPQLRPGAPTSLQTEPQVFLNNYQAAEDHPRMVILRLLRYIVRLVWRMH

SEQ ID NO: 14285 - protein, 71 aa, Homo sapiens
MPAGVPMSTYLKMFAASLLAMCAGAEVVHRYYRPDLTIPEIPPKRGELKTELLGLKERKHKPQVSQQEELK

SEQ ID NO: 14286 - protein, 447 aa, Homo sapiens
MSASKIPLFKMKDLILILCLLEMSFAVPFFPQQSGTPGMASLSLETMRQLGSLQRLNTLSQYSRYGFGKSFNSLWMHGLLPPHSSLPWMRPREHETQQYEYSLPVHPPPLPSQPSLKPQQPGLKPFLQSAAATTNQATALKEALQPPIHLGHLPLQEGELPLVQQQVAPSDKPPKPELPGVDFADPQGPSLPGMDFPDPQGPSLPGLDFADPQGSTIFQIARLISHGPMPQNKQSPLYPGMLYVPFGANQLNAPARLGIMSSEEVAGGREDPMAYGAMFPGFGGMRPGFEGMPHNPAMGGDFTLEFDSPVAATKGPENEEGGAQGSPMPEANPDNLENPAFLTELEPAPHAGLLALPKDDIPGLPRSPSGKMKGLPSVTPAAADPLMTPELADVYRTYDADMTTSVDFQEEATMDTTMAPNSLQTSMPGNKAQEPEMMHDAWHFQEP

SEQ ID NO: 14287 - protein, 432 aa, Homo sapiens
MSASKIPLFKMKDLILILCLLEMSFAVPFFPQQSGTPGMASLSLETMRQLGSLQRLNTLSQYSRYGFGKSFNSLWMHGLLPPHSSLPWMRPREHETQQPSLKPQQPGLKPFLQSAAATTNQATALKEALQPPIHLGHLPLQEGELPLVQQQVAPSDKPPKPELPGVDFADPQGPSLPGMDFPDPQGPSLPGLDFADPQGSTIFQIARLISHGPMPQNKQSPLYPGMLYVPFGANQLNAPARLGIMSSEEVAGGREDPMAYGAMFPGFGGMRPGFEGMPHNPAMGGDFTLEFDSPVAATKGPENEEGGAQGSPMPEANPDNLENPAFLTELEPAPHAGLLALPKDDIPGLPRSPSGKMKGLPSVTPAAADPLMTPELADVYRTYDADMTTSVDFQEEATMDTTMAPNSLQTSMPGNKAQEPEMMHDAWHFQEP

SEQ ID NO: 14288 - protein, 671 aa, Homo sapiens
METSRSRGGGGAVSERGGAGASVGVCRRKAEAGAGTGTLAADMDLHCDCAAETPAAEPPSGKINKAAFKLFKKRKSGGTMPSIFGVKNKGDGKSSGPTGLVRSRTHDGLAEVLVLESGRKEEPRGGGDSGGGGGGRPNPGPPRAAGPGGGSLASSSVAKSHSFFSLLKKNGRSENGKGEPVDASKAGGKQKRGLRGLFSGMRWHRKDKRAKAEAAEGRAPGGGLILPGSLTASLECVKEETPRAAREPEEPSQDAPRDPAGEPAGGEEVPAPADRAPARSCREAEGLAHPGDTGARGEDAAGHRRAEPGPGEVRTAEDASRTGAVPVKTVPLVDSEGGSGRAPAAPDPASVDPPSDPSADRICLMFSDVTSLKSFDSLTGCGDIIADQEEEAGPSCDKHVPGPGKPALSKKNPGVVAYQGGGEEMASPDEVDDTYLQEFWDMLSQTEEQGPEPQEGAAKVAAALETKVVPETPKDTRCVEAAKDASSVKRRRLNRIPIEPHPKEEPKHPEKEQQEGVPNSDEGYWDSTTPGPEEDSSSSGKKAGIPRDSYSGDALYDLYADPDGSPATLPGGKDNEETSSLSRLKPVSPGTITCPLRTPGSLLKDSKIPISIKHLTNLPSSHPVVHQQPSRSEMPRTKIPVSKVLVRRVSNRGLAGTTIRATACHDSAKKL

SEQ ID NO: 14289 - protein, 552 aa, Homo sapiens
METSRSRGGGGAVSERGGAGASVGVCRRKAEAGAGTGTLAADMDLHCDCAAETPAAEPPSGKINKAAFKLFKKRKSGGTMPSIFGVKNKGDGKSSGPTGLVRSRTHDGLAEVLVLESGRKEEPRGGGDSGGGGGGRPNPGPPRAAGPGGGSLASSSVAKSHSFFSLLKKNGRSENGKGEPVDASKAGGKQKRGLRGLFSGMRWHRKDKRAKAEAAEGRAPGGGLILPGSLTASLECVKEETPRAAREPEEPSQDAPRDPAGCGDIIADQEEEAGPSCDKHVPGPGKPALSKKNPGVVAYQGGGEEMASPDEVDDTYLQEFWDMLSQTEEQGPEPQEGAAKVAAALETKVVPETPKDTRCVEAAKDASSVKRRRLNRIPIEPHPKEEPKHPEKEQQEGVPNSDEGYWDSTTPGPEEDSSSSGKKAGIPRDSYSGDALYDLYADPDGSPATLPGGKDNEETSSLSRLKPVSPGTITCPLRTPGSLLKDSKIPISIKHLTNLPSSHPVVHQQPSRSEMPRTKIPVSKVLVRRVSNRGLAGTTIRATACHDSAKKL

SEQ ID NO: 14290 - protein, 693 aa, Homo sapiens
MTPQSLLQTTLFLLSLLFLVQGAHGRGHREDFRFCSQRNQTHRSSLHYKPTPDLRISIENSEEALTVHAPFPAAHPASRSFPDPRGLYHFCLYWNRHAGRLHLLYGKRDFLLSDKASSLLCFQHQEESLAQGPPLLATSVTSWWSPQNISLPSAASFTFSFHSPPHTAAHNASVDMCELKRDLQLLSQFLKHPQKASRRPSAAPASQQLQSLESKLTSVRFMGDMVSFEEDRINATVWKLQPTAGLQDLHIHSRQEEEQSEIMEYSVLLPRTLFQRTKGRSGEAEKRLLLVDFSSQALFQDKNSSQVLGEKVLGIVVQNTKVANLTEPVVLTFQHQLQPKNVTLQCVFWVEDPTLSSPGHWSSAGCETVRRETQTSCFCNHLTYFAVLMVSSVEVDAVHKHYLSLLSYVGCVVSALACLVTIAAYLCSRVPLPCRRKPRDYTIKVHMNLLLAVFLLDTSFLLSEPVALTGSEAGCRASAIFLHFSLLTCLSWMGLEGYNLYRLVVEVFGTYVPGYLLKLSAMGWGFPIFLVTLVALVDVDNYGPIILAVHRTPEGVIYPSMCWIRDSLVSYITNLGLFSLVFLFNMAMLATMVVQILRLRPHTQKWSHVLTLLGLSLVLGLPWALIFFSFASGTFQLVVLYLFSIITSFQGFLIFIWYWSMRLQARGGPSPLKSNSDSARLPISSGSTSSSRI

SEQ ID NO: 14291 - protein, 687 aa, Homo sapiens
MTPQSLLQTTLFLLSLLFLVQGAHGRGHREDFRFCSQRNQTHRSSLHYKPTPDLRISIENSEEALTVHAPFPAAHPASRSFPDPRGLYHFCLYWNRHAGRLHLLYGKRDFLLSDKASSLLCFQHQEESLAQGPPLLATSVTSWWSPQNISLPSAASFTFSFHSPPHTAAHNASVDMCELKRDLQLLSQFLKHPQKASRRPSAAPASQQLQSLESKLTSVRFMGDMVSFEEDRINATVWKLQPTAGLQDLHIHSRQEEEQSEIMEYSVLLPRTLFQRTKGRSGEAEKRLLLVDFSSQALFQDKNSSQVLGEKVLGIVVQNTKVANLTEPVVLTFQHQLQPKNVTLQCVFWVEDPTLSSPGHWSSAGCETVRRETQTSCFCNHLTYFAVLMVSSVEVDAVHKHYLSLLSYVGCVVSALACLVTIAAYLCSRRKPRDYTIKVHMNLLLAVFLLDTSFLLSEPVALTGSEAGCRASAIFLHFSLLTCLSWMGLEGYNLYRLVVEVFGTYVPGYLLKLSAMGWGFPIFLVTLVALVDVDNYGPIILAVHRTPEGVIYPSMCWIRDSLVSYITNLGLFSLVFLFNMAMLATMVVQILRLRPHTQKWSHVLTLLGLSLVLGLPWALIFFSFASGTFQLVVLYLFSIITSFQGFLIFIWYWSMRLQARGGPSPLKSNSDSARLPISSGSTSSSRI

SEQ ID NO: 14292 - protein, 692 aa, Homo sapiens
MTPQSLLQTTLFLLSLLFLVQASASSGAHGRGHREDFRFCSQRNQTHRSSLHYKPTPDLRISIENSEEALTVHAPFPAAHPASRSFPDPRGLYHFCLYWNRHAGRLHLLYGKRDFLLSDKASSLLCFQHQEESLAQGPPLLATSVTSWWSPQNISLPSAASFTFSFHSPPHTAAHNASVDMCELKRDLQLLSQFLKHPQKASRRPSAAPASQQLQSLESKLTSVRFMGDMVSFEEDRINATVWKLQPTAGLQDLHIHSRQEEEQSEIMEYSVLLPRTLFQRTKGRSGEAEKRLLLVDFSSQALFQDKNSSQVLGEKVLGIVVQNTKVANLTEPVVLTFQHQLQPKNVTLQCVFWVEDPTLSSPGHWSSAGCETVRRETQTSCFCNHLTYFAVLMVSSVEVDAVHKHYLSLLSYVGCVVSALACLVTIAAYLCSRRKPRDYTIKVHMNLLLAVFLLDTSFLLSEPVALTGSEAGCRASAIFLHFSLLTCLSWMGLEGYNLYRLVVEVFGTYVPGYLLKLSAMGWGFPIFLVTLVALVDVDNYGPIILAVHRTPEGVIYPSMCWIRDSLVSYITNLGLFSLVFLFNMAMLATMVVQILRLRPHTQKWSHVLTLLGLSLVLGLPWALIFFSFASGTFQLVVLYLFSIITSFQGFLIFIWYWSMRLQARGGPSPLKSNSDSARLPISSGSTSSSRI

SEQ ID NO: 14293 - protein, 523 aa, Homo sapiens
MTPQSLLQTTLFLLSLLFLVQGAHGRGHREDFRFCSQQLQSLESKLTSVRFMGDMVSFEEDRINATVWKLQPTAGLQDLHIHSRQEEEQSEIMEYSVLLPRTLFQRTKGRSGEAEKRLLLVDFSSQALFQDKNSSQVLGEKVLGIVVQNTKVANLTEPVVLTFQHQLQPKNVTLQCVFWVEDPTLSSPGHWSSAGCETVRRETQTSCFCNHLTYFAVLMVSSVEVDAVHKHYLSLLSYVGCVVSALACLVTIAAYLCSRVPLPCRRKPRDYTIKVHMNLLLAVFLLDTSFLLSEPVALTGSEAGCRASAIFLHFSLLTCLSWMGLEGYNLYRLVVEVFGTYVPGYLLKLSAMGWGFPIFLVTLVALVDVDNYGPIILAVHRTPEGVIYPSMCWIRDSLVSYITNLGLFSLVFLFNMAMLATMVVQILRLRPHTQKWSHVLTLLGLSLVLGLPWALIFFSFASGTFQLVVLYLFSIITSFQGFLIFIWYWSMRLQARGGPSPLKSNSDSARLPISSGSTSSSRI

SEQ ID NO: 14294 - protein, 518 aa, Homo sapiens
MCELKRDLQLLSQFLKHPQKASRRPSAAPASQQLQSLESKLTSVRFMGDMVSFEEDRINATVWKLQPTAGLQDLHIHSRQEEEQSEIMEYSVLLPRTLFQRTKGRSGEAEKRLLLVDFSSQALFQDKNSSQVLGEKVLGIVVQNTKVANLTEPVVLTFQHQLQPKNVTLQCVFWVEDPTLSSPGHWSSAGCETVRRETQTSCFCNHLTYFAVLMVSSVEVDAVHKHYLSLLSYVGCVVSALACLVTIAAYLCSRVPLPCRRKPRDYTIKVHMNLLLAVFLLDTSFLLSEPVALTGSEAGCRASAIFLHFSLLTCLSWMGLEGYNLYRLVVEVFGTYVPGYLLKLSAMGWGFPIFLVTLVALVDVDNYGPIILAVHRTPEGVIYPSMCWIRDSLVSYITNLGLFSLVFLFNMAMLATMVVQILRLRPHTQKWSHVLTLLGLSLVLGLPWALIFFSFASGTFQLVVLYLFSIITSFQGFLIFIWYWSMRLQARGGPSPLKSNSDSARLPISSGSTSSSRI

SEQ ID NO: 14295 - protein, 375 aa, Homo sapiens
MSTAGKVIKCKAAVLWELKKPFSIEEVEVAPPKAHEVRIKMVAVGICGTDDHVVSGTMVTPLPVILGHEAAGIVESVGEGVTTVKPGDKVIPLAIPQCGKCRICKNPESNYCLKNDVSNPQGTLQDGTSRFTCRRKPIHHFLGISTFSQYTVVDENAVAKIDAASPLEKVCLIGCGFSTGYGSAVNVAKVTPGSTCAVFGLGGVGLSAIMGCKAAGAARIIAVDINKDKFAKAKELGATECINPQDYKKPIQEVLKEMTDGGVDFSFEVIGRLDTMMASLLCCHEACGTSVIVGVPPDSQNLSMNPMLLLTGRTWKGAILGGFKSKECVPKLVADFMAKKFSLDALITHVLPFEKINEGFDLLHSGKSIRTILMF

SEQ ID NO: 14296 - protein, 260 aa, Homo sapiens
MMDPCSVGVQLRTTNECHKTYYTRHTGFKTLQELSSNDMLLLQLRTGMTLSGNNTICFHHVKIYIDRFEDLQKSCCDPFNIHKKLAKKNLHVIDLDDATFLSAKFGRQLVPGWKLCPKCTQIINGSVDVDTEDRQKRKPESDGRTAKALRSLQFTNPGRQTEFAPETGKREKRRLTKNATAGSDRQVIPAKSKVYDSQGLLIFSGMDLCDCLDEDCLGCFYACPACGSTKCGAECRCDRKWLYEQIEIEGGEIIHNKHAG

SEQ ID NO: 14297 - protein, 1221 aa, Homo sapiens
MMFRSDRMWSCHWKWKPSPLLFLFALYIMCVPHSVWGCANCRVVLSNPSGTFTSPCYPNDYPNSQACMWTLRAPTGYIIQITFNDFDIEEAPNCIYDSLSLDNGESQTKFCGATAKGLSFNSSANEMHVSFSSDFSIQKKGFNASYIRVAVSLRNQKVILPQTSDAYQVSVAKSISIPELSAFTLCFEATKVGHEDSDWTAFSYSNASFTQLLSFGKAKSGYFLSISDSKCLLNNALPVKEKEDIFAESFEQLCLVWNNSLGSIGVNFKRNYETVPCDSTISKVIPGNGKLLLGSNQNEIVSLKGDIYNFRLWNFTMNAKILSNLSCNVKGNVVDWQNDFWNIPNLALKAESNLSCGSYLIPLPAAELASCADLGTLCQATVNSPSTTPPTVTTNMPVTNRIDKQRNDGIIYRISVVIQNILRHPEVKVQSKVAEWLNSTFQNWNYTVYVVNISFHLSAGEDKIKVKRSLEDEPRLVLWALLVYNATNNTNLEGKIIQQKLLKNNESLDEGLRLHTVNVRQLGHCLAMEEPKGYYWPSIQPSEYVLPCPDKPGFSASRICFYNATNPLVTYWGPVDISNCLKEANEVANQILNLTADGQNLTSANITNIVEQVKRIVNKEENIDITLGSTLMNIFSNILSSSDSDLLESSSEALKTIDELAFKIDLNSTSHVNITTRNLALSVSSLLPGTNAISNFSIGLPSNNESYFQMDFESGQVDPLASVILPPNLLENLSPEDSVLVRRAQFTFFNKTGLFQDVGPQRKTLVSYVMACSIGNITIQNLKDPVQIKIKHTRTQEVHHPICAFWDLNKNKSFGGWNTSGCVAHRDSDASETVCLCNHFTHFGVLMDLPRSASQLDARNTKVLTFISYIGCGISAIFSAATLLTYVAFEKLRRDYPSKILMNLSTALLFLNLLFLLDGWITSFNVDGLCIAVAVLLHFFLLATFTWMGLEAIHMYIALVKVFNTYIRRYILKFCIIGWGLPALVVSVVLASRNNNEVYGKESYGKEKGDEFCWIQDPVIFYVTCAGYFGVMFFLNIAMFIVVMVQICGRNGKRSNRTLREEVLRNLRSVVSLTFLLGMTWGFAFFAWGPLNIPFMYLFSIFNSLQGLFIFIFHCAMKENVQKQWRQHLCCGRFRLADNSDWSKTATNIIKKSSDNLGKSLSSSSIGSNSTYLTSKSKSSSTTYFKRNSHTDNVSYEHSFNKSGSLRQCFHGQVLVKTGPC

SEQ ID NO: 14298 - protein, 1193 aa, Homo sapiens
MMFRSDRMWSCHWKWKPSPLLFLFALYIMCVPHSVWGCANCRVVLSNPSGTFTSPCYPNDYPNSQACMWTLRAPTGYIIQITFNDFDIEEAPNCIYDSLSLDNGESQTKFCGATAKGLSFNSSANEMHVSFSSDFSIQKKGFNASYIRVAVSLRNQKVILPQTSDAYQVSVAKSISIPELSAFTLCFEATKVGHEDSDWTAFSYSNASFTQLLSFGKAKSGYFLSISDSKCLLNNALPVKEKEDIFAESFEQLCLVWNNSLGSIGVNFKRNYETVPCDSTISKVIPGNGKLLLGSNQNEIVSLKGDIYNFRLWNFTMNAKILSNLSCNVKGNVVDWQNDFWNIPNLALKAESNLSCGSYLIPLPAAELASCADLGTLCQDGIIYRISVVIQNILRHPEVKVQSKVAEWLNSTFQNWNYTVYVVNISFHLSAGEDKIKVKRSLEDEPRLVLWALLVYNATNNTNLEGKIIQQKLLKNNESLDEGLRLHTVNVRQLGHCLAMEEPKGYYWPSIQPSEYVLPCPDKPGFSASRICFYNATNPLVTYWGPVDISNCLKEANEVANQILNLTADGQNLTSANITNIVEQVKRIVNKEENIDITLGSTLMNIFSNILSSSDSDLLESSSEALKTIDELAFKIDLNSTSHVNITTRNLALSVSSLLPGTNAISNFSIGLPSNNESYFQMDFESGQVDPLASVILPPNLLENLSPEDSVLVRRAQFTFFNKTGLFQDVGPQRKTLVSYVMACSIGNITIQNLKDPVQIKIKHTRTQEVHHPICAFWDLNKNKSFGGWNTSGCVAHRDSDASETVCLCNHFTHFGVLMDLPRSASQLDARNTKVLTFISYIGCGISAIFSAATLLTYVAFEKLRRDYPSKILMNLSTALLFLNLLFLLDGWITSFNVDGLCIAVAVLLHFFLLATFTWMGLEAIHMYIALVKVFNTYIRRYILKFCIIGWGLPALVVSVVLASRNNNEVYGKESYGKEKGDEFCWIQDPVIFYVTCAGYFGVMFFLNIAMFIVVMVQICGRNGKRSNRTLREEVLRNLRSVVSLTFLLGMTWGFAFFAWGPLNIPFMYLFSIFNSLQGLFIFIFHCAMKENVQKQWRQHLCCGRFRLADNSDWSKTATNIIKKSSDNLGKSLSSSSIGSNSTYLTSKSKSSSTTYFKRNSHTDNVSYEHSFNKSGSLRQCFHGQVLVKTGPC

SEQ ID NO: 14299 - protein, 1250 aa, Homo sapiens
MMFRSDRMWSCHWKWKPSPLLFLFALYIMCVPHSVWGCANCRVVLSNPSGTFTSPCYPNDYPNSQACMWTLRAPTGYIIQITFNDFDIEEAPNCIYDSLSLDNGESQTKFCGATAKGLSFNSSANEMHVSFSSDFSIQKKGFNASYIRVAVSLRNQKVILPQTSDAYQVSVAKSISIPELSAFTLCFEATKVGHEDSDWTAFSYSNASFTQLLSFGKAKSGYFLSISDSKCLLNNALPVKEKEDIFAESFEQLCLVWNNSLGSIGVNFKRNYETVPCDSTISKVIPGNGKLLLGSNQNEIVSLKGDIYNFRLWNFTMNAKILSNLSCNVKGNVVDWQNDFWNIPNLALKAESNLSCGSYLIPLPAAELASCADLGTLCQATVNSPSTTPPTVTTNMPVTNRIDKQRNDGIIYRISVVIQNILRHPEVKVQSKVAEWLNSTFQNWNYTVYVVNISFHLSAGEDKIKVKRSLEDEPRLVLWALLVYNATNNTNLEGKIIQQKLLKNNESLDEGLRLHTVNVRQLGHCLAMEEPKGYYWPSIQPSEYVLPCPDKPGFSASRICFYNATNPLVTYWGPVDISNCLKEANEVANQILNLTADGQNLTSANITNIVEQVKRIVNKEENIDITLGSTLMNIFSNILSSSDSDLLESSSEALKTIDELAFKIDLNSTSHVNITTRNLALSVSSLLPGTNAISNFSIGLPSNNESYFQMDFESGQVDPLASVILPPNLLENLSPEDSVLVRRAQFTFFNKTGLFQDVGPQRKTLVSYVMACSIGNITIQNLKDPVQIKIKHTRTQEVHHPICAFWDLNKNKSFGGWNTSGCVAHRDSDASETVCLCNHFTHFGVLMDLPRSASQLDARNTKVLTFISYIGCGISAIFSAATLLTYVAFEKLRRDYPSKILMNLSTALLFLNLLFLLDGWITSFNVDGLCIAVAVLLHFFLLATFTWMGLEAIHMYIALVKVFNTYIRRYILKFCIIGWGLPALVVSVVLASRNNNEVYGKESYGKEKGDEFCWIQDPVIFYVTCAGYFGVMFFLNIAMFIVVMVQICGRNGKRSNRTLREEVLRNLRSVVSLTFLLGMTWGFAFFAWGPLNIPFMYLFSIFNSLQGLFIFIFHCAMKENVQKQWRQHLCCGRFRLADNSDWSKTATNIIKKSSDNLGKSLSSSSIGSNSTYLTSKSKSSSTTYFKRNSHTDSASMDKSLSKLAHADGDQTSIIPVHQVIDKVKGYCNAHSDNFYKNIIMSDTFSHSTKF

SEQ ID NO: 14300 - protein, 1222 aa, Homo sapiens
MMFRSDRMWSCHWKWKPSPLLFLFALYIMCVPHSVWGCANCRVVLSNPSGTFTSPCYPNDYPNSQACMWTLRAPTGYIIQITFNDFDIEEAPNCIYDSLSLDNGESQTKFCGATAKGLSFNSSANEMHVSFSSDFSIQKKGFNASYIRVAVSLRNQKVILPQTSDAYQVSVAKSISIPELSAFTLCFEATKVGHEDSDWTAFSYSNASFTQLLSFGKAKSGYFLSISDSKCLLNNALPVKEKEDIFAESFEQLCLVWNNSLGSIGVNFKRNYETVPCDSTISKVIPGNGKLLLGSNQNEIVSLKGDIYNFRLWNFTMNAKILSNLSCNVKGNVVDWQNDFWNIPNLALKAESNLSCGSYLIPLPAAELASCADLGTLCQDGIIYRISVVIQNILRHPEVKVQSKVAEWLNSTFQNWNYTVYVVNISFHLSAGEDKIKVKRSLEDEPRLVLWALLVYNATNNTNLEGKIIQQKLLKNNESLDEGLRLHTVNVRQLGHCLAMEEPKGYYWPSIQPSEYVLPCPDKPGFSASRICFYNATNPLVTYWGPVDISNCLKEANEVANQILNLTADGQNLTSANITNIVEQVKRIVNKEENIDITLGSTLMNIFSNILSSSDSDLLESSSEALKTIDELAFKIDLNSTSHVNITTRNLALSVSSLLPGTNAISNFSIGLPSNNESYFQMDFESGQVDPLASVILPPNLLENLSPEDSVLVRRAQFTFFNKTGLFQDVGPQRKTLVSYVMACSIGNITIQNLKDPVQIKIKHTRTQEVHHPICAFWDLNKNKSFGGWNTSGCVAHRDSDASETVCLCNHFTHFGVLMDLPRSASQLDARNTKVLTFISYIGCGISAIFSAATLLTYVAFEKLRRDYPSKILMNLSTALLFLNLLFLLDGWITSFNVDGLCIAVAVLLHFFLLATFTWMGLEAIHMYIALVKVFNTYIRRYILKFCIIGWGLPALVVSVVLASRNNNEVYGKESYGKEKGDEFCWIQDPVIFYVTCAGYFGVMFFLNIAMFIVVMVQICGRNGKRSNRTLREEVLRNLRSVVSLTFLLGMTWGFAFFAWGPLNIPFMYLFSIFNSLQGLFIFIFHCAMKENVQKQWRQHLCCGRFRLADNSDWSKTATNIIKKSSDNLGKSLSSSSIGSNSTYLTSKSKSSSTTYFKRNSHTDSASMDKSLSKLAHADGDQTSIIPVHQVIDKVKGYCNAHSDNFYKNIIMSDTFSHSTKF

SEQ ID NO: 14301 - protein, 380 aa, Homo sapiens
MGTKGKVIKCKAAIAWEAGKPLCIEEVEVAPPKAHEVRIQIIATSLCHTDATVIDSKFEGLAFPVIVGHEAAGIVESIGPGVTNVKPGDKVIPLYAPLCRKCKFCLSPLTNLCGKISNLKSPASDQQLMEDKTSRFTCKGKPVYHFFGTSTFSQYTVVSDINLAKIDDDANLERVCLLGCGFSTGYGAAINNAKVTPGSTCAVFGLGGVGLSAVMGCKAAGASRIIGIDINSEKFVKAKALGATDCLNPRDLHKPIQEVIIELTKGGVDFALDCAGGSETMKAALDCTTAGWGSCTFIGVAAGSKGLTIFPEELIIGRTINGTFFGGWKSVDSIPKLVTDYKNKKFNLDALVTHTLPFDKISEAFDLMNQGKSVRTILIF

SEQ ID NO: 14302 - protein, 399 aa, Homo sapiens
MLVRGPHFELQRCKTHLFSSNYLTQVIKCKAAIAWEAGKPLCIEEVEVAPPKAHEVRIQIIATSLCHTDATVIDSKFEGLAFPVIVGHEAAGIVESIGPGVTNVKPGDKVIPLYAPLCRKCKFCLSPLTNLCGKISNLKSPASDQQLMEDKTSRFTCKGKPVYHFFGTSTFSQYTVVSDINLAKIDDDANLERVCLLGCGFSTGYGAAINNAKVTPGSTCAVFGLGGVGLSAVMGCKAAGASRIIGIDINSEKFVKAKALGATDCLNPRDLHKPIQEVIIELTKGGVDFALDCAGGSETMKAALDCTTAGWGSCTFIGVAAGSKGLTIFPEELIIGRTINGTFFGGWKSVDSIPKLVTDYKNKKFNLDALVTHTLPFDKISEAFDLMNQGKSVRTILIF

SEQ ID NO: 14303 - protein, 298 aa, Homo sapiens
MTDAAVSFAKDFLAGGVAAAISKTAVAPIERVKLLLQVQHASKQITADKQYKGIIDCVVRIPKEQGVLSFWRGNLANVIRYFPTQALNFAFKDKYKQIFLGGVDKRTQFWLYFAGNLASGGAAGATSLCFVYPLDFARTRLAADVGKAGAEREFRGLGDCLVKIYKSDGIKGLYQGFNVSVQGIIIYRAAYFGIYDTAKGMLPDPKNTHIVISWMIAQTVTAVAGLTSYPFDTVRRRMMMQSGRKGTDIMYTGTLDCWRKIARDEGGKAFFKGAWSNVLRGMGGAFVLVLYDEIKKYT

SEQ ID NO: 14304 - protein, 473 aa, Homo sapiens
MAQLEGYYFSAALSCTFLVSCLLFSAFSRALREPYMDEIFHLPQAQRYCEGHFSLSQWDPMITTLPGLYLVSIGVIKPAIWIFGWSEHVVCSIGMLRFVNLLFSVGNFYLLYLLFCKVQPRNKAASSIQRVLSTLTLAVFPTLYFFNFLYYTEAGSMFFTLFAYLMCLYGNHKTSAFLGFCGFMFRQTNIIWAVFCAGNVIAQKLTEAWKTELQKKEDRLPPIKGPFAEFRKILQFLLAYSMSFKNLSMLLLLTWPYILLGFLFCAFVVVNGGIVIGDRSSHEACLHFPQLFYFFSFTLFFSFPHLLSPSKIKTFLSLVWKRRILFFVVTLVSVFLVWKFTYAHKYLLADNRHYTFYVWKRVFQRYETVKYLLVPAYIFAGWSIADSLKSKSIFWNLMFFICLFTVIVPQKLLEFRYFILPYVIYRLNIPLPPTSRLICELSCYAVVNFITFFIFLNKTFQWPNSQDIQRFMW

SEQ ID NO: 14305 - protein, 711 aa, Homo sapiens
MKLKLNVLTIILLPVHLLITIYSALIFIPWYFLTNAKKKNAMAKRIKAKPTSDKPGSPYRSVTHFDSLAVIDIPGADTLDKLFDHAVSKFGKKDSLGTREILSEENEMQPNGKVFKKLILGNYKWMNYLEVNRRVNNFGSGLTALGLKPKNTIAIFCETRAEWMIAAQTCFKYNFPLVTLYATLGKEAVVHGLNESEASYLITSVELLESKLKTALLDISCVKHIIYVDNKAINKAEYPEGFEIHSMQSVEELGSNPENLGIPPSRPTPSDMAIVMYTSGSTGRPKGVMMHHSNLIAGMTGQCERIPGLGPKDTYIGYLPLAHVLELTAEISCFTYGCRIGYSSPLTLSDQSSKIKKGSKGDCTVLKPTLMAAVPEIMDRIYKNVMSKVQEMNYIQKTLFKIGYDYKLEQIKKGYDAPLCNLLLFKKVKALLGGNVRMMLSGGAPLSPQTHRFMNVCFCCPIGQGYGLTESCGAGTVTEVTDYTTGRVGAPLICCEIKLKDWQEGGYTINDKPNPRGEIVIGGQNISMGYFKNEEKTAEDYSVDENGQRWFCTGDIGEFHPDGCLQIIDRKKDLVKLQAGEYVSLGKVEAALKNCPLIDNICAFAKSDQSYVISFVVPNQKRLTLLAQQKGVEGTWVDICNNPAMEAEILKEIREAANAMKLERFEIPIKVRLSPEPWTPETGLVTDAFKLKRKELRNHYLKDIERMYGGK

SEQ ID NO: 14306 - protein, 670 aa, Homo sapiens
MAKRIKAKPTSDKPGSPYRSVTHFDSLAVIDIPGADTLDKLFDHAVSKFGKKDSLGTREILSEENEMQPNGKVFKKLILGNYKWMNYLEVNRRVNNFGSGLTALGLKPKNTIAIFCETRAEWMIAAQTCFKYNFPLVTLYATLGKEAVVHGLNESEASYLITSVELLESKLKTALLDISCVKHIIYVDNKAINKAEYPEGFEIHSMQSVEELGSNPENLGIPPSRPTPSDMAIVMYTSGSTGRPKGVMMHHSNLIAGMTGQCERIPGLGPKDTYIGYLPLAHVLELTAEISCFTYGCRIGYSSPLTLSDQSSKIKKGSKGDCTVLKPTLMAAVPEIMDRIYKNVMSKVQEMNYIQKTLFKIGYDYKLEQIKKGYDAPLCNLLLFKKVKALLGGNVRMMLSGGAPLSPQTHRFMNVCFCCPIGQGYGLTESCGAGTVTEVTDYTTGRVGAPLICCEIKLKDWQEGGYTINDKPNPRGEIVIGGQNISMGYFKNEEKTAEDYSVDENGQRWFCTGDIGEFHPDGCLQIIDRKKDLVKLQAGEYVSLGKVEAALKNCPLIDNICAFAKSDQSYVISFVVPNQKRLTLLAQQKGVEGTWVDICNNPAMEAEILKEIREAANAMKLERFEIPIKVRLSPEPWTPETGLVTDAFKLKRKELRNHYLKDIERMYGGK

SEQ ID NO: 14307 - protein, 686 aa, Homo sapiens
MKPSWLQCRKVTSAGGLGGPLPGSSPARGAGAALRALVVPGPRGGLGGRGCRALSSGSGSEYKTHFAASVTDPERFWGKAAEQISWYKPWTKTLENKHSPSTRWFVEGMLNICYNAVDRHIENGKGDKIAIIYDSPVTNTKATFTYKEVLEQVSKLAGVLVKHGIKKGDTVVIYMPMIPQAMYTMLACARIGAIHSLIFGGFASKELSSRIDHVKPKVVVTASFGIEPGRRVEYVPLVEEALKIGQHKPDKILIYNRPNMEAVPLAPGRDLDWDEEMAKAQSHDCVPVLSEHPLYILYTSGTTGLPKGVIRPTGGYAVMLHWSMSSIYGLQPGEVWWAASDLGWVVGHSYICYGPLLHGNTTVLYEGKPVGTPDAGAYFRVLAEHGVAALFTAPTAIRAIRQQDPGAALGKQYSLTRFKTLFVAGERCDVETLEWSKNVFRVPVLDHWWQTETGSPITASCVGLGNSKTPPPGQAGKSVPGYNVMILDDNMQKLKARCLGNIVVKLPLPPGAFSGLWKNQEAFKHLYFEKFPGYYDTMDAGYMDEEGYLYVMSRVDDVINVAGHRISAGAIEESILSHGTVADCAVVGKEDPLKGHVPLALCVLRKDINATEEQVLEEIVKHVRQNIGPVAAFRNAVFVKQLPKTRSGKIPRSALSAIVNGKPYKITSTIEDPSIFGHVEEMLKQA

SEQ ID NO: 14308 - protein, 368 aa, Homo sapiens
MLHWSMSSIYGLQPGEVWWAASDLGWVVGHSYICYGPLLHGNTTVLYEGKPVGTPDAGAYFRVLAEHGVAALFTAPTAIRAIRQQDPGAALGKQYSLTRFKTLFVAGERCDVETLEWSKNVFRVPVLDHWWQTETGSPITASCVGLGNSKTPPPGQAGKSVPGYNVMILDDNMQKLKARCLGNIVVKLPLPPGAFSGLWKNQEAFKHLYFEKFPGYYDTMDAGYMDEEGYLYVMSRVDDVINVAGHRISAGAIEESILSHGTVADCAVVGKEDPLKGHVPLALCVLRKDINATEEQVLEEIVKHVRQNIGPVAAFRNAVFVKQLPKTRSGKIPRSALSAIVNGKPYKITSTIEDPSIFGHVEEMLKQA

SEQ ID NO: 14309 - protein, 1584 aa, Homo sapiens
MRGQAAAPGPVWILAPLLLLLLLLGRRARAAAGADAGPGPEPCATLVQGKFFGYFSAAAVFPANASRCSWTLRNPDPRRYTLYMKVAKAPVPCSGPGRVRTYQFDSFLESTRTYLGVESFDEVLRLCDPSAPLAFLQASKQFLQMRRQQPPQHDGLRPRAGPPGPTDDFSVEYLVVGNRNPSRAACQMLCRWLDACLAGSRSSHPCGIMQTPCACLGGEAGGPAAGPLAPRGDVCLRDAVAGGPENCLTSLTQDRGGHGATGGWKLWSLWGECTRDCGGGLQTRTRTCLPAPGVEGGGCEGVLEEGRQCNREACGPAGRTSSRSQSLRSTDARRREELGDELQQFGFPAPQTGDPAAEEWSPWSVCSSTCGEGWQTRTRFCVSSSYSTQCSGPLREQRLCNNSAVCPVHGAWDEWSPWSLCSSTCGRGFRDRTRTCRPPQFGGNPCEGPEKQTKFCNIALCPGRAVDGNWNEWSSWSACSASCSQGRQQRTRECNGPSYGGAECQGHWVETRDCFLQQCPVDGKWQAWASWGSCSVTCGAGSQRRERVCSGPFFGGAACQGPQDEYRQCGTQRCPEPHEICDEDNFGAVIWKETPAGEVAAVRCPRNATGLILRRCELDEEGIAYWEPPTYIRCVSIDYRNIQMMTREHLAKAQRGLPGEGVSEVIQTLVEISQDGTSYSGDLLSTIDVLRNMTEIFRRAYYSPTPGDVQNFVQILSNLLAEENRDKWEEAQLAGPNAKELFRLVEDFVDVIGFRMKDLRDAYQVTDNLVLSIHKLPASGATDISFPMKGWRATGDWAKVPEDRVTVSKSVFSTGLTEADEASVFVVGTVLYRNLGSFLALQRNTTVLNSKVISVTVKPPPRSLRTPLEIEFAHMYNGTTNQTCILWDETDVPSSSAPPQLGPWSWRGCRTVPLDALRTRCLCDRLSTFAILAQLSADANMEKATLPSVTLIVGCGVSSLTLLMLVIIYVSVWRYIRSERSVILINFCLSIISSNALILIGQTQTRNKVVCTLVAAFLHFFFLSSFCWVLTEAWQSYMAVTGHLRNRLIRKRFLCLGWGLPALVVAISVGFTKAKGYSTMNYCWLSLEGGLLYAFVGPAAAVVLVNMVIGILVFNKLVSKDGITDKKLKERAGASLWSSCVVLPLLALTWMSAVLAVTDRRSALFQILFAVFDSLEGFVIVMVHCILRREVQDAVKCRVVDRQEEGNGDSGGSFQNGHAQLMTDFEKDVDLACRSVLNKDIAACRTATITGTLKRPSLPEEEKLKLAHAKGPPTNFNSLPANVSKLHLHGSPRYPGGPLPDFPNHSLTLKRDKAPKSSFVGDGDIFKKLDSELSRAQEKALDTSYVILPTATATLRPKPKEEPKYSIHIDQMPQTRLIHLSTAPEASLPARSPPSRQPPSGGPPEAPPAQPPPPPPPPPPPPQQPLPPPPNLEPAPPSLGDPGEPAAHPGPSTGPSTKNENVATLSVSSLERRKSRYAELDFEKIMHTRKRHQDMFQDLNRKLQHAAEKDKEVLGPDSKPEKQQTPNKRPWESLRKAHGTPTWVKKELEPLQPSPLELRSVEWERSGATIPLVGQDIIDLQTEV

SEQ ID NO: 14310 - protein, 325 aa, Homo sapiens
MVPREAPESAQCLCPSLTIPNAKDVLRKRHKRRSRQHQRFMARKALLQEQGLLSMPPEPGSSPLPTPFGAATATEAASSGKQCLRAGSGSAPCSRRPAPGKASGPLPSKCVAIDCEMVGTGPRGRVSELARCSIVSYHGNVLYDKYIRPEMPIADYRTRWSGITRQHMRKAVPFQVAQKEILKLLKGKVVVGHALHNDFQALKYVHPRSQTRDTTYVPNFLSEPGLHTRARVSLKDLALQLLHKKIQVGQHGHSSVEDATTAMELYRLVEVQWEQQEARSLWTCPEDREPDSSTDMEQYMEDQYWPDDLAHGSRGGAREAQDRRN

SEQ ID NO: 14311 - protein, 327 aa, Homo sapiens
MVPREAPESAQCLCPSLTIPNAKDVLRKRHKRRSRQHQRFMARKALLQEQGLLSMPPEPGSSPLPTPFGAATATEAASSGKQCLRAGSGSAPCSRRPAPGKASGPLPSKCVAIDCEMVGTGPRGRVSELARCSIVSYHGNVLYDKYIRPEMPIADYRTRWSGITRQHMRKAVPFQVAQKEILKLLKGKVVVGHALHNDFQALKYVHPRSQTRDTTYVPNFLSEPGLHTRARVSLKDLALQLLHKKIQVGQHGHSSVEDATTAMELYRLVEVQWEQQEARSLWTCPEDREPDSSTDMEQYMEDQSTQYWALKQKSEKQDSGLNSGAFV

SEQ ID NO: 14312 - protein, 910 aa, Homo sapiens
MKVGVLWLISFFTFTDGHGGFLGKNDGIKTKKELIVNKKKHLGPVEEYQLLLQVTYRDSKEKRDLRNFLKLLKPPLLWSHGLIRIIRAKATTDCNSLNGVLQCTCEDSYTWFPPSCLDPQNCYLHTAGALPSCECHLNNLSQSVNFCERTKIWGTFKINERFTNDLLNSSSAIYSKYANGIEIQLKKAYERIQGFESVQVTQFRNGSIVAGYEVVGSSSASELLSAIEHVAEKAKTALHKLFPLEDGSFRVFGKAQCNDIVFGFGSKDDEYTLPCSSGYRGNITAKCESSGWQVIRETCVLSLLEELNKNFSMIVGNATEAAVSSFVQNLSVIIRQNPSTTVGNLASVVSILSNISSLSLASHFRVSNSTMEDVISIADNILNSASVTNWTVLLREEKYASSRLLETLENISTLVPPTALPLNFSRKFIDWKGIPVNKSQLKRGYSYQIKMCPQNTSIPIRGRVLIGSDQFQRSLPETIISMASLTLGNILPVSKNGNAQVNGPVISTVIQNYSINEVFLFFSKIESNLSQPHCVFWDFSHLQWNDAGCHLVNETQDIVTCQCTHLTSFSILMSPFVPSTIFPVVKWITYVGLGISIGSLILCLIIEALFWKQIKKSQTSHTRRICMVNIALSLLIADVWFIVGATVDTTVNPSGVCTAAVFFTHFFYLSLFFWMLMLGILLAYRIILVFHHMAQHLMMAVGFCLGYGCPLIISVITIAVTQPSNTYKRKDVCWLNWSNGSKPLLAFVVPALAIVAVNFVVVLLVLTKLWRPTVGERLSRDDKATIIRVGKSLLILTPLLGLTWGFGIGTIVDSQNLAWHVIFALLNAFQGFFILCFGILLDSKLRQLLFNKLSALSSWKQTEKQNSSDLSAKPKFSKPFNPLQNKGHYAFSHTGDSSDNIMLTQFVSNE

SEQ ID NO: 14313 - protein, 218 aa, Homo sapiens
MKVGVLWLISFFTFTDGHGGFLGKNDGIKTKKELIVNKKKHLGPVEEYQLLLQVTYRDSKEKRDLRNFLKLLKPPLLWSHGLIRIIRAKATTDCNSLNGVLQCTCEDSYTWFPPSCLDPQNCYLHTAGALPSCECHLNNLSQSVNFCERTKIWGTFKINERFTNDLLNSSSAIYSKYANGIEIQLKKAYERIQGFESVQVTQFRMSLLSPKLECNGTI

SEQ ID NO: 14314 - protein, 80 aa, Homo sapiens
MKYPLMPLVNDLTFSFLVFWFCLPVGLLLLLIIWLRFLLSQDSEENDSSVCLDWEPWSKGPAEFCWKGTLHGQEKERPCW

SEQ ID NO: 14315 - protein, 302 aa, Homo sapiens
MRRWAWAAVVVLLGPQLVLLGGVGARREAQRTQQPGQRADPPNATASASSREGLPEAPKPSQASGPEFSDAHMTWLNFVRRPDDGALRKRCGSRDKKPRDLFGPPGPPGAEVTAETLLHEFQELLKEATERRFSGLLDPLLPQGAGLRLVGEAFHCRLQGPRRVDKRTLVELHGFQAPAAQGAFLRGSGLSLASGRFTAPVSGIFQFSASLHVDHSELQGKARLRARDVVCVLICIESLCQRHTCLEAVSGLESNSRVFTLQVQGLLQLQAGQYASVFVDNGSGAVLTIQAGSSFSGLLLGT

SEQ ID NO: 14316 - protein, 768 aa, Homo sapiens
MDRGQVLEQLLPELTGLLSLLDHEYLSDTTLEKKMAVASILQSLQPLPAKEVSYLYVNTADLHSGPSFVESLFEEFDCDLSDLRDMPEDDGEPSKGASPELAKSPRLRNAADLPPPLPNKPPPEDYYEEALPLGPGKSPEYISSHNGCSPSHSIVDGYYEDADSSYPATRVNGELKSSYNDSDAMSSSYESYDEEEEEGKSPQPRHQWPSEEASMHLVRECRICAFLLRKKRFGQWAKQLTVIREDQLLCYKSSKDRQPHLRLALDTCSIIYVPKDSRHKRHELRFTQGATEVLVLALQSREQAEEWLKVIREVSKPVGGAEGVEVPRSPVLLCKLDLDKRLSQEKQTSDSDSVGVGDNCSTLGRRETCDHGKGKKSSLAELKGSMSRAAGRKITRIIGFSKKKTLADDLQTSSTEEEVPCCGYLNVLVNQGWKERWCRLKCNTLYFHKDHMDLRTHVNAIALQGCEVAPGFGPRHPFAFRILRNRQEVAILEASCSEDMGRWLGLLLVEMGSRVTPEALHYDYVDVETLTSIVSAGRNSFLYARSCQNQWPEPRVYDDVPYEKMQDEEPERPTGAQVKRHASSCSEKSHRVDPQVKVKRHASSANQYKYGKNRAEEDARRYLVEKEKLEKEKETIRTELIALRQEKRELKEAIRSSPGAKLKALEEAVATLEAQCRAKEERRIDLELKLVAVKERLQQSLAGGPALGLSVSSKPKSGETANKPQNSVPEQPLPVNCVSELRKRSPSIVASNQGRVLQKAKEWEMKKT

SEQ ID NO: 14317 - protein, 725 aa, Homo sapiens
MDRGQVLEQLLPELTGLLSLLDHEYLSDTTLEKKMAVASILQSLQPLPAKEVSYLYVNTADLHSGPSFVESLFEEFDCDLSDLRDMPEDDGEPSKGASPELAKSPRLRNAADLPPPLPNKPPPEDYYEEALPLGPGKSPEYISSHNGCSPSHSIVDGYYEDADSSYPATRVNGELKSSYNDSDAMSSSYESYDEEEEEGKSPQPRHQWPSEEASMHLVRECRICAFLLRKKRFGQWAKQLTVIREDQLLCYKSSKDRQPHLRLALDTCSIIYVPKDSRHKRHELRFTQGATEVLVLALQSREQAEEWLKVIREVSKPVGGAEGVEVPRSPVLLCKLDLDKRLSQEKQTSDSDSVGVGDNCSTLGRRETCDHGKGKKSSLAELKGSMSRAAGRKITRIIGFSKKKTLADDLQTSSTEEEVPCCGYLNVLVNQGWKERWCRLKCNTLYFHKDHMDLRTHVNAIALQGCEVAPGFGPRHPFAFRILRNRQEVAILEASCSEDMGRWLGLLLVEMGSRVTPEALHYDYVDVETLTSIVSAGRNSFLYARSCQNQWPEPRVYDDVPYEKMQDEEPERPTGAQVKRHASSCSEKSHRVDPQVKVKRHASSANQYKYGKNRAEEDARRYLVEKEKLEKEKETIRTELIALRQEKRELKEAIRSSPGAKLKALEEAVATLEAQCRAKEERRIDLELKLVAVKERLQQSLAGGPALGLSVSSKPKSGEWEMKKT

SEQ ID NO: 14318 - protein, 377 aa, Homo sapiens
MDRGQVLEQLLPELTGLLSLLDHEYLSDTTLEKKMAVASILQSLQPLPAKEVSYLYVNTADLHSGPSFVESLFEEFDCDLSDLRDMPEDDGEPSKGASPELAKSPRLRNAADLPPPLPNKPPPEDYYEEALPLGPGKSPEYISSHNGCSPSHSIVDGYYEDADSSYPATRVNGELKSSYNDSDAMSSSYESYDEEEEEGKSPQPRHQWPSEEASMHLVRECRICAFLLRKKRFGQWAKQLTVIREDQLLCYKSSKDRQPHLRLALDTCSIIYVPKDSRHKRHELRFTQGATEVLVLALQSREQAEEWLKVIREVSKPVGGAEGVEVPRSPVLLCKLDLDKVYLSPLSLPQARQWPLNTGSTPGELTGWGESQATAKL

SEQ ID NO: 14319 - protein, 383 aa, Homo sapiens
MSRAAGRKITRIIGFSKKKTLADDLQTSSTEEEVPCCGYLNVLVNQGWKERWCRLKCNTLYFHKDHMDLRTHVNAIALQGCEVAPGFGPRHPFAFRILRNRQEVAILEASCSEDMGRWLGLLLVEMGSRVTPEALHYDYVDVETLTSIVSAGRNSFLYARSCQNQWPEPRVYDDVPYEKMQDEEPERPTGAQVKRHASSCSEKSHRVDPQVKVKRHASSANQYKYGKNRAEEDARRYLVEKEKLEKEKETIRTELIALRQEKRELKEAIRSSPGAKLKALEEAVATLEAQCRAKEERRIDLELKLVAVKERLQQSLAGGPALGLSVSSKPKSGETANKPQNSVPEQPLPVNCVSELRKRSPSIVASNQGRVLQKAKEWEMKKT

SEQ ID NO: 14320 - protein, 1093 aa, Homo sapiens
MKEMVGGCCVCSDERGWAENPLVYCDGHACSVAVHQACYGIVQVPTGPWFCRKCESQERAARVRCELCPHKDGALKRTDNGGWAHVVCALYIPEVQFANVLTMEPIVLQYVPHDRFNKTCYICEEQGRESKAASGACMTCNRHGCRQAFHVTCAQMAGLLCEEEVLEVDNVKYCGYCKYHFSKMKTSRHSSGGGGGGAGGGGGSMGGGGSGFISGRRSRSASPSTQQEKHPTHHERGQKKSRKDKERLKQKHKKRPESPPSILTPPVVPTADKVSSSASSSSHHEASTQETSESSRESKGKKSSSHSLSHKGKKLSSGKGVSSFTSASSSSSSSSSSSGGPFQPAVSSLQSSPDFSAFPKLEQPEEDKYSKPTAPAPSAPPSPSAPEPPKADLFEQKVVFSGFGPIMRFSTTTSSSGRARAPSPGDYKSPHVTGSGASAGTHKRMPALSATPVPADETPETGLKEKKHKASKRSRHGPGRPKGSRNKEGTGGPAAPSLPSAQLAGFTATAASPFSGGSLVSSGLGGLSSRTFGPSGSLPSLSLESPLLGAGIYTSNKDPISHSGGMLRAVCSTPLSSSLLGPPGTSALPRLSRSPFTSTLPSSSASISTTQVFSLAGSTFSLPSTHIFGTPMGAVNPLLSQAESSHTEPDLEDCSFRCRGTSPQESLSSMSPISSLPALFDQTASAPCGGGQLDPAAPGTTNMEQLLEKQGDGEAGVNIVEMLKALHALQKENQRLQEQILSLTAKKERLQILNVQLSVPFPALPAALPAANGPVPGPYGLPPQAGSSDSLSTSKSPPGKSSLGLDNSLSTSSEDPHSGCPSRSSSSLSFHSTPPPLPLLQQSPATLPLALPGAPAPLPPQPQNGLGRAPGAAGLGAMPMAEGLLGGLAGSGGLPLNGLLGGLNGAAAPNPASLSQAGGAPTLQLPGCLNSLTEQQRHLLQQQEQQLQQLQQLLASPQLTPEHQTVVYQMIQQIQQKRELQRLQMAGGSQLPMASLLAGSSTPLLSAGTPGLLPTASAPPLLPAGALVAPSLGNNTSLMAAAAAAAAVAAAGGPPVLTAQTNPFLSLSGAEGSGGGPKGGTADKGASANQEKG

SEQ ID NO: 14321 - protein, 1068 aa, Homo sapiens
MVSSDRPVSLEDEVSHSMKEMIGGCCVCSDERGWAENPLVYCDGHGCSVAVHQACYGIVQVPTGPWFCRKCESQERAARVRCELCPHKDGALKRTDNGGWAHVVCALYIPEVQFANVSTMEPIVLQSVPHDRYNKTCYICDEQGRESKAATGACMTCNKHGCRQAFHVTCAQFAGLLCEEEGNGADNVQYCGYCKYHFSKLKKSKRGSNRSYDQSLSDSSSHSQDKHHEKEKKKYKEKDKHKQKHKKQPEPSPALVPSLTVTTEKTYTSTSNNSISGSLKRLEDTTARFTNANFQEVSAHTSSGKDVSETRGSEGKGKKSSAHSSGQRGRKPGGGRNPGTTVSAASPFPQGSFSGTPGSVKSSSGSSVQSPQDFLSFTDSDLRNDSYSHSQQSSATKDVHKGESGSQEGGVNSFSTLIGLPSTSAVTSQPKSFENSPGDLGNSSLPTAGYKRAQTSGIEEETVKEKKRKGNKQSKHGPGRPKGNKNQENVSHLSVSSASPTSSVASAAGSITSSSLQKSPTLLRNGSLQSLSVGSSPVGSEISMQYRHDGACPTTTFSELLNAIHNGIYNSNDVAVSFPNVVSGSGSSTPVSSSHLPQQSSGHLQQVGALSPSAVSSAAPAVATTQANTLSGSSLSQAPSHMYGNRSNSSMAALIAQSENNQTDQDLGDNSRNLVGRGSSPRGSLSPRSPVSSLQIRYDQPGNSSLENLPPVAASIEQLLERQWSEGQQFLLEQGTPSDILGMLKSLHQLQVENRRLEEQIKNLTAKKERLQLLNAQLSVPFPTITANPSPSHQIHTFSAQTAPTTDSLNSSKSPHIGNSFLPDNSLPVLNQDLTSSGQSTSSSSALSTPPPAGQSPAQQGSGVSGVQQVNGVTVGALASGMQPVTSTIPAVSAVGGIIGALPGNQLAINGIVGALNGVMQTPVTMSQNPTPLTHTTVPPNATHPMPATLTNSASGLGLLSDQQRQILIHQQQFQQLLNSQQLTPEQHQAFLYQLMQHHHQQHHQPELQQLQIPGPTQIPINNLLAGTQAPPLHTATTNPFLTIHGDNASQKVARLSDKTGPVAQEKS

SEQ ID NO: 14322 - protein, 1027 aa, Homo sapiens
MVSSDRPVSLEDEVSHSMKEMIGGCCVCSDERGWAENPLVYCDGHGCSVAVHQACYGIVQVPTGPWFCRKCESQERAARVRCELCPHKDGALKRTDNGGWAHVVCALYIPEVQFANVSTMEPIVLQSVPHDRYNKTCYICDEQGRESKAATGACMTCNKHGCRQAFHVTCAQFAGLLCEEEGNGADNVQYCGYCKYHFSKLKKSKRGSNRSYDQSLSDSSSHSQDKHHEKEKKKYKEKDKHKQKHKKQPEPSPALVPSLTVTTEKTYTSTSNNSISGSLKRLEDTTARFTNANFQEVSAHTSSGKDVSETRGSEGKGKKSSAHSSGQRGRKPGGGRNPGTTVSAASPFPQGSFSGTPGSVKSSSGSSVQSPQDFLSFTDSDLRNDSYSHSQQSSATKDVHKGESGSQEGGVNSFSTLIGLPSTSAVTSQPKSFENSPGDLGNSSLPTAGYKRAQTSGIEEETVKEKKRKGNKQSKHGPGRPKGNKNQENVSHLSVSSASPTSSVASAAGSITSSSLQKSPTLLRNGSLQSLSVGSSPVGSEISMQYRHDGACPTTTFSELLNAIHNDRGDSSTLTKQELKFIGIYNSNDVAVSFPNVVSGSGSSTPVSSSHLPQQSSGHLQQVGALSPSAVSSAAPAVATTQANTLSGSSLSQAPSHMYGNRSNSSMAALIAQSENNQTDQDLGDNSRNLVGRGSSPRGSLSPRSPVSSLQIRYDQPGNSSLENLPPVAASIEQLLERQWSEGQQFLLEQGTPSDILGMLKSLHQLQVENRRLEEQIKNLTAKKERLQLLNAQLSVPFPTITANPSPSHQIHTFSAQTAPTTDSLNSSKSPHIGNSFLPDNSLPVLNQDLTSSGQSTSSSSALSTPPPAGQSPAQQGSGVSGVQQVNGVTVGALASGMQPVTSTIPAVSAVGGIIGALPGNQLAINGIVGALNGVMQTPVTMSQNPTPLTHTTVPPNATHPMPATLTNSASGLGLLSDQQRQILIHQQQFQQLLNSQQLTPVHRHPHFTQLPPTHFSPSMEIMQVRK

SEQ ID NO: 14323 - protein, 126 aa, Homo sapiens
MVSSDRPVSLEDEVSHSMKEMIGGCCVCSDERGWAENPLVYCDGHGCSVAVHQACYGIVQVPTGPWFCRKCESQERAARVAESRSVAQAKVQWCDLSPLQPLLPGFKRFSCLSLPNGMQFLLVSLI

SEQ ID NO: 14324 - protein, 179 aa, Homo sapiens
MVSSDRPVSLEDEVSHSMKEMIGGCCVCSDERGWAENPLVYCDGHGCSVAVHQACYGIVQVPTGPWFCRKCESQERAARVMVCNSCWLASSENVTPGYIEHHCACASPHPRCLVSNVPPVSGALMHCFWACLTTAAFFGPQSFTTCHMSFLVSRDILFYIYGFMPFISVVIWRFKKERW

SEQ ID NO: 14325 - protein, 244 aa, Homo sapiens
MLLLGAVLLLLALPGHDQETTTQGPGVLLPLPKGACTGWMAGIPGHPGHNGAPGRDGRDGTPGEKGEKGDPGLIGPKGDIGETGVPGAEGPRGFPGIQGRKGEPGEGAYVYRSAFSVGLETYVTIPNMPIRFTKIFYNQQNHYDGSTGKFHCNIPGLYYFAYHITVYMKDVKVSLFKKDKAMLFTYDQYQENNVDQASGSVLLHLEVGDQVWLQVYGEGERNGLYADNDNDSTFTGFLLYHDTN

SEQ ID NO: 14326 - protein, 481 aa, Homo sapiens
MVMAAKKGPGPGGGVSGGKAEAEAASEVWCRRVRELGGCSQAGNRHCFECAQRGVTYVDITVGSFVCTTCSGLLRGLNPPHRVKSISMTTFTEPEVVFLQSRGNEVCRKIWLGLFDARTSLVPDSRDPQKVKEFLQEKYEKKRWYVPPDQVKGPTYTKGSASTPVQGSIPEGKPLRTLLGDPAPSLSVAASTSSQPVSQSHARTSQARSTQPPPHSSVKKASTDLLADIGGDPFAAPQMAPAFAAFPAFGGQTPSQGGFANFDAFSSGPSSSVFGSLPPAGQASFQAQPTPAGSSQGTPFGATPLAPASQPNSLADVGSFLGPGVPAAGVPSSLFGMAGQVPPLQSVTMGGGGGSSTGLAFGAFTNPFTAPAAQSPLPSTNPFQPNGLAPGPGFGMSSAGPGFPQAVPPTGAFASSFPAPLFPPQTPLVQQQNGSSFGDLGSAKLGQRPLSQPAGISTNPFMTGPSSSPFASKPPTTNPFL

SEQ ID NO: 14327 - protein, 156 aa, Homo sapiens
MVMAAKKGPGPGGGVSGGKAEAEAASEVWCRRVRELGGCSQAGNRHCFECAQRGVTYVDITVGSFVCTTCSGLLRGLNPPHRVKSISMTTFTEPEVVFLQSRGNEVCRKIWLGLFDARTSLVPDSRDPQKVKEFLQEKYEKKRWPDTFPRRLCQLY

SEQ ID NO: 14328 - protein, 235 aa, Homo sapiens
MEQDDPVEALTELRERRLGALELLQAAAGSGLAAYAVWALLLQPGFRRVPLRLQVPYVGASARQVEHVLSLLRGRPGKTVDLGSGDGRIVLAAHRCGLRPAVGYELNPWLVALARLHAWRAGCAGSVCYRRKDLWKVSLRDCRNVSVFLAPSVLPLLEDKLRTELPAGARVVSGRFPLPTWQPVTAVGEGLDRVWAYDVPEGGQAGEAASSRIPIQAAPGPSSAPIPGGLISQAS

SEQ ID NO: 14329 - protein, 113 aa, Homo sapiens
MEERAQHCLSRLLDNSALKQQELPIHRLYFTARRVLFVFFATGIFCLCMGIILILSARSTQEIEINYTRICANCAKLRENASNFDKECTCSIPFYLSGKMMVGEIQETRLTLH

SEQ ID NO: 14330 - protein, 359 aa, Homo sapiens
MLSAASRVVSRAAVHCALRSPPPEARALAMSRPPPPRVASVLGTMEMGRRMDAPASAAAVRAFLERGHTELDTAFMYSDGQSETILGGLGLGLGGGDCRVKIATKANPWDGKSLKPDSVRSQLETSLKRLQCPQVDLFYLHAPDHGTPVEETLHACQRLHQEGKFVELGLSNYASWEVAEICTLCKSNGWILPTVYQGMYNATTRQVETELFPCLRHFGLRFYAYNPLAGGLLTGKYKYEDKDGKQPVGRFFGNSWAETYRNRFWKEHHFEAIALVEKALQAAYGASAPSVTSAALRWMYHHSQLQGAHGDAVILGMSSLEQLEQNLAATEEGPLEPAVVDAFNQAWHLVAHECPNYFR

SEQ ID NO: 14331 - protein, 363 aa, Homo sapiens
MAAAAMAAAAGGGAGAARSLSRFRGCLAGALLGDCVGSFYEAHDTVDLTSVLRHVQSLEPDPGTPGSERTEALYYTDDTAMARALVQSLLAKEAFDEVDMAHRFAQEYKKDPDRGYGAGVVTVFKKLLNPKCRDVFEPARAQFNGKGSYGNGGAMRVAGISLAYSSVQDVQKFARLSAQLTHASSLGYNGAILQALAVHLALQGESSSEHFLKQLLGHMEDLEGDAQSVLDARELGMEERPYSSRLKKIGELLDQASVTREEVVSELGNGIAAFESVPTAIYCFLRCMEPDPEIPSAFNSLQRTLIYSISLGGDTDTIATMAGAIAGAYYGMDQVPESWQQSCEGYEETDILAQSLHRVFQKS

SEQ ID NO: 14332 - protein, 434 aa, Homo sapiens
MAEDSGKKKRRKNFEAMFKGILQSGLDNFVINHMLKNNVAGQTSIQTLVPNTDQKSTSVKKDNHKKKTVKMLEYLGKDVLHGVFNYLAKHDVLTLKEEEKKKYYDTKIEDKALILVDSLRKNRVAHQMFTQTLLNMDQKITSVKPLLQIEAGPPESAESTNILKLCPREEFLRLCKKNHDEIYPIKKREDRRRLALIICNTKFDHLPARNGAHYDIVGMKRLLQGLGYTVVDEKNLTARDMESVLRAFAARPEHKSSDSTFLVLMSHGILEGICGTAHKKKKPDVLLYDTIFQIFNNRNCLSLKDKPKVIIVQACRGEKHGELWVRDSPASLALISSQSSENLEADSVCKIHEEKDFIAFCSSTPHNVSWRDRTRGSIFITELITCFQKYSCCCHLMEIFRKVQKSFEVPQAKAQMPTIERATLTRDFYLFPGN

SEQ ID NO: 14333 - protein, 376 aa, Homo sapiens
MAEDNHKKKTVKMLEYLGKDVLHGVFNYLAKHDVLTLKEEEKKKYYDTKIEDKALILVDSLRKNRVAHQMFTQTLLNMDQKITSVKPLLQIEAGPPESAESTNILKLCPREEFLRLCKKNHDEIYPIKKREDRRRLALIICNTKFDHLPARNGAHYDIVGMKRLLQGLGYTVVDEKNLTARDMESVLRAFAARPEHKSSDSTFLVLMSHGILEGICGTAHKKKKPDVLLYDTIFQIFNNRNCLSLKDKPKVIIVQACRGEKHGELWVRDSPASLALISSQSSENLEADSVCKIHEEKDFIAFCSSTPHNVSWRDRTRGSIFITELITCFQKYSCCCHLMEIFRKVQKSFEVPQAKAQMPTIERATLTRDFYLFPGN

SEQ ID NO: 14334 - protein, 292 aa, Homo sapiens
MAALLQIEAGPPESAESTNILKLCPREEFLRLCKKNHDEIYPIKKREDRRRLALIICNTKFDHLPARNGAHYDIVGMKRLLQGLGYTVVDEKNLTARDMESVLRAFAARPEHKSSDSTFLVLMSHGILEGICGTAHKKKKPDVLLYDTIFQIFNNRNCLSLKDKPKVIIVQACRGEKHGELWVRDSPASLALISSQSSENLEADSVCKIHEEKDFIAFCSSTPHNVSWRDRTRGSIFITELITCFQKYSCCCHLMEIFRKVQKSFEVPQAKAQMPTIERATLTRDFYLFPGN

SEQ ID NO: 14335 - protein, 108 aa, Homo sapiens
MAEDNHKKKTVKMLEYLGKDVLHGVFNYLAKHDVLTLKEEEKKKYYDTKIEDKALILVDSLRKNRVAHQMFTQTLLNMDQKITSVKHLSNKKERGPQTPGSHHMQYKV

SEQ ID NO: 14336 - protein, 447 aa, Homo sapiens
MAAVPRVEGVFIFLIEDSGKKKRRKNFEAMFKGILQSGLDNFVINHMLKNNVAGQTSIQTLVPNTDQKSTSVKKDNHKKKTVKMLEYLGKDVLHGVFNYLAKHDVLTLKEEEKKKYYDTKIEDKALILVDSLRKNRVAHQMFTQTLLNMDQKITSVKPLLQIEAGPPESAESTNILKLCPREEFLRLCKKNHDEIYPIKKREDRRRLALIICNTKFDHLPARNGAHYDIVGMKRLLQGLGYTVVDEKNLTARDMESVLRAFAARPEHKSSDSTFLVLMSHGILEGICGTAHKKKKPDVLLYDTIFQIFNNRNCLSLKDKPKVIIVQACRGEKHGELWVRDSPASLALISSQSSENLEADSVCKIHEEKDFIAFCSSTPHNVSWRDRTRGSIFITELITCFQKYSCCCHLMEIFRKVQKSFEVPQAKAQMPTIERATLTRDFYLFPGN

SEQ ID NO: 14337 - protein, 364 aa, Homo sapiens
MLEYLGKDVLHGVFNYLAKHDVLTLKEEEKKKYYDTKIEDKALILVDSLRKNRVAHQMFTQTLLNMDQKITSVKPLLQIEAGPPESAESTNILKLCPREEFLRLCKKNHDEIYPIKKREDRRRLALIICNTKFDHLPARNGAHYDIVGMKRLLQGLGYTVVDEKNLTARDMESVLRAFAARPEHKSSDSTFLVLMSHGILEGICGTAHKKKKPDVLLYDTIFQIFNNRNCLSLKDKPKVIIVQACRGEKHGELWVRDSPASLALISSQSSENLEADSVCKIHEEKDFIAFCSSTPHNVSWRDRTRGSIFITELITCFQKYSCCCHLMEIFRKVQKSFEVPQAKAQMPTIERATLTRDFYLFPGN

SEQ ID NO: 14338 - protein, 715 aa, Homo sapiens
MARELYHEEFARAGKQAGLQVWRIEKLELVPVPQSAHGDFYVGDAYLVLHTAKTSRGFTYHLHFWLGKECSQDESTAAAIFTVQMDDYLGGKPVQNRELQGYESNDFVSYFKGGLKYKAGGVASGLNHVLTNDLTAKRLLHVKGRRVVRATEVPLSWDSFNKGDCFIIDLGTEIYQWCGSSCNKYERLKANQVATGIRYNERKGRSELIVVEEGSEPSELIKVLGEKPELPDGGDDDDIIADISNRKMAKLYMVSDASGSMRVTVVAEENPFSMAMLLSEECFILDHGAAKQIFVWKGKDANPQERKAAMKTAEEFLQQMNYSKNTQIQVLPEGGETPIFKQFFKDWRDKDQSDGFGKVYVTEKVAQIKQIPFDASKLHSSPQMAAQHNMVDDGSGKVEIWRVENNGRIQVDQNSYGEFYGGDCYIILYTYPRGQIIYTWQGANATRDELTTSAFLTVQLDRSLGGQAVQIRVSQGKEPVHLLSLFKDKPLIIYKNGTSKKGGQAPAPPTRLFQVRRNLASITRIVEVDVDANSLNSNDVFVLKLPQNSGYIWVGKGASQEEEKGAEYVASVLKCKTLRIQEGEEPEEFWNSLGGKKDYQTSPLLETQAEDHPPRLYGCSNKTGRFVIEEIPGEFTQDDLAEDDVMLLDAWEQIFIWIGKDANEVEKKESLKSAKMYLETDPSGRDKRTPIVIIKQGHEPPTFTGWFLGWDSSKW

SEQ ID NO: 14339 - protein, 580 aa, Homo sapiens
MARELYHEEFARAGKQAGLQVWRIEKLELVPVPQSAHGDFYVGDAYLVLHTAKTSRGFTYHLHFWLGKECSQDESTAAAIFTVQMDDYLGGKPVQNRELQGYESNDFVSYFKGGLKYKAGGVASGLNHVLTNDLTAKRLLHVKGRRVVRATEVPLSWDSFNKGDCFIIDLGTEIYQWCGSSCNKYERLKANQVATGIRYNERKGRSELIVVEEGSEPSELIKVLGEKPELPDGGDDDDIIADISNRKMAKLYMVSDASGSMRVTVVAEENPFSMAMLLSEECFILDHGAAKQIFVWKGKDANPQERKAAMKTAEEFLQQMNYSKNTQIQVLPEGGETPIFKQFFKDWRDKDQSDGFGKVYVTEKVAQIKQIPFDASKLHSSPQMAAQHNMVDDGSGKVEIWRVENNGRIQVDQNSYGEFYGGDCYIILYTYPRGQIIYTWQGANATRDELTTSAFLTVQLDRSLGGQAVQIRVSQGKEPVHLLSLFKDKPLIIYKNGTSKKGGQAPAPPTRLFQVRRNLASITRIVERSSGIPLEGKKTTRPHHYWKPRLKTIHLGFTAALTKLEDLLLKRFQESSPRMI

SEQ ID NO: 14340 - protein, 468 aa, Homo sapiens
MAKLYMVSDASGSMRVTVVAEENPFSMAMLLSEECFILDHGAAKQIFVWKGKDANPQERKAAMKTAEEFLQQMNYSKNTQIQVLPEGGETPIFKQFFKDWRDKDQSDGFGKVYVTEKVAQIKQIPFDASKLHSSPQMAAQHNMVDDGSGKVEIWRVENNGRIQVDQNSYGEFYGGDCYIILYTYPRGQIIYTWQGANATRDELTTSAFLTVQLDRSLGGQAVQIRVSQGKEPVHLLSLFKDKPLIIYKNGTSKKGGQAPAPPTRLFQVRRNLASITRIVEVDVDANSLNSNDVFVLKLPQNSGYIWVGKGASQEEEKGAEYVASVLKCKTLRIQEGEEPEEFWNSLGGKKDYQTSPLLETQAEDHPPRLYGCSNKTGRFVIEEIPGEFTQDDLAEDDVMLLDAWEQIFIWIGKDANEVEKKESLKSAKMYLETDPSGRDKRTPIVIIKQGHEPPTFTGWFLGWDSSKW

SEQ ID NO: 14341 - protein, 491 aa, Homo sapiens
MASRCWRWWGWSAWPRTRLPPAGSTPSFCHHFSTQEKTPQICVVGSGPAGFYTAQHLLKHPQAHVDIYEKQPVPFGLVRFGVAPDHPEVKNVINTFTQTAHSGRCAFWGNVEVGRDVTVPELREAYHAVVLSYGAEDHRALEIPGEELPGVCSARAFVGWYNGLPENQELEPDLSCDTAVILGQGNVALDVARILLTPPEHLERTDITKAALGVLRQSRVKTVWLVGRRGPLQVAFTIKELREMIQLPGARPILDPVDFLGLQDKIKEVPRPRKRLTELLLRTATEKPGPAEAARQASASRAWGLRFFRSPQQVLPSPDGRRAAGVRLAVTRLEGVDEATRAVPTGDMEDLPCGLVLSSIGYKSRPVDPSVPFDSKLGVIPNVEGRVMDVPGLYCSGWVKRGPTGVIATTMTDSFLTGQMLLQDLKAGLLPSGPRPGYAAIQALLSSRGVRPVSFSDWEKLDAEEVARGQGTGKPREKLVDPQEMLRLLGH

SEQ ID NO: 14342 - protein, 497 aa, Homo sapiens
MASRCWRWWGWSAWPRTRLPPAGSTPSFCHHFSTQEKTPQICVVGSGPAGFYTAQHLLKHPQAHVDIYEKQPVPFGLVRFGVAPDHPEVKNVINTFTQTAHSGRCAFWGNVEVGRDVTVPELREAYHAVVLSYGAEDHRALEIPGEELPGVCSARAFVGWYNGLPENQELEPDLSCDTAVILGQGNVALDVARILLTPPEHLEALLLCQRTDITKAALGVLRQSRVKTVWLVGRRGPLQVAFTIKELREMIQLPGARPILDPVDFLGLQDKIKEVPRPRKRLTELLLRTATEKPGPAEAARQASASRAWGLRFFRSPQQVLPSPDGRRAAGVRLAVTRLEGVDEATRAVPTGDMEDLPCGLVLSSIGYKSRPVDPSVPFDSKLGVIPNVEGRVMDVPGLYCSGWVKRGPTGVIATTMTDSFLTGQMLLQDLKAGLLPSGPRPGYAAIQALLSSRGVRPVSFSDWEKLDAEEVARGQGTGKPREKLVDPQEMLRLLGH

SEQ ID NO: 14343 - protein, 534 aa, Homo sapiens
MASRCWRWWGWSAWPRTRLPPAGSTPSFCHHFSTQEKTPQICVVGSGPAGFYTAQHLLKRVEALCSQPRVLNSPALSGEGEDLGASQPLSLDPTSCHPVPQQHPQAHVDIYEKQPVPFGLVRFGVAPDHPEVKNVINTFTQTAHSGRCAFWGNVEVGRDVTVPELREAYHAVVLSYGAEDHRALEIPGEELPGVCSARAFVGWYNGLPENQELEPDLSCDTAVILGQGNVALDVARILLTPPEHLERTDITKAALGVLRQSRVKTVWLVGRRGPLQVAFTIKELREMIQLPGARPILDPVDFLGLQDKIKEVPRPRKRLTELLLRTATEKPGPAEAARQASASRAWGLRFFRSPQQVLPSPDGRRAAGVRLAVTRLEGVDEATRAVPTGDMEDLPCGLVLSSIGYKSRPVDPSVPFDSKLGVIPNVEGRVMDVPGLYCSGWVKRGPTGVIATTMTDSFLTGQMLLQDLKAGLLPSGPRPGYAAIQALLSSRGVRPVSFSDWEKLDAEEVARGQGTGKPREKLVDPQEMLRLLGH

SEQ ID NO: 14344 - protein, 439 aa, Homo sapiens
MEDKDREHPQAHVDIYEKQPVPFGLVRFGVAPDHPEVKNVINTFTQTAHSGRCAFWGNVEVGRDVTVPELREAYHAVVLSYGAEDHRALEIPGEELPGVCSARAFVGWYNGLPENQELEPDLSCDTAVILGQGNVALDVARILLTPPEHLERTDITKAALGVLRQSRVKTVWLVGRRGPLQVAFTIKELREMIQLPGARPILDPVDFLGLQDKIKEVPRPRKRLTELLLRTATEKPGPAEAARQASASRAWGLRFFRSPQQVLPSPDGRRAAGVRLAVTRLEGVDEATRAVPTGDMEDLPCGLVLSSIGYKSRPVDPSVPFDSKLGVIPNVEGRVMDVPGLYCSGWVKRGPTGVIATTMTDSFLTGQMLLQDLKAGLLPSGPRPGYAAIQALLSSRGVRPVSFSDWEKLDAEEVARGQGTGKPREKLVDPQEMLRLLGH

SEQ ID NO: 14345 - protein, 483 aa, Homo sapiens
MASRCWRWWGWSAWPRTRLPPAGSTPSFCHHFSTQEKTPQICVVGSGPAGFYTAQHLLKHPQAHVDIYEKQPVPFGLVRFGVAPDHPEVKTAHSGRCAFWGNVEVGRDVTVPELREAYHAVVLSYGAEDHRALEIPGEELPGVCSARAFVGWYNGLPENQELEPDLSCDTAVILGQGNVALDVARILLTPPEHLERTDITKAALGVLRQSRVKTVWLVGRRGPLQVAFTIKELREMIQLPGARPILDPVDFLGLQDKIKEVPRPRKRLTELLLRTATEKPGPAEAARQASASRAWGLRFFRSPQQVLPSPDGRRAAGVRLAVTRLEGVDEATRAVPTGDMEDLPCGLVLSSIGYKSRPVDPSVPFDSKLGVIPNVEGRVMDVPGLYCSGWVKRGPTGVIATTMTDSFLTGQMLLQDLKAGLLPSGPRPGYAAIQALLSSRGVRPVSFSDWEKLDAEEVARGQGTGKPREKLVDPQEMLRLLGH

SEQ ID NO: 14346 - protein, 451 aa, Homo sapiens
MASRCWRWWGWSAWPRTRLPPAGSTPSFCHHFSTQEKTPQICVVGSGPAGFYTAQHLLKQHPQAHVDIYEKQPVPFGLVRFGVAPDHPEVKSYGAEDHRALEIPGEELPGVCSARAFVGWYNGLPENQELEPDLSCDTAVILGQGNVALDVARILLTPPEHLERTDITKAALGVLRQSRVKTVWLVGRRGPLQVAFTIKELREMIQLPGARPILDPVDFLGLQDKIKEVPRPRKRLTELLLRTATEKPGPAEAARQASASRAWGLRFFRSPQQVLPSPDGRRAAGVRLAVTRLEGVDEATRAVPTGDMEDLPCGLVLSSIGYKSRPVDPSVPFDSKLGVIPNVEGRVMDVPGLYCSGWVKRGPTGVIATTMTDSFLTGQMLLQDLKAGLLPSGPRPGYAAIQALLSSRGVRPVSFSDWEKLDAEEVARGQGTGKPREKLVDPQEMLRLLGH

SEQ ID NO: 14347 - protein, 522 aa, Homo sapiens
MASRCWRWWGWSAWPRTRLPPAGSTPTFGGSDEVRDPANAKALRNKRRRMQVRVKLGKFQLLLDIQEKTPQICVVGSGPAGFYTAQHLLKHPQAHVDIYEKQPVPFGLVRFGVAPDHPEVKNVINTFTQTAHSGRCAFWGNVEVGRDVTVPELREAYHAVVLSYGAEDHRALEIPGEELPGVCSARAFVGWYNGLPENQELEPDLSCDTAVILGQGNVALDVARILLTPPEHLERTDITKAALGVLRQSRVKTVWLVGRRGPLQVAFTIKELREMIQLPGARPILDPVDFLGLQDKIKEVPRPRKRLTELLLRTATEKPGPAEAARQASASRAWGLRFFRSPQQVLPSPDGRRAAGVRLAVTRLEGVDEATRAVPTGDMEDLPCGLVLSSIGYKSRPVDPSVPFDSKLGVIPNVEGRVMDVPGLYCSGWVKRGPTGVIATTMTDSFLTGQMLLQDLKAGLLPSGPRPGYAAIQALLSSRGVRPVSFSDWEKLDAEEVARGQGTGKPREKLVDPQEMLRLLGH

SEQ ID NO: 14348 - protein, 406 aa, Homo sapiens
MASPRTRKVLKEVRVQDENNVCFECGAFNPQWVSVTYGIWICLECSGRHRGLGVHLSFVRSVTMDKWKDIELEKMKAGGNAKFREFLESQEDYDPCWSLQEKYNSRAAALFRDKVVALAEGREWSLESSPAQNWTPPQPRTLPSMVHRVSGQPQSVTASSDKAFEDWLNDDLGSYQGAQGNRYVGFGNTPPPQKKEDDFLNNAMSSLYSGWSSFTTGASRFASAAKEGATKFGSQASQKASELGHSLNENVLKPAQEKVKEGKIFDDVSSGVSQLASKVQGVGSKGWRDVTTFFSGKAEGPLDSPSEGHSYQNSGLDHFQNSNIDQSFWETFGSAEPTKTRKSPSSDSWTCADTSTERRSSDSWEVWGSASTNRNSNSDGGEGGEGTKKAVPPAVPTDDGWDNQNW

SEQ ID NO: 14349 - protein, 414 aa, Homo sapiens
MASPRTRKVLKEVRVQDENNVCFECGAFNPQWVSVTYGIWICLECSGRHRGLGVHLSFVRSVTMDKWKDIELEKMKAGGNAKFREFLESQEDYDPCWSLQEKYNSRAAALFRDKVVALAEGREWSLESSPAQNWTPPQPRTLPSMVHRVSGQPQSVTASSDKAFEDWLNDDLGSYQGAQGNRYVGFGNTPPPQKKEDDFLNNAMSSLYSGWSSFTTGASRFASAAKEGATKFGSQASQKFWGHKQQPEPASELGHSLNENVLKPAQEKVKEGKIFDDVSSGVSQLASKGVGSKGWRDVTTFFSGKAEGPLDSPSEGHSYQNSGLDHFQNSNIDQSFWETFGSAEPTKTRKSPSSDSWTCADTSTERRSSDSWEVWGSASTNRNSNSDGGEGGEGTKKAVPPAVPTDDGWDNQNW

SEQ ID NO: 14350 - protein, 403 aa, Homo sapiens
MASPRTRKVLKEVRVQDENNVCFECGAFNPQWVSVTYGIWICLECSGRHRGLGVHLSFVRSVTMDKWKDIELEKMKAGGNAKFREFLESQEDYDPCWSLQEKYNSRAAALFRDKVVALAEGREWSLESSPAQNWTPPQPRTLPSMVHRVSGQPQSVTASSDKAFEDWLNDDLGSYQGAQGNRYVGFGNTPPPQKKEDDFLNNAMSSLYSGWSSFTTGASRFASAAKEGATKFGSQASQKASELGHSLNENVLKPAQEKVKEGKIFDDVSSGVSQLASKCQRRLCCHQSHCSAGHLGRAFCPVSWHEALCGQTGREEQASLLPPKHVVGALEVCARGCPRCHVPHTPGTAAEWPGRLCLSRESVVRDGGTSPPFFRGKQRAPWTAPRRATVIRTAVWTTSKTAT

SEQ ID NO: 14351 - protein, 293 aa, Homo sapiens
MLSSESSWSLRRITILAGPCRRSTTAEPRPSLGIRVSGQPQSVTASSDKAFEDWLNDDLGSYQGAQGNRYVGFGNTPPPQKKEDDFLNNAMSSLYSGWSSFTTGASRFASAAKEGATKFGSQASQKASELGHSLNENVLKPAQEKVKEGKIFDDVSSGVSQLASKVQGVGSKGWRDVTTFFSGKAEGPLDSPSEGHSYQNSGLDHFQNSNIDQSFWETFGSAEPTKTRKSPSSDSWTCADTSTERRSSDSWEVWGSASTNRNSNSDGGEGGEGTKKAVPPAVPTDDGWDNQNW

SEQ ID NO: 14352 - protein, 361 aa, Homo sapiens
MRTTFVRSVTMDKWKDIELEKMKAGGNAKFREFLESQEDYDPCWSLQEKYNSRAAALFRDKVVALAEGREWSLESSPAQNWTPPQPRTLPSMVHRVSGQPQSVTASSDKAFEDWLNDDLGSYQGAQGNRYVGFGNTPPPQKKEDDFLNNAMSSLYSGWSSFTTGASRFASAAKEGATKFGSQASQKFWGHKQQPEPASELGHSLNENVLKPAQEKVKEGKIFDDVSSGVSQLASKGVGSKGWRDVTTFFSGKAEGPLDSPSEGHSYQNSGLDHFQNSNIDQSFWETFGSAEPTKTRKSPSSDSWTCADTSTERRSSDSWEVWGSASTNRNSNSDGGEGGEGTKKAVPPAVPTDDGWDNQNW

SEQ ID NO: 14353 - protein, 1078 aa, Homo sapiens
MAFYSCCWVLLALTWHTSAYGPDQRAQKKGDIILGGLFPIHFGVAAKDQDLKSRPESVECIRYNFRGFRWLQAMIFAIEEINSSPALLPNLTLGYRIFDTCNTVSKALEATLSFVAQNKIDSLNLDEFCNCSEHIPSTIAVVGATGSGVSTAVANLLGLFYIPQVSYASSSRLLSNKNQFKSFLRTIPNDEHQATAMADIIEYFRWNWVGTIAADDDYGRPGIEKFREEAEERDICIDFSELISQYSDEEEIQHVVEVIQNSTAKVIVVFSSGPDLEPLIKEIVRRNITGKIWLASEAWASSSLIAMPQYFHVVGGTIGFALKAGQIPGFREFLKKVHPRKSVHNGFAKEFWEETFNCHLQEGAKGPLPVDTFLRGHEESGDRFSNSSTAFRPLCTGDENISSVETPYIDYTHLRISYNVYLAVYSIAHALQDIYTCLPGRGLFTNGSCADIKKVEAWQVLKHLRHLNFTNNMGEQVTFDECGDLVGNYSIINWHLSPEDGSIVFKEVGYYNVYAKKGERLFINEEKILWSGFSREVPFSNCSRDCLAGTRKGIIEGEPTCCFECVECPDGEYSDETDASACNKCPDDFWSNENHTSCIAKEIEFLSWTEPFGIALTLFAVLGIFLTAFVLGVFIKFRNTPIVKATNRELSYLLLFSLLCCFSSSLFFIGEPQDWTCRLRQPAFGISFVLCISCILVKTNRVLLVFEAKIPTSFHRKWWGLNLQFLLVFLCTFMQIVICVIWLYTAPPSSYRNQELEDEIIFITCHEGSLMALGFLIGYTCLLAAICFFFAFKSRKLPENFNEAKFITFSMLIFFIVWISFIPAYASTYGKFVSAVEVIAILAASFGLLACIFFNKIYIILFKPSRNTIEEVRCSTAAHAFKVAARATLRRSNVSRKRSSSLGGSTGSTPSSSISSKSNSEDPFPQPERQKQQQPLALTQQEQQQQPLTLPQQQRSQQQPRCKQKVIFGSGTVTFSLSFDEPQKNAMAHRNSTHQNSLEAQKSSDTLTRHEPLLPLQCGETDLDLTVQETGLQGPVGGDQRPEVEDPEELSPALVVSSSQSFVISGGGSTVTENVVNS

SEQ ID NO: 14354 - protein, 1088 aa, Homo sapiens
MAFYSCCWVLLALTWHTSAYGPDQRAQKKGDIILGGLFPIHFGVAAKDQDLKSRPESVECIRYNFRGFRWLQAMIFAIEEINSSPALLPNLTLGYRIFDTCNTVSKALEATLSFVAQNKIDSLNLDEFCNCSEHIPSTIAVVGATGSGVSTAVANLLGLFYIPQVSYASSSRLLSNKNQFKSFLRTIPNDEHQATAMADIIEYFRWNWVGTIAADDDYGRPGIEKFREEAEERDICIDFSELISQYSDEEEIQHVVEVIQNSTAKVIVVFSSGPDLEPLIKEIVRRNITGKIWLASEAWASSSLIAMPQYFHVVGGTIGFALKAGQIPGFREFLKKVHPRKSVHNGFAKEFWEETFNCHLQEGAKGPLPVDTFLRGHEESGDRFSNSSTAFRPLCTGDENISSVETPYIDYTHLRISYNVYLAVYSIAHALQDIYTCLPGRGLFTNGSCADIKKVEAWQVLKHLRHLNFTNNMGEQVTFDECGDLVGNYSIINWHLSPEDGSIVFKEVGYYNVYAKKGERLFINEEKILWSGFSREPLTFVLSVLQVPFSNCSRDCLAGTRKGIIEGEPTCCFECVECPDGEYSDETDASACNKCPDDFWSNENHTSCIAKEIEFLSWTEPFGIALTLFAVLGIFLTAFVLGVFIKFRNTPIVKATNRELSYLLLFSLLCCFSSSLFFIGEPQDWTCRLRQPAFGISFVLCISCILVKTNRVLLVFEAKIPTSFHRKWWGLNLQFLLVFLCTFMQIVICVIWLYTAPPSSYRNQELEDEIIFITCHEGSLMALGFLIGYTCLLAAICFFFAFKSRKLPENFNEAKFITFSMLIFFIVWISFIPAYASTYGKFVSAVEVIAILAASFGLLACIFFNKIYIILFKPSRNTIEEVRCSTAAHAFKVAARATLRRSNVSRKRSSSLGGSTGSTPSSSISSKSNSEDPFPQPERQKQQQPLALTQQEQQQQPLTLPQQQRSQQQPRCKQKVIFGSGTVTFSLSFDEPQKNAMAHRNSTHQNSLEAQKSSDTLTRHEPLLPLQCGETDLDLTVQETGLQGPVGGDQRPEVEDPEELSPALVVSSSQSFVISGGGSTVTENVVNS

SEQ ID NO: 14355 - protein, 786 aa, Homo sapiens
MKGTGIMDCAPKALLARALYDNCPDCSDELAFSRGDILTILEQHVPESEGWWKCLLHGRQGLAPANRLQILTEVAADRPCPPFLRGLEEAPASSEETYQVPTLPRPPTPGPVYEQMRSWAEGPQPPTAQVYEFPDPPTSARIICEKTLSFPKQAILTLPRPVRASLPTLPSQVYDVPTQHRGPVVLKEPEKQQLYDIPASPKKAGLHPPDSQASGQGVPLISVTTLRRGGYSTLPNPQKSEWIYDTPVSPGKASVRNTPLTSFAEESRPHALPSSSSTFYNPPSGRSRSLTPQLNNNVPMQKKLSLPEIPSYGFLVPRGTFPLDEDVSYKVPSSFLIPRVEQQNTKPNIYDIPKATSSVSQAGKELEKAKEVSENSAGHNSSWFSRRTTSPSPEPDRLSGSSSDSRASIVSSCSTTSTDDSSSSSSEESAKELSLDLDVAKETVMALQHKVVSSVAGLMLFVSRKWRFRDYLEANIDAIHRSTDHIEESVREFLDFARGVHGTACNLTDSNLQNRIRDQMQTISNSYRILLETKESLDNRNWPLEVLVTDSVQNSPDDLERFVMVARMLPEDIKRFASIVIANGRLLFKRNCEKEETVQLTPNAEFKCEKYIQPPQRETESHQKSTPSTKQREDEHSSELLKKNRANICGQNPGPLIPQPSSQQTPERKPRLSEHCRLYFGALFKAISAFHGSLSSSQPAEIITQSKLVIMVGQKLVDTLCMETQERDVRNEILRGSSHLCSLLKDVALATKNAVLTYPSPAALGHLQAEAEKLEQHTRQFRGTLG

SEQ ID NO: 14356 - protein, 672 aa, Homo sapiens
MKGTGIMDCAPKALLARALYDNCPDCSDELAFSRGDILTILEQHVPESEGWWKCLLHGRQGLAPANRLQILTEVAADRPCPPFLRGLEEAPASSEETYQVPTLPRPPTPGPVYEQMRSWAEGPQPPTAQVYEFPDPPTSARIICEKTLSFPKQAILTLPRPVRASLPTLPSQVYDVPTQHRGPVVLKEPEKQQLYDIPASPKKAGLHPPDSQASGQGVPLISVTTLRRGGYSTLPNPQKSEWIYDTPVSPGKASVRNTPLTSFAEESRPHALPSSSSTFYNPPSGRSRSLTPQLNNNVPMQKKLSLPEIPSYGFLVPRGTFPLDEDVSYKVPSSFLIPRVEQQNTKPNIYDIPKATSSVSQAGKELEKAKEVSENSAGHNSSWFSRRTTSPSPEPDRLSGSSSDSRASIVSSCSTTSTDDSSSSSSEESAKELSLDLDVAKETVMALQHKVVSSVAGLMLFVSRKWRFRDYLEANIDAIHRSTDHIEESVREFLDFARGVHGTACNLTDSNLQNRIRDQMQTISNSYRILLETKESLDNRNWPLEVLVTDSVQNSPDDLERFVMVARMLPEDIKRFASIVIANGRLLFKRNCEKEETVQLTPNAEFKCEKYIQPPQRETESHQKSTPSTKQREDEHSSELLKKNRANICGQVSSEFQVIEKGASIVTWSSGY

SEQ ID NO: 14357 - protein, 349 aa, Homo sapiens
MKGTGIMDCAPKALLARALYDNCPDCSDELAFSRGDILTILEQHVPESEGWWKCLLHGRQGLAPANRLQILTEVAADRPCPPFLRGLEEAPASSEETYQVPTLPRPPTPGPVYEQMRSWAEGPQPPTAQVYEFPDPPTSARIICEKTLSFPKQAILTLPRPVRASLPTLPSQVYDVPTQHRGPVVLKEPEKQQLYDIPASPKKAGLHPPDSQASNPGPLIPQPSSQQTPERKPRLSEHCRLYFGALFKAISAFHGSLSSSQPAEIITQSKLVIMVGQKLVDTLCMETQERDVRNEILRGSSHLCSLLKDVALATKNAVLTYPSPAALGHLQAEAEKLEQHTRQFRGTLG

SEQ ID NO: 14358 - protein, 841 aa, Homo sapiens
MSAQSLPAATPPTQKPPRIIRPRPPSRSRAAQSPGPPHNGSSPQELPRNSNDAPTPMCTPIFWEPPAASLKPPALLPPSASRASLDSQTSPDSPSSTPTPSPVSRRSASPEPAPRSPVPPPKPSGSPCTPLLPMAGVLAQNGSASAPGTVRRLAGRFEGGAEGRAQDADAPEPGLQARADVNGEREAPLTGSGSQENGAPDAGLACPPCCPCVCHTTRPGLELRWVPVGGYEEVPRVPRRASPLRTSRSRPHPPSIGHPAVVLTSYRSTAERKLLPLLKPPKPTRVRQDATIFGDPPQPDLDLLSEDGIQTGDSPDEAPQNTPPATVEGREEEGLEVLKEQNWELPLQDEPLYQTYRAAVLSEELWGVGEDGSPSPANAGDAPTFPRPPGPRNTLWQELPAVQASGLLDTLSPQERRMQESLFEVVTSEASYLRSLRLLTDTFVLSQALRDTLTPRDHHTLFSNVQRVQGVSERFLATLLSRVRSSPHISDLCDVVHAHAVGPFSVYVDYVRNQQYQEETYSRLMDTNVRFSAELRRLQSLPKCERLPLPSFLLLPFQRITRLRMLLQNILRQTEEGSSRQENAQKALGAVSKIIERCSAEVGRMKQTEELIRLTQRLRFHKVKALPLVSWSRRLEFQGELTELGCRRGGVLFASRPRFTPLCLLLFSDLLLITQPKSGQRLQVLDYAHRSLVQAQQVPDPSGPPTFRLSLLSNHQGRPTHRLLQASSLSDMQRWLGAFPTPGPLPCSPDTIYEDCDCSQELCSESSAPAKTEGRSLESRAAPKHLHKTPEGWLKGLPGAFPAQLVCEVTGEHERRRHLRQNQRLLEAVGSSSGTPNAPPP

SEQ ID NO: 14359 - protein, 163 aa, Homo sapiens
MSCRGRGAGGRWNSTSWSTGCKLPASPRRVSRCSPTGLIKLAFLFSKTRCKFFSLTETPEDYTIIVDEEGFLELPSSEHLSVADATWLALNVVSGGGSFSSSQPIGMTKIAKSVIAPLADQNISVFMLSTYQTDFILVLKRDLPFVTHTLSSEFTILWSVARL

SEQ ID NO: 14360 - protein, 1361 aa, Homo sapiens
MGDDQEDDFPRRLSESMEDLSLDLGALQGSEYLQDLGLGAPSHSQPGETPDSRPTGEEPGRDSLFSSLAGSQDLSRRRSWERSRSCSESWRRLSLDASAVDEEPCLPRTLASLALNLPGGGLKTWTQGCLSGGGTPAESPGKECDSPKKRGRSRSVPVSFYEIRSPEISPGLEVPTPPVQGLEPPVLECMEKDHVEPDHVLIVQQVLQELRQYHGARQRACMSASPGGAHSNLTWFEFLSESEDGAGKNEKSDKSTSVKRRLSCLRSRVTRQKEKGKSPAHLKDKGQDARERRECVNGHQLLQGTFSGPSSCPLCGKPFLSSASLKEHPRGTLLSDGSPALSRNVGMTVSQKGGPQPTPSPAGPGTQLGPITGEMDEADSAFLKFKQTADDSLSLTSPNTESIFVEDPYTASLRSEIESDGHEFEAESWSLAVDAAYAKKQKREVVKRQDVLYELMQTEVHHVRTLKIMLKVYSRALQEELQFSSKAIGRLFPCADDLLETHSHFLARLKERRQESLEEGSDRNYVIQKIGDLLVQQFSGENGERMKEKYGVFCSGHNEAVSHYKLLLQQNKKFQNLIKKIGNFSIVRRLGVQECILLVTQRITKYPVLVERIIQNTEAGTEDYEDLTQALNLIKDIISQVDAKVSECEKGQRLREIAGKMDLKSSSKLKNGLTFRKEDMLQRQLHLEGMLCWKTTSGRLKDILAILLTDVLLLLQEKDQKYVFASVDSKPPVISLQKLIVREVANEEKAMFLISASLQGPEMYEIYTSSKEDRNAWMAHIQRAVESCPDEEEGPFSLPEEERKVVEARATRLRDFQERLSMKDQLIAQSLLEKQQIYLEMAEMGGLEDLPQPRGLFRGGDPSETLQGELILKSAMSEIEGIQSLICRQLGSANGQAEDGGSSTGPPRRAETFAGYDCTNSPTKNGSFKKKVSSTDPRPRDWRGPPNSPDLKLSDSDIPGSSEESPQVVEAPGTESDPRLPTVLESELVQRIQTLSQLLLNLQAVIAHQDSYVETQRAAIQEREKQFRLQSTRGNLLLEQERQRNFEKQREERAALEKLQSQLRHEQQRWERERQWQHQELERAGARLQEREGEARQLRERLEQERAELERQRQAYQHDLERLREAQRAVERERERLELLRRLKKQNTAPGALPPDTLAEAQPPSHPPSFNGEGLEGPRVSMLPSGVGPEYAERPEVARRDSAPTENRLAKSDVPIQLLSATNQFQRQAAVQQQIPTKLAASTKGGKDKGGKSRGSQRWESSASFDLKQQLLLNKLMGKDESTSRNRRSLSPILPGRHSPAPPPDPGFPAPSPPPADSPSEGFSLKAGGTALLPGPPAPSPLPATPLSAKEDASKEDVIFF

SEQ ID NO: 14361 - protein, 1361 aa, Homo sapiens
MTTVAEDDFPRRLSESMEDLSLDLGALQGSEYLQDLGLGAPSHSQPGETPDSRPTGEEPGRDSLFSSLAGSQDLSRRRSWERSRSCSESWRRLSLDASAVDEEPCLPRTLASLALNLPGGGLKTWTQGCLSGGGTPAESPGKECDSPKKRGRSRSVPVSFYEIRSPEISPGLEVPTPPVQGLEPPVLECMEKDHVEPDHVLIVQQVLQELRQYHGARQRACMSASPGGAHSNLTWFEFLSESEDGAGKNEKSDKSTSVKRRLSCLRSRVTRQKEKGKSPAHLKDKGQDARERRECVNGHQLLQGTFSGPSSCPLCGKPFLSSASLKEHPRGTLLSDGSPALSRNVGMTVSQKGGPQPTPSPAGPGTQLGPITGEMDEADSAFLKFKQTADDSLSLTSPNTESIFVEDPYTASLRSEIESDGHEFEAESWSLAVDAAYAKKQKREVVKRQDVLYELMQTEVHHVRTLKIMLKVYSRALQEELQFSSKAIGRLFPCADDLLETHSHFLARLKERRQESLEEGSDRNYVIQKIGDLLVQQFSGENGERMKEKYGVFCSGHNEAVSHYKLLLQQNKKFQNLIKKIGNFSIVRRLGVQECILLVTQRITKYPVLVERIIQNTEAGTEDYEDLTQALNLIKDIISQVDAKVSECEKGQRLREIAGKMDLKSSSKLKNGLTFRKEDMLQRQLHLEGMLCWKTTSGRLKDILAILLTDVLLLLQEKDQKYVFASVDSKPPVISLQKLIVREVANEEKAMFLISASLQGPEMYEIYTSSKEDRNAWMAHIQRAVESCPDEEEGPFSLPEEERKVVEARATRLRDFQERLSMKDQLIAQSLLEKQQIYLEMAEMGGLEDLPQPRGLFRGGDPSETLQGELILKSAMSEIEGIQSLICRQLGSANGQAEDGGSSTGPPRRAETFAGYDCTNSPTKNGSFKKKVSSTDPRPRDWRGPPNSPDLKLSDSDIPGSSEESPQVVEAPGTESDPRLPTVLESELVQRIQTLSQLLLNLQAVIAHQDSYVETQRAAIQEREKQFRLQSTRGNLLLEQERQRNFEKQREERAALEKLQSQLRHEQQRWERERQWQHQELERAGARLQEREGEARQLRERLEQERAELERQRQAYQHDLERLREAQRAVERERERLELLRRLKKQNTAPGALPPDTLAEAQPPSHPPSFNGEGLEGPRVSMLPSGVGPEYAERPEVARRDSAPTENRLAKSDVPIQLLSATNQFQRQAAVQQQIPTKLAASTKGGKDKGGKSRGSQRWESSASFDLKQQLLLNKLMGKDESTSRNRRSLSPILPGRHSPAPPPDPGFPAPSPPPADSPSEGFSLKAGGTALLPGPPAPSPLPATPLSAKEDASKEDVIFF

SEQ ID NO: 14362 - protein, 1345 aa, Homo sapiens
MEDLSLDLGALQGSEYLQDLGLGAPSHSQPGETPDSRPTGEEPGRDSLFSSLAGSQDLSRRRSWERSRSCSESWRRLSLDASAVDEEPCLPRTLASLALNLPGGGLKTWTQGCLSGGGTPAESPGKECDSPKKRGRSRSVPVSFYEIRSPEISPGLEVPTPPVQGLEPPVLECMEKDHVEPDHVLIVQQVLQELRQYHGARQRACMSASPGGAHSNLTWFEFLSESEDGAGKNEKSDKSTSVKRRLSCLRSRVTRQKEKGKSPAHLKDKGQDARERRECVNGHQLLQGTFSGPSSCPLCGKPFLSSASLKEHPRGTLLSDGSPALSRNVGMTVSQKGGPQPTPSPAGPGTQLGPITGEMDEADSAFLKFKQTADDSLSLTSPNTESIFVEDPYTASLRSEIESDGHEFEAESWSLAVDAAYAKKQKREVVKRQDVLYELMQTEVHHVRTLKIMLKVYSRALQEELQFSSKAIGRLFPCADDLLETHSHFLARLKERRQESLEEGSDRNYVIQKIGDLLVQQFSGENGERMKEKYGVFCSGHNEAVSHYKLLLQQNKKFQNLIKKIGNFSIVRRLGVQECILLVTQRITKYPVLVERIIQNTEAGTEDYEDLTQALNLIKDIISQVDAKVSECEKGQRLREIAGKMDLKSSSKLKNGLTFRKEDMLQRQLHLEGMLCWKTTSGRLKDILAILLTDVLLLLQEKDQKYVFASVDSKPPVISLQKLIVREVANEEKAMFLISASLQGPEMYEIYTSSKEDRNAWMAHIQRAVESCPDEEEGPFSLPEEERKVVEARATRLRDFQERLSMKDQLIAQSLLEKQQIYLEMAEMGGLEDLPQPRGLFRGGDPSETLQGELILKSAMSEIEGIQSLICRQLGSANGQAEDGGSSTGPPRRAETFAGYDCTNSPTKNGSFKKKVSSTDPRPRDWRGPPNSPDLKLSDSDIPGSSEESPQVVEAPGTESDPRLPTVLESELVQRIQTLSQLLLNLQAVIAHQDSYVETQRAAIQEREKQFRLQSTRGNLLLEQERQRNFEKQREERAALEKLQSQLRHEQQRWERERQWQHQELERAGARLQEREGEARQLRERLEQERAELERQRQAYQHDLERLREAQRAVERERERLELLRRLKKQNTAPGALPPDTLAEAQPPSHPPSFNGEGLEGPRVSMLPSGVGPEYAERPEVARRDSAPTENRLAKSDVPIQLLSATNQFQRQAAVQQQIPTKLAASTKGGKDKGGKSRGSQRWESSASFDLKQQLLLNKLMGKDESTSRNRRSLSPILPGRHSPAPPPDPGFPAPSPPPADSPSEGFSLKAGGTALLPGPPAPSPLPATPLSAKEDASKEDVIFF

SEQ ID NO: 14363 - protein, 1015 aa, Homo sapiens
MTVSQKGGPQPTPSPAGPGTQLGPITGEMDEADSAFLKFKQTADDSLSLTSPNTESIFVEDPYTASLRSEIESDGHEFEAESWSLAVDAAYAKKQKREVVKRQDVLYELMQTEVHHVRTLKIMLKVYSRALQEELQFSSKAIGRLFPCADDLLETHSHFLARLKERRQESLEEGSDRNYVIQKIGDLLVQQFSGENGERMKEKYGVFCSGHNEAVSHYKLLLQQNKKFQNLIKKIGNFSIVRRLGVQECILLVTQRITKYPVLVERIIQNTEAGTEDYEDLTQALNLIKDIISQVDAKVSECEKGQRLREIAGKMDLKSSSKLKNGLTFRKEDMLQRQLHLEGMLCWKTTSGRLKDILAILLTDVLLLLQEKDQKYVFASVDSKPPVISLQKLIVREVANEEKAMFLISASLQGPEMYEIYTSSKEDRNAWMAHIQRAVESCPDEEEGPFSLPEEERKVVEARATRLRDFQERLSMKDQLIAQSLLEKQQIYLEMAEMGGLEDLPQPRGLFRGGDPSETLQGELILKSAMSEIEGIQSLICRQLGSANGQAEDGGSSTGPPRRAETFAGYDCTNSPTKNGSFKKKVSSTDPRPRDWRGPPNSPDLKLSDSDIPGSSEESPQVVEAPGTESDPRLPTVLESELVQRIQTLSQLLLNLQAVIAHQDSYVETQRAAIQEREKQFRLQSTRGNLLLEQERQRNFEKQREERAALEKLQSQLRHEQQRWERERQWQHQELERAGARLQEREGEARQLRERLEQERAELERQRQAYQHDLERLREAQRAVERERERLELLRRLKKQNTAPGALPPDTLAEAQPPSHPPSFNGEGLEGPRVSMLPSGVGPEYAERPEVARRDSAPTENRLAKSDVPIQLLSATNQFQRQAAVQQQIPTKLAASTKGGKDKGGKSRGSQRWESSASFDLKQQLLLNKLMGKDESTSRNRRSLSPILPGRHSPAPPPDPGFPAPSPPPADSPSEGFSLKAGGTALLPGPPAPSPLPATPLSAKEDASKEDVIFF

SEQ ID NO: 14364 - protein, 1173 aa, Homo sapiens
MVTVGTNILPSRPAASANTAREDAALFSRRIPPRHKNGAAQPGAAPGPGAPGANMGNAHSKSGDRHSALPGRPELSFYGSFPRKWSENVFLDNELLTSKILSMLRPQSERGFRAGDLRYPTHFLSTNSVLASVTASLKEHPRGTLLSDGSPALSRNVGMTVSQKGGPQPTPSPAGPGTQLGPITGEMDEADSAFLKFKQTADDSLSLTSPNTESIFVEDPYTASLRSEIESDGHEFEAESWSLAVDAAYAKKQKREVVKRQDVLYELMQTEVHHVRTLKIMLKVYSRALQEELQFSSKAIGRLFPCADDLLETHSHFLARLKERRQESLEEGSDRNYVIQKIGDLLVQQFSGENGERMKEKYGVFCSGHNEAVSHYKLLLQQNKKFQNLIKKIGNFSIVRRLGVQECILLVTQRITKYPVLVERIIQNTEAGTEDYEDLTQALNLIKDIISQVDAKVSECEKGQRLREIAGKMDLKSSSKLKNGLTFRKEDMLQRQLHLEGMLCWKTTSGRLKDILAILLTDVLLLLQEKDQKYVFASVDSKPPVISLQKLIVREVANEEKAMFLISASLQGPEMYEIYTSSKEDRNAWMAHIQRAVESCPDEEEGPFSLPEEERKVVEARATRLRDFQERLSMKDQLIAQSLLEKQQIYLEMAEMGGLEDLPQPRGLFRGGDPSETLQGELILKSAMSEIEGIQSLICRQLGSANGQAEDGGSSTGPPRRAETFAGYDCTNSPTKNGSFKKKVSSTDPRPRDWRGPPNSPDLKLSDSDIPGSSEESPQVVEAPGTESDPRLPTVLESELVQRIQTLSQLLLNLQAVIAHQDSYVETQRAAIQEREKQFRLQSTRGNLLLEQERQRNFEKQREERAALEKLQSQLRHEQQRWERERQWQHQELERAGARLQEREGEARQLRERLEQERAELERQRQAYQHDLERLREAQRAVERERERLELLRRLKKQNTAPGALPPDTLAEAQPPSHPPSFNGEGLEGPRVSMLPSGVGPEYAERPEVARRDSAPTENRLAKSDVPIQLLSATNQFQRQAAVQQQIPTKLAASTKGGKDKGGKSRGSQRWESSASFDLKQQLLLNKLMGKDESTSRNRRSLSPILPGRHSPAPPPDPGFPAPSPPPADSPSEGFSLKAGGTALLPGPPAPSPLPATPLSAKEDASKEDVIFF

SEQ ID NO: 14365 - protein, 2063 aa, Homo sapiens
MADGAPRPQLYRSVSFKLLERWSGGPGLREEDTDTPGLRRRASCRPTTAARGQPSRRVSKLASGPLAAPAQPRPLRSLSPSVRQLSRRFDAPRLDDGSAGTRDGGVLPAAAEEAAEGPARGAWPSVTEMRKLFGGPGSRRPSADSESPGTPSPDGAAWEPPARESRQPPTPPPRTCFPLAGLRSARPLTGPETEGRLRRPQQQQERAQRPADGLHSWHIFSQPQAGARASCSSSSIAASYPVSRSRAASSSEEEEEGPPQLPGAQSPAYHGGHSSGSDDDRDGEGGHRWGGRPGLRPGSSLLDQDCRPDSDGLNLSSMNSAGVSGSPEPPTSPRAPREEGLREWGSGSPPCVPGPQEGLRPMSDSVGGAFRVAKVSFPSYLASPAGSRGSSRYSSTETLKDDDLWSSRGSGGWGVYRSPSFGAGEGLLRSQARTRAKGPGGTSRALRDGGFEPEKSRQRKSLSNPDIASETLTLLSFLRSDLSELRVRKPGGSSGDRGSNPLDGRDSPSAGGPVGQLEPIPIPAPASPGTRPTLKDLTATLRRAKSFTCSEKPMARRLPRTSALKSSSSELLLTGPGAEEDPLPLIVQDQYVQEARQVFEKIQRMGAQQDDGSDAPPGSPDWAGDVTRGQRSQEELSGPESSLTDEGIGADPEPPVAAFCGLGTTGMWRPLSSSSAQTNHHGPGTEDSLGGWALVSPETPPTPGALRRRRKVPPSGSGGSELSNGEAGEAYRSLSDPIPQRHRAATSEEPTGFSVDSNLLGSLSPKTGLPATSAMDEGLTSGHSDWSVGSEESKGYQEVIQSIVQGPGTLGRVVDDRIAGKAPKKKSLSDPSRRGELAGPGFEGPGGEPIREVEPMLPPSSSEPILVEQRAEPEEPGATRSRAQSERALPEALPPPATAHRNFHLDPKLADILSPRLIRRGSKKRPARSSHQELRRDEGSQDQTGSLSRARPSSRHVRHASVPATFMPIVVPEPPTSVGPPVAVPEPIGFPTRAHPTLQAPSLEDVTKQYMLNLHSGEVPAPVPVDMPCLPLAAPPSAEAKPPEAARPADEPTPASKCCSKPQVDMRKHVAMTLLDTEQSYVESLRTLMQGYMQPLKQPENSVLCDPSLVDEIFDQIPELLEHHEQFLEQVRHCMQTWHAQQKVGALLVQSFSKDVLVNIYSAYIDNFLNAKDAVRVAKEARPAFLKFLEQSMRENKEKQALSDLMIKPVQRIPRYELLVKDLLKHTPEDHPDHPLLLEAQRNIKQVAERINKGVRSAEEAERHARVLQEIEAHIEGMEDLQAPLRRFLRQEMVIEVKAIGGKKDRSLFLFTDLIVCTTLKRKSGSLRRSSMSLYTAASVIDTASKYKMLWKLPLEDADIIKGASQATNRENIQKAISRLDEDLTTLGQMSKLSESLGFPHQSLDDALRDLSAAMHRDLSEKQALCYALSFPPTKLELCATRPEGTDSYIFEFPHPDARLGFEQAFDEAKRKLASSKSCLDPEFLKAIPIMKTRSGMQFSCAAPTLNSCPEPSPEVWVCNSDGYVGQVCLLSLRAEPDVEACIAVCSARILCIGAVPGLQPRCHREPPPSLRSPPETAPEPAGPELDVEAAADEEAATLAEPGPQPCLHISIAGSGLEMTPGLGEGDPRPELVPFDSDSDDESSPSPSGTLQSQASRSTISSSFGNEETPSSKEATAETTSSEEEQEPGFLPLSGSFGPGGPCGTSPMDGRALRRSSHGSFTRGSLEDLLSVDPEAYQSSVWLGTEDGCVHVYQSSDSIRDRRNSMKLQHAASVTCILYLNNQVFVSLANGELVVYQREAGHFWDPQNFKSVTLGTQGSPITKMVSVGGRLWCGCQNRVLVLSPDTLQLEHMFYVGQDSSRCVACMVDSSLGVWVTLKGSAHVCLYHPDTFEQLAEVDVTPPVHRMLAGSDAIIRQHKAACLRITALLVCEELLWVGTSAGVVLTMPTSPGTVSCPRAPLSPTGLGQGHTGHVRFLAAVQLPDGFNLLCPTPPPPPDTGPEKLPSLEHRDSPWHRGPAPARPKMLVISGGDGYEDFRLSSGGGSSSETVGRDDSTNHLLLWRV

SEQ ID NO: 14366 - protein, 354 aa, Homo sapiens
MSLRGSLSRLLQTRVHSILKKSVHSVAVIGAPFSQGQKRKGVEHGPAAIREAGLMKRLSSLGCHLKDFGDLSFTPVPKDDLYNNLIVNPRSVGLANQELAEVVSRAVSDGYSCVTLGGDHSLAIGTISGHARHCPDLCVVWVDAHADINTPLTTSSGNLHGQPVSFLLRELQDKVPQLPGFSWIKPCISSASIVYIGLRDVDPPEHFILKNYDIQYFSMRDIDRLGIQKVMERTFDLLIGKRQRPIHLSFDIDAFDPTLAPATGTPVVGGLTYREGMYIAEEIHNTGLLSALDLVEVNPQLATSEEEAKTTANLAVDVIASSFGQTREGGHIVYDQLPTPSSPDESENQARVRI

SEQ ID NO: 14367 - protein, 690 aa, Homo sapiens
MPYLYRAPGPQAHPVPKDARITHSSGQSFEQMRQECLQRGTLFEDADFPASNSSLFYSERPQIPFVWKRPGEIVKNPEFILGGATRTDICQGELGDCWLLAAIASLTLNQKALARVIPQDQSFGPGYAGIFHFQFWQHSEWLDVVIDDRLPTFRDRLVFLHSADHNEFWSALLEKAYAKLNGSYEALKGGSAIEAMEDFTGGVAETFQTKEAPENFYEILEKALKRGSLLGCFIDTRSAAESEARTPFGLIKGHAYSVTGIDQVSFRGQRIELIRIRNPWGQVEWNGSWSDSSPEWRSVGPAEQKRLCHTALDDGEFWMAFKDFKAHFDKVEICNLTPDALEEDAIHKWEVTVHQGSWVRGSTAGGCRNFLDTFWTNPQIKLSLTEKDEGQEECSFLVALMQKDRRKLKRFGANVLTIGYAIYECPDKDEHLNKDFFRYHASRARSKTFINLREVSDRFKLPPGEYILIPSTFEPHQEADFCLRIFSEKKAITRDMDGNVDIDLPEPPKPTPPDQETEEEQRFRALFEQVAGEDMEVTAEELEYVLNAVLQKKKDIKFKKLSLISCKNIISLMDTSGNGKLEFDEFKVFWDKLKQWINLFLRFDADKSGTMSTYELRTALKAAGFQLSSHLLQLIVLRYADEELQLDFDDFLNCLVRLENASRVFQALSTKNKEFIHLNINEFIHLTMNI

SEQ ID NO: 14368 - protein, 664 aa, Homo sapiens
MPYLYRAPGPQAHPVPKDARITHSSGQSFEQMRQECLQRGTLFEDADFPASNSSLFYSERPQIPFVWKRPGEIVKNPEFILGGATRTDICQGELGDCWLLAAIASLTLNQKALARVIPQDQSFGPGYAGIFHFQFWQHSEWLDVVIDDRLPTFRDRLVFLHSADHNEFWSALLEKAYAKLNGSYEALKGGSAIEAMEDFTGGVAETFQTKEAPENFYEILEKALKRGSLLGCFIDTRSAAESEARTPFGLIKGHAYSVTGIDQVSFRGQRIELIRIRNPWGQVEWNGSWSDRMAFKDFKAHFDKVEICNLTPDALEEDAIHKWEVTVHQGSWVRGSTAGGCRNFLDTFWTNPQIKLSLTEKDEGQEECSFLVALMQKDRRKLKRFGANVLTIGYAIYECPDKDEHLNKDFFRYHASRARSKTFINLREVSDRFKLPPGEYILIPSTFEPHQEADFCLRIFSEKKAITRDMDGNVDIDLPEPPKPTPPDQETEEEQRFRALFEQVAGEDMEVTAEELEYVLNAVLQKKKDIKFKKLSLISCKNIISLMDTSGNGKLEFDEFKVFWDKLKQWINLFLRFDADKSGTMSTYELRTALKAAGFQLSSHLLQLIVLRYADEELQLDFDDFLNCLVRLENASRVFQALSTKNKEFIHLNINEFIHLTMNI

SEQ ID NO: 14369 - protein, 139 aa, Homo sapiens
MVQREKARDNFEGGCLAELIGSPRDWKCFLAVPDPLLGVQHWLHLWRPQTKDGNSLHRHGDQAWGKHRRQNSLKSPALSGHSIDYHFYPRLRCGMLIGPDKQAVASGLEVLVTSSTKILGQLFPDAAHFLEEASEFKAE

SEQ ID NO: 14370 - protein, 159 aa, Homo sapiens
MESRPSGRQHASEGDGDQSPTQCAGMRSSGRSDQPYVLKGNPLLLRVRCYSGCASGSGRQLQLSVFQDLNQFSHCRVWRSPALIVKGEPPWCSQQDTQSPFQTGTPLERPCFRMKLSGWELTKNAQRALGSKLQHILSLDSTQACGAGGPTILRPPRAP

SEQ ID NO: 14371 - protein, 580 aa, Homo sapiens
MRGGHKGGRCACPRVIRKVLAKCGCCFARGGRESYSIAGSEGSISASAASGLAAPSGPSSGLSSGPCSPGPPGPVSGLRRWLDHSKHCLSVETEADSGQAGPYENWMLEPALATGEELPELTLLTTLLEGPGDKTQPPEEETLSQAPESEEEQKKKALERSMYVLSELVETEKMYVDDLGQIVEGYMATMAAQGVPESLRGRDRIVFGNIQQIYEWHRDYFLQELQRCLKDPDWLAQLFIKHERRLHMYVVYCQNKPKSEHVVSEFGDSYFEELRQQLGHRLQLNDLLIKPVQRIMKYQLLLKDFLKYYNRAGMDTADLEQAVEVMCFVPKRCNDMMTLGRLRGFEGKLTAQGKLLGQDTFWVTEPEAGGLLSSRGRERRVFLFEQIIIFSEALGGGVRGGTQPGYVYKNSIKVSCLGLEGNLQGDPCRFALTSRGPEGGIQRYVLQAADPAISQAWIKHVAQILESQRDFLNALQSPIEYQRRESQTNSLGRPRGPGVGSPGRIQLGDQAQGSTHTPINGSLPSLLLSPKGEVARALLPLDKQALGDIPQAPHDSPPVSPTPKTPPCQARLAKLDEDEL

SEQ ID NO: 14372 - protein, 474 aa, Homo sapiens
MLEPALATGEELPELTLLTTLLEGPGDKTQPPEEETLSQAPESEEEQKKKALERSMYVLSELVETEKMYVDDLGQIVEGYMATMAAQGVPESLRGRDRIVFGNIQQIYEWHRDYFLQELQRCLKDPDWLAQLFIKHERRLHMYVVYCQNKPKSEHVVSEFGDSYFEELRQQLGHRLQLNDLLIKPVQRIMKYQLLLKDFLKYYNRAGMDTADLEQAVEVMCFVPKRCNDMMTLGRLRGFEGKLTAQGKLLGQDTFWVTEPEAGGLLSSRGRERRVFLFEQIIIFSEALGGGVRGGTQPGYVYKNSIKVSCLGLEGNLQGDPCRFALTSRGPEGGIQRYVLQAADPAISQAWIKHVAQILESQRDFLNALQSPIEYQRRESQTNSLGRPRGPGVGSPGRIQLGDQAQGSTHTPINGSLPSLLLSPKGEVARALLPLDKQALGDIPQAPHDSPPVSPTPKTPPCQARLAKLDEDEL

SEQ ID NO: 14373 - protein, 619 aa, Homo sapiens
MKPPDRPAPGRTDRILGVMGGMLRACALPGQEGPPRRSPLGLVGTEPESERTEGDHRRDREHEVLAGALQPESYSIAGSEGSISASAASGLAAPSGPSSGLSSGPCSPGPPGPVSGLRRWLDHSKHCLSVETEADSGQAGPYENWMLEPALATGEELPELTLLTTLLEGPGDKTQPPEEETLSQAPESEEEQKKKALERSMYVLSELVETEKMYVDDLGQIVEGYMATMAAQGVPESLRGRDRIVFGNIQQIYEWHRDYFLQELQRCLKDPDWLAQLFIKHERRLHMYVVYCQNKPKSEHVVSEFGDSYFEELRQQLGHRLQLNDLLIKPVQRIMKYQLLLKDFLKYYNRAGMDTADLEQAVEVMCFVPKRCNDMMTLGRLRGFEGKLTAQGKLLGQDTFWVTEPEAGGLLSSRGRERRVFLFEQIIIFSEALGGGVRGGTQPGYVYKNSIKVSCLGLEGNLQGDPCRFALTSRGPEGGIQRYVLQAADPAISQAWIKHVAQILESQRDFLNALQSPIEYQRRESQTNSLGRPRGPGVGSPGRIQLGDQAQGSTHTPINGSLPSLLLSPKGEVARALLPLDKQALGDIPQAPHDSPPVSPTPKTPPCQARLAKLDEDEL

SEQ ID NO: 14374 - protein, 906 aa, Homo sapiens
MCRIAGALRTLLPLLAALLQASVEASGEIALCKTGFPEDVYSAVLSKDVHEGQPLLNVKFSNCNGKRKVQYESSEPADFKVDEDGMVYAVRSFPLSSEHAKFLIYAQDKETQEKWQVAVKLSLKPTLTEESVKESAEVEEIVFPRQFSKHSGHLQRQKRDWVIPPINLPENSRGPFPQELVRIRSDRDKNLSLRYSVTGPGADQPPTGIFIINPISGQLSVTKPLDREQIARFHLRAHAVDINGNQVENPIDIVINVIDMNDNRPEFLHQVWNGTVPEGSKPGTYVMTVTAIDADDPNALNGMLRYRIVSQAPSTPSPNMFTINNETGDIITVAAGLDREKVQQYTLIIQATDMEGNPTYGLSNTATAVITVTDVNDNPPEFTAMTFYGEVPENRVDIIVANLTVTDKDQPHTPAWNAVYRISGGDPTGRFAIQTDPNSNDGLVTVVKPIDFETNRMFVLTVAAENQVPLAKGIQHPPQSTATVSVTVIDVNENPYFAPNPKIIRQEEGLHAGTMLTTFTAQDPDRYMQQNIRYTKLSDPANWLKIDPVNGQITTIAVLDRESPNVKNNIYNATFLASDNGIPPMSGTGTLQIYLLDINDNAPQVLPQEAETCETPDPNSINITALDYDIDPNAGPFAFDLPLSPVTIKRNWTITRLNGDFAQLNLKIKFLEAGIYEVPIIITDSGNPPKSNISILRVKVCQCDSNGDCTDVDRIVGAGLGTGAIIAILLCIIILLILVLMFVVWMKRRDKERQAKQLLIDPEDDVRDNILKYDEEGGGEEDQDYDLSQLQQPDTVEPDAIKPVGIRRMDERPIHAEPQYPVRSAAPHPGDIGDFINEGLKAADNDPTAPPYDSLLVFDYEGSGSTAGSLSSLNSSSSGGEQDYDYLNDWGPRFKKLADMYGGGDD

SEQ ID NO: 14375 - protein, 875 aa, Homo sapiens
MFLLRRYVCIFTEKLKNQAELYVFLSVKFSNCNGKRKVQYESSEPADFKVDEDGMVYAVRSFPLSSEHAKFLIYAQDKETQEKWQVAVKLSLKPTLTEESVKESAEVEEIVFPRQFSKHSGHLQRQKRDWVIPPINLPENSRGPFPQELVRIRSDRDKNLSLRYSVTGPGADQPPTGIFIINPISGQLSVTKPLDREQIARFHLRAHAVDINGNQVENPIDIVINVIDMNDNRPEFLHQVWNGTVPEGSKPGTYVMTVTAIDADDPNALNGMLRYRIVSQAPSTPSPNMFTINNETGDIITVAAGLDREKVQQYTLIIQATDMEGNPTYGLSNTATAVITVTDVNDNPPEFTAMTFYGEVPENRVDIIVANLTVTDKDQPHTPAWNAVYRISGGDPTGRFAIQTDPNSNDGLVTVVKPIDFETNRMFVLTVAAENQVPLAKGIQHPPQSTATVSVTVIDVNENPYFAPNPKIIRQEEGLHAGTMLTTFTAQDPDRYMQQNIRYTKLSDPANWLKIDPVNGQITTIAVLDRESPNVKNNIYNATFLASDNGIPPMSGTGTLQIYLLDINDNAPQVLPQEAETCETPDPNSINITALDYDIDPNAGPFAFDLPLSPVTIKRNWTITRLNGDFAQLNLKIKFLEAGIYEVPIIITDSGNPPKSNISILRVKVCQCDSNGDCTDVDRIVGAGLGTGAIIAILLCIIILLILVLMFVVWMKRRDKERQAKQLLIDPEDDVRDNILKYDEEGGGEEDQDYDLSQLQQPDTVEPDAIKPVGIRRMDERPIHAEPQYPVRSAAPHPGDIGDFINEGLKAADNDPTAPPYDSLLVFDYEGSGSTAGSLSSLNSSSSGGEQDYDYLNDWGPRFKKLADMYGGGDD

SEQ ID NO: 14376 - protein, 1385 aa, Homo sapiens
MKPVKHLLTTSNKSANVPALTTKKGLHNLPLSPELKEKHNAKLIHDKIEPMVLRSPPTGESILRYALPIPSSKTKNLLPEDEMIGKIIKHLKMVVSTLEETYGHCDQNGEEPFVKHEHEELSLSVGDDMNSFLTYCSQFAAQLEEALKEEQNILESLFKWFQWQVNQMEEISKDQTLLQAEPPKPDKTVILNIAEIVRLVQRFEELKNRLKQRSKSSVKVMLSKTMDKENRPEAVKSCEALAQKIEEFLEAHSTDEFKDVSATEPQTAHSMTNRFNAMLKVFENQANMLERAVNDQVLLDAEYKQMQCDFQLLSEEKLVLENELQKLKDKEKTKPTNNRTKKAVKTVKKKDKGKSEDSEKKMSPEKEFKIKEDLDQVQKVARLEIENKVLQEQLKQALQEAEKAKHQLNYFLNQEKLLKSEGKTETTMQVGNSQTKVKGEDSKNIPLEKETRKSLVSDSGGQRTSDKIQEYPQITAQSGRLIEKSSEKKRSSPAISDLSQILKSQDESAFLESSNEVSVAENQSYKSPSETHDKSLTTVSSSKEVQDSLSVGTLAQKNETVISPFILPPVLTESKKADVSEEQLQKMTEEQTYQAAEKSQADSEVPDENLMVENKDSVTKVQIEQMKQRTSSMERHEETLTTPQLPEDMVLVSRIQSETKNLKATRNESFHSHNDVPEENLMLEQDTKSKTEVEVKKQKSFQDNQLSTHNEVPNERLVVEHQESLSKTKLQIKKQETSTEQPLTTPDKEPNENLILRHQDSMSKSEMQVKEQRTLKGQRIITHDEEPGKNLVLEHQDSVSKLEMQIEKTKKLPREKRHSTHDEESGENPMLKHQDSVSKIQVQLEIQETSEGEGRSIPDKNSMFVHQDSVSKLQMQEKKKITPGRERRNTRIVVPNENVISVHQDSKSKLQMQEKKQINSGVERHKTFPLEIKKKDISLEHLLPEEKVLLSRSESQTKKLQAKVTSRKIKNEAASELPDTAENLPAMYPSISDLIIQFDLNKVVETDIESLRGALGRRLLNDEFKTQSKSFPGPDIEQLTDAFGRDILKDEFKTRSKSLPETDERLHSTTERGTINDAIKTQLKRKSYPETVLKHLKGVNGKDIIKHLINIQSKSHGETDKEHLADDTGRGIIKGSINAQLKGHQKTDKNFFAYATGRGLMKESTTTQLKSHPETDKEFLADAIGRGIIIGPITTQLKSHRETDKELLKDAIGRDIIKGPISAQLKSHQETDVEPLTNAIGSSKTIGEIKTQLRTHYDVNLFKNKDMSVQRQEGIFTRSITPSKFPTKVINLSPFENKEETYEYSSPYVTAPSKAIYRTYRAGPSFSKDIHLPLLNQLPSGHSKVVTLSQKTIEFTLPTVTNTVGKPTYKVLHAAARKSVPHPYF

SEQ ID NO: 14377 - protein, 267 aa, Homo sapiens
MKPVKHLLTTSNKSANVPALTTKKGLHNLPLSPELKEKHNAKLIHDKIEPMVLRSPPTGESILRYALPIPSSKTKNLLPEDEMIGKIIKHLKMVVSTLEETYGHCDQNGEEPFVKHEHEELSLSVGDDMNSFLTYCSQFAAQLEEALKEEQNILESLFKWFQWQVNQMEEISKDQTLLQAEPPKPDKTVILNIAEIVRLVQRFEELKNRLKQRSKSSVKVMLSKTMDKENRPEAVKSCEALAQKIEEFLEAHSTDEFKDVSATEPQL

SEQ ID NO: 14378 - protein, 486 aa, Homo sapiens
MKPVKHLLTTSNKSANVPALTTKKGLHNLPLSPELKEKHNAKLIHDKIEPMVLRSPPTGESILRYALPIPSSKTKNLLPEDEMIGKIIKHLKMVVSTLEETYGHCDQNGEEPFVKHEHEELSLSVGDDMNSFLTYCSQFAAQLEEALKEEQNILESLFKWFQWQVNQMEEISKDQTLLQAEPPKPDKTVILNIAEIVRLVQRFEELKNRLKQRSKSSVKVMLSKTMDKENRPEAVKSCEALAQKIEEFLEAHSTDEFKDVSATEPQTAHSMTNRFNAMLKVFENQANMLERAVNDQVLLDAEYKQMQCDFQLLSEEKLVLENELQKLKDKEKTKPTNNRTKKAVKTVKKKDKGKSEDSEKKMSPEKEFKIKEDLDQVQKVARLEIENKVLQEQLKQALQEAEKAKHQLNYFLNQEKLLKSEGKTETTMQVGNSQTKVKGEDSKNIPLEKETRKSLVSDSGGQRTSDKIQEYPQITAQSGRLIEKRC

SEQ ID NO: 14379 - protein, 479 aa, Homo sapiens
MKPVKHLLTTSNKSANVPALTTKKGLHNLPLSPELKEKHNAKLIHDKIEPMVLRSPPTGESILRYALPIPSSKTKNLLPEDEMIGKIIKHLKMVVSTLEETYGHCDQNGEEPFVKHEHEELSLSVGDDMNSFLTYCSQFAAQLEEALKEEQNILESLFKWFQWQVNQMEEISKDQTLLQAEPPKPDKTVILNIAEIVRLVQRFEELKNRLKQRSKSSVKVMLSKTMDKENRPEAVKSCEALAQKIEEFLEAHSTDEFKDVSATEPQTAHSMTNRFNAMLKVFENQANMLERAVNDQVLLDAEYKQMQCDFQLLSEEKLVLENELQKLKDKEKTKPTNNRTKKAVKTVKKKDKGKSEDSEKKMSPEKEFKIKEDLDQVQKVARLEIENKVLQEQLKQALQEAEKAKHQLNYFLNQEKLLKSEGKTETTMQVGNSQTKVKGEDSKNIPLEKETRKSLVSDSGGQRTSDKIQEYPQLREETI

SEQ ID NO: 14380 - protein, 516 aa, Homo sapiens
MKPVKHLLTTSNKSANVPALTTKKGLHNLPLSPELKEKHNAKLIHDKIEPMVLRSPPTGESILRYALPIPSSKTKNLLPEDEMIGKIIKHLKMVVSTLEETYGHCDQNGEEPFVKHEHEELSLSVGDDMNSFLTYCSQFAAQLEEALKEEQNILESLFKWFQWQVNQMEEISKDQTLLQAEPPKPDKTVILNIAEIVRLVQRFEELKNRLKQRSKSSVKVMLSKTMDKENRPEAVKSCEALAQKIEEFLEAHSTDEFKDVSATEPQTAHSMTNRFNAMLKVFENQANMLERAVNDQVLLDAEYKQMQCDFQLLSEEKLVLENELQKLKDKEKTKPTNNRTKKAVKTVKKKDKGKSEDSEKKMSPEKEFKIKEDLDQVQKVARLEIENKVLQEQLKQALQEAEKAKHQLNYFLNQEKLLKSEGKTETTMQVGNSQTKVKGEDSKNIPLEKETRKSLVSDSGGQRTSDKIQEYPQAVQETWCRHLLLARASGSFYSCRKVKWEQICHTLIMKYQMKGL

SEQ ID NO: 14381 - protein, 201 aa, Homo sapiens
MYTLLSGLYKYMFQKDEYCILILGLDNAGKTTFLEQSKTRFNKNYKGMSLSKITTTVGLNIGTVDVGKARLMFWDLGGQEELQSLWDKYYAECHGVIYVIDSTDEERLAESKQAFEKVVTSEALCGVPVLVLANKQDVETCLSIPDIKTAFSDCTSKIGRRDCLTQACSALTGKGVREGIEWMVKCVVRNVHRPPRQRDIT

SEQ ID NO: 14382 - protein, 173 aa, Homo sapiens
MYTLLSGLYKYMFQKDEYCILILGLDNAGKTTFLEQSKTRFNKNYKGMSLSKITTTVGLNIGTVDVGKARLMFWDLGGQEELQSLWDKYYAECHGVIYVIDSTDEERLAESKQAFEKVVTSEALCGVPVLVLANKQDVETCLSIPDIKTAFSDCTSKIGRRDCLTQACSALTG

SEQ ID NO: 14383 - protein, 154 aa, Homo sapiens
MSLSKITTTVGLNIGTVDVGKARLMFWDLGGQEELQSLWDKYYAECHGVIYVIDSTDEERLAESKQAFEKVVTSEALCGVPVLVLANKQDVETCLSIPDIKTAFSDCTSKIGRRDCLTQACSALTGKGVREGIEWMVKCVVRNVHRPPRQRDIT

SEQ ID NO: 14384 - protein, 121 aa, Homo sapiens
MYTLLSGLYKYMFQKDEYCILILGLDNAGKTTFLEQSKTRFNKNYKGMSLSKITTTVGLNIGTVDVGKARLMFWDLGGQEELQSLWDKYYAECHGVIYVIDSTDEERLAESKQAFDVPLNP

SEQ ID NO: 14385 - protein, 308 aa, Homo sapiens
MDALKSAGRALIRSPSLAKQSWGGGGRHRKLPENWTDTRETLLEGMLFSLKYLGMTLVEQPKGEELSAAAIKRIVATAKASGKKLQKVTLKVSPRGIILTDNLTNQLIENVSIYRISYCTADKMHDKVFAYIAQSQHNQSLECHAFLCTKRKMAQAVTLTVAQAFKVAFEFWQVSKEEKEKRDKASQEGGDVLGARQDCTPSLKSLVATGNLLDLEETAKAPLSTVSANTTNMDEVPRPQALSGSSVVWELDDGLDEAFSRLAQSRTNPQVLDTGLTAQDMHYAQCLSPVDWDKPDSSGTEQDDLFSF

SEQ ID NO: 14386 - protein, 585 aa, Homo sapiens
MAAVELEWIPETLYNTAISAVVDNYIRSRRDIRSLPENIQFDVYYKLYQQGRLCQLGSEFCELEVFAKVLRALDKRHLLHHCFQALMDHGVKVASVLAYSFSRRCSYIAESDAAVKEKAIQVGFVLGGFLSDAGWYSDAEKVFLSCLQLCTLHDEMLHWFRAVECCVRLLHVRNGNCKYHLGEETFKLAQTYMDKLSKHGQQANKAALYGELCALLFAKSHYDEAYKWCIEAMKEITAGLPVKVVVDVLRQASKACVVKREFKKAEQLIKHAVYLARDHFGSKHPKYSDTLLDYGFYLLNVDNICQSVAIYQAALDIRQSVFGGKNIHVATAHEDLAYSSYVHQYSSGKFDNALFHAERAIGIITHILPEDHLLLASSKRVKALILEEIAIDCHNKETEQRLLQEAHDLHLSSLQLAKKAFGEFNVQTAKHYGNLGRLYQSMRKFKEAEEMHIKAIQIKEQLLGQEDYEVALSVGHLASLYNYDMNQYENAEKLYLRSIAIGKKLFGEGYSGLEYDYRGLIKLYNSIGNYEKVFEYHNVLSNWNRLRDRQYSVTDALEDVSTSPQSTEEVVQSFLISQNVEGPSC

SEQ ID NO: 14387 - protein, 170 aa, Homo sapiens
MGNEASYPAEMCSHFDNDEIKRLGRRFKKLDLDKSGSLSVEEFMSLPELRHNPLVRRVIDVFDTDGDGEVDFKEFILGTSQFSVKGDEEQKLRFAFSIYDMDKDGYISNGELFQVLKMMVGNNLTDWQLQQLVDKTIIILDKDGDGKISFEEFSAVVRDLEIHKKLVLIV

SEQ ID NO: 14388 - protein, 606 aa, Homo sapiens [sequence omitted]

SEQ ID NO: 14389 - protein, 186 aa, Homo sapiens
MEPPRGPPANGAEPSRAVGTVKVYLPNKQRTVVTVRDGMSVYDSLDKALKVRGLNQDCCVVYRLIKGRKTVTAWDTAIAPLDGEELIVEVLEDVPLTMHNFVRKTFFSLAFCDFCLKFLFHGFRCQTCGYKFHQHCSSKVPTVCVDMSTNRQQFYHSVQDLSGGSRQHEAPSNRPLNELLTPQGPR

SEQ ID NO: 14390 - protein, 193 aa, Homo sapiens
MERRLIKKEMKKLLGDYIGIRLRENEFDPKGRRQLTFLDDMAHYDLAISVALQWLDPSEDLTWLEWEELKIPLHGRPIYPNRREREAMILSSYAGILMNSIPIEEVFKIYGADSSADSGTIKVPRVSSLCLSLHPFAMLTAPKAAAYARKQSVKSRKVTTNKNATSISAKEANATEWKSSQRFSDTQPKHKVT

SEQ ID NO: 14391 - protein, 185 aa, Homo sapiens
MTTPNKTPPGADPKQLERTGTVREIGSQAVWSLSSCKPGFGVDQLRDDNLETYWQSDGSQPHLVNIQFRRKTTVKTLCIYADYKSDESYTPSKISVRVGNNFHNLQEIRQLELVEPSGWIHVPLTDNHKKPTRTFMIQIAVLANHQNGRDTHMRQIKIYTPVEESSIGKFPRCTTIDFMMYRSIR

SEQ ID NO: 14392 - protein, 910 aa, Homo sapiens
MKKMSRNVLLQMEEEEDDDDGDIVLENLGQTIVPDLGSLESQHDFRTPEFEEFNGKPDSLFFNDGQRRIDFVLVYEDESRKETNKKGTNEKQRRKRQAYESNLICHGLQLEATRSVLDDKLVFVKVHAPWEVLCTYAEIMHIKLPLKPNDLKNRSSAFGTLNWFTKVLSVDESIIKPEQEFFTAPFEKNRMNDFYIVDRDAFFNPATRSRIVYFILSRVKYQVINNVSKFGINRLVNSGIYKAAFPLHDCKFRRQSEDPSCPNERYLLYREWAHPRSIYKKQPLDLIRKYYGEKIGIYFAWLGYYTQMLLLAAVVGVACFLYGYLNQDNCTWSKEVCHPDIGGKIIMCPQCDRLCPFWKLNITCESSKKLCIFDSFGTLVFAVFMGVWVTLFLEFWKRRQAELEYEWDTVELQQEEQARPEYEARCTHVVINEITQEEERIPFTAWGKCIRITLCASAVFFWILLIIASVIGIIVYRLSVFIVFSAKLPKNINGTDPIQKYLTPQTATSITASIISFIIIMILNTIYEKVAIMITNFELPRTQTDYENSLTMKMFLFQFVNYYSSCFYIAFFKGKFVGYPGDPVYWLGKYRNEECDPGGCLLELTTQLTIIMGGKAIWNNIQEVLLPWIMNLIGRFHRVSGSEKITPRWEQDYHLQPMGKLGLFYEYLEMIIQFGFVTLFVASFPLAPLLALVNNILEIRVDAWKLTTQFRRLVPEKAQDIGAWQPIMQGIAILAVVTNAMIIAFTSDMIPRLVYYWSFSVPPYGDHTSYTMEGYINNTLSIFKVADFKNKSKGNPYSDLGNHTTCRYRDFRYPPGHPQEYKHNIYYWHVIAAKLAFIIVMEHVIYSVKFFISYAIPDVSKRTKSKIQREKYLTQKLLHENHLKDMTKNMGVIAERMIEAVDNNLRPKSE

SEQ ID NO: 14393 - protein, 931 aa, Homo sapiens
MKKMSRNVLLQMEEEEDDDDGDIGDVPASRRPFLTPHTHLPSSLVLENLGQTIVPDLGSLESQHDFRTPEFEEFNGKPDSLFFNDGQRRIDFVLVYEDESRKETNKKGTNEKQRRKRQAYESNLICHGLQLEATRSVLDDKLVFVKVHAPWEVLCTYAEIMHIKLPLKPNDLKNRSSAFGTLNWFTKVLSVDESIIKPEQEFFTAPFEKNRMNDFYIVDRDAFFNPATRSRIVYFILSRVKYQVINNVSKFGINRLVNSGIYKAAFPLHDCKFRRQSEDPSCPNERYLLYREWAHPRSIYKKQPLDLIRKYYGEKIGIYFAWLGYYTQMLLLAAVVGVACFLYGYLNQDNCTWSKEVCHPDIGGKIIMCPQCDRLCPFWKLNITCESSKKLCIFDSFGTLVFAVFMGVWVTLFLEFWKRRQAELEYEWDTVELQQEEQARPEYEARCTHVVINEITQEEERIPFTAWGKCIRITLCASAVFFWILLIIASVIGIIVYRLSVFIVFSAKLPKNINGTDPIQKYLTPQTATSITASIISFIIIMILNTIYEKVAIMITNFELPRTQTDYENSLTMKMFLFQFVNYYSSCFYIAFFKGKFVGYPGDPVYWLGKYRNEECDPGGCLLELTTQLTIIMGGKAIWNNIQEVLLPWIMNLIGRFHRVSGSEKITPRWEQDYHLQPMGKLGLFYEYLEMIIQFGFVTLFVASFPLAPLLALVNNILEIRVDAWKLTTQFRRLVPEKAQDIGAWQPIMQGIAILAVVTNAMIIAFTSDMIPRLVYYWSFSVPPYGDHTSYTMEGYINNTLSIFKVADFKNKSKGNPYSDLGNHTTCRYRDFRYPPGHPQEYKHNIYYWHVIAAKLAFIIVMEHVIYSVKFFISYAIPDVSKRTKSKIQREKYLTQKLLHENHLKDMTKNMGVIAERMIEAVDNNLRPKSE

SEQ ID NO: 14394 - protein, 892 aa, Homo sapiens
MFCAAVLENLGQTIVPDLGSLESQHDFRTPEFEEFNGKPDSLFFNDGQRRIDFVLVYEDESRKETNKKGTNEKQRRKRQAYESNLICHGLQLEATRSVLDDKLVFVKVHAPWEVLCTYAEIMHIKLPLKPNDLKNRSSAFGTLNWFTKVLSVDESIIKPEQEFFTAPFEKNRMNDFYIVDRDAFFNPATRSRIVYFILSRVKYQVINNVSKFGINRLVNSGIYKAAFPLHDCKFRRQSEDPSCPNERYLLYREWAHPRSIYKKQPLDLIRKYYGEKIGIYFAWLGYYTQMLLLAAVVGVACFLYGYLNQDNCTWSKEVCHPDIGGKIIMCPQCDRLCPFWKLNITCESSKKLCIFDSFGTLVFAVFMGVWVTLFLEFWKRRQAELEYEWDTVELQQEEQARPEYEARCTHVVINEITQEEERIPFTAWGKCIRITLCASAVFFWILLIIASVIGIIVYRLSVFIVFSAKLPKNINGTDPIQKYLTPQTATSITASIISFIIIMILNTIYEKVAIMITNFELPRTQTDYENSLTMKMFLFQFVNYYSSCFYIAFFKGKFVGYPGDPVYWLGKYRNEECDPGGCLLELTTQLTIIMGGKAIWNNIQEVLLPWIMNLIGRFHRVSGSEKITPRWEQDYHLQPMGKLGLFYEYLEMIIQFGFVTLFVASFPLAPLLALVNNILEIRVDAWKLTTQFRRLVPEKAQDIGAWQPIMQGIAILAVVTNAMIIAFTSDMIPRLVYYWSFSVPPYGDHTSYTMEGYINNTLSIFKVADFKNKSKGNPYSDLGNHTTCRYRDFRYPPGHPQEYKHNIYYWHVIAAKLAFIIVMEHVIYSVKFFISYAIPDVSKRTKSKIQREKYLTQKLLHENHLKDMTKNMGVIAERMIEAVDNNLRPKSE

SEQ ID NO: 14395 - protein, 929 aa, Homo sapiens
MKKMSRNVLLQMEEEEDDDDGDIVLENLGQTIVPDLGSLESQHDFRTPEFEEFNGKPDSLFFNDGQRRIDFVLVYEDESRKETNKKGTNEKQRRKRQAYESNLICHGLQLEATRSVLDDKLVFVKVHAPWEVLCTYAEIMHIKLPLKPNDLKNRSSAFGTLNWFTKVLSVDESIIKPEQEFFTAPFEKNRMNDFYIVDRDAFFNPATRSRIVYFILSRVKYQVINNVSKFGINRLVNSGIYKAAFPLHDCKFRRQSEDPSCPNERYLLYREWAHPRSIYKKQPLDLIRKYYGEKIGIYFAWLGYYTQMLLLAAVVGVACFLYGYLNQDNCTWSKEVCHPDIGGKIIMCPQCDRLCPFWKLNITCESSKKLCIFDSFGTLVFAVFMGVWVTLFLEFWKRRQAELEYEWDTVELQQEEQARPEYEARCTHVVINEITQEEERIPFTAWGKCIRITLCASAVFFWILLIIASVIGIIVYRLSVFIVFSAKLPKNINGTDPIQKYLTPQTATSITASIISFIIIMILNTIYEKVAIMITNFELPRTQTDYENSLTMKMFLFQFVNYYSSCFYIAFFKGKFVGYPGDPVYWLGKYRNEECDPGGCLLELTTQLTIIMGGKAIWNNIQEVLLPWIMNLIGRFHRVSGSEKITPRWEQDYHLQPMGKLGLFYEYLEMIIQFGFVTLFVASFPLAPLLALVNNILEIRVDAWKLTTQFRRLVPEKAQDIGAWQPIMQGIAILAVVTNAMIIAFTSDMIPRLVYYWSFSVPPYGDHTSYTMEGYINNTLSIFKVADFKNKSKGNPYSDLGNHTTCRYRDFRYPPGHPQEYKHNIYYWHVIAAKLAFIIVMEYLALLPRLGHSGMILAHCNLRLPVDCCMCYRFVDEIRLLEQLTSDFIDSLYYIFSISIISIFFSVTFFFLLLSLGPTPCFSVSNFLS

SEQ ID NO: 14396 - protein, 913 aa, Homo sapiens
MGDPDLLEVLAEEGEKVNKHIDYSFQMSEQSLSSRETSFLINEETMPAKRFNLFLRRRLMFQKNQQSKDSIFFRDGIRQIDFVLSYVDDVKKDAELKAERRKEFETNLRKTGLELEIEDKRDSEDGRTYFVKIHAPWEVLVTYAEVLGIKMPIKESDIPRPKHTPISYVLGPVRLPLSVKYPHPEYFTAQFSRHRQELFLIEDQATFFPSSSRNRIVYYILSRCPFGIEDGKKRFGIERLLNSNTYSSAYPLHDGQYWKPSEPPNPTNERYTLHQNWARFSYFYKEQPLDLIKNYYGEKIGIYFVFLGFYTEMLFFAAVVGLACFIYGLLSMEHNTSSTEICDPEIGGQMIMCPLCDQVCDYWRLNSTCLASKFSHLFDNESTVFFAIFMGIWVTLFLEFWKQRQARLEYEWDLVDFEEEQQQLQLRPEFEAMCKHRKLNAVTKEMEPYMPLYTRIPWYFLSGATVTLWMSLVVTSMVAVIVYRLSVFATFASFMESDASLKQVKSFLTPQITTSLTGSCLNFIVILILNFFYEKISAWITKMEIPRTYQEYESSLTLKMFLFQFVNFYSSCFYVAFFKGKFVGYPGKYTYLFNEWRSEECDPGGCLIELTTQLTIIMTGKQIFGNIKEAIYPLALNWWRRRKARTNSEKLYSRWEQDHDLESFGPLGLFYEYLETVTQFGFVTLFVASFPLAPLLALINNIVEIRVDAWKLTTQYRRTVASKAHSIGVWQDILYGMAVLSVATNAFIVAFTSDIIPRLVYYYAYSTNATQPMTGYVNNSLSVFLIADFPNHTAPSEKRDFITCRYRDYRYPPDDENKYFHNMQFWHVLAAKMTFIIVMEHVVFLVKFLLAWMIPDVPKDVVERIKREKLMTIKILHDFELNKLKENLGINSNEFAKHVMIEENKAQLAKSTL

SEQ ID NO: 14397 - protein, 933 aa, Homo sapiens
MRMAATAWAGLQGPPLPTLCPAVRTGLYCRDQAHAERWAMTSETSSGSHCARSRMLRRRAQEEDSTVLIDVSPPEAEKRGSYGSTAHASEPGGQQAAACRAGSPAKPRIADFVLVWEEDLKLDRQQDSAARDRTDMHRTWRETFLDNLRAAGLCVDQQDVQDGNTTVHYALLSASWAVLCYYAEDLRLKLPLQELPNQASNWSAGLLAWLGIPNVLLEVVPDVPPEYYSCRFRVNKLPRFLGSDNQDTFFTSTKRHQILFEILAKTPYGHEKKNLLGIHQLLAEGVLSAAFPLHDGPFKTPPEGPQAPRLNQRQVLFQHWARWGKWNKYQPLDHVRRYFGEKVALYFAWLGFYTGWLLPAAVVGTLVFLVGCFLVFSDIPTQELCGSKDSFEMCPLCLDCPFWLLSSACALAQAGRLFDHGGTVFFSLFMALWAVLLLEYWKRKSATLAYRWDCSDYEDTEERPRPQFAASAPMTAPNPITGEDEPYFPERSRARRMLAGSVVIVVMVAVVVMCLVSIILYRAIMAIVVSRSGNTLLAAWASRIASLTGSVVNLVFILILSKIYVSLAHVLTRWEMHRTQTKFEDAFTLKVFIFQFVNFYSSPVYIAFFKGRFVGYPGNYHTLFGVRNEECAAGGCLIELAQELLVIMVGKQVINNMQEVLIPKLKGWWQKFRLRSKKRKAGASAGASQGPWEDDYELVPCEGLFDEYLEMVLQFGFVTIFVAACPLAPLFALLNNWVEIRLDARKFVCEYRRPVAERAQDIGIWFHILAGLTHLAVISNAFLLAFSSDFLPRAYYRWTRAHDLRGFLNFTLARAPSSFAAAHNRTCRYRAFRDDDGHYSQTYWNLLAIRLAFVIVFEHVVFSVGRLLDLLVPDIPESVEIKVKREYYLAKQALAENEVLFGTNGTKDEQPEGSELSSHWTPFTVPKASQLQQ

SEQ ID NO: 14398 - protein, 179 aa, Homo sapiens
MRMAATAWAGLQGPPLPTLCPAVRTGLYCRDQAHAERWAMTSETSSGSHCARSRMLRRRAQEEDSTVLIDVSPPEAEKRGSYGSTAHASEPGGQQAAACRAGSPAKPRIDFVLVWEEDLKLDRQQDSAARDRTDMHRTWRETFLDNLRAAGLCVDQVRGGCHGQGPRPCIHSVTHDLAA

SEQ ID NO: 14399 - protein, 883 aa, Homo sapiens
MRMAATAWAGLQGPPLPTLCPAVRTGLYCRDQAHAERWAMTSETSSGSHCARSRMLRRRAQEEDSTVLIDVSPPEAEKRGSYGSTAHASEPGGQQAAACRAGSPAKPRIDFVLVWEEDLKLDRQQDSAARDRTDMHRTWRETFLDNLRAAGLCVDQQDVQDGNTTVHYALLSASWAVLCYYAEDLRLKLPLQELPNQASNWSAGLLAWLGIPNVLLEVVPDVPPEYYSCRFRVNKLPRFLGSDNQDTFFTSTKRHQILFEILAKTPYGHEKKNLLGIHQLLAEGVLSAAFPLHDGPFKTPPEGPQAPRLNQRQVLFQHWARWGKWNKYQPLDHVRRYFGEKVALYFAWLGFYTGWLLPAAVVGTLVFLVGCFLVFSDIPTQELCGSKDSFEMCPLCLDCPFWLLSSACALAQAGRLFDHGGTVFFSLFMALWAVLLLEYWKRKSATLAYRWDCSDYEDTEERPRPQFAASAPMTAPNPITGEDEPYFPERSRARRMLAGSVVIVVMVAVVVMCLVSIILYRAIMAIVVSRSGNTLLAAWASRIASLTGSVVNLVFILILSKIYVSLAHVLTRWEMHRTQTKFEDAFTLKVFIFQFVNFYSSPVYIAFFKGRFVGYPGNYHTLFGVRNEECAAGGCLIELAQELLVIMVGKQVINNMQEVLIPKLKGWWQKFRLRSKKRKAGASAGASQGPWEDDYELVPCEGLFDEYLEMVLQFGFVTIFVAACPLAPLFALLNNWVEIRLDARKFVCEYRRPVAERAQDIGIWFHILAGLTHLAVISNAFLLAFSSDFLPRAYYRWTRAHDLRGFLNFTLARAPSSFAAAHNRTCRYRAFRDDDGHYSQTYWNLLAIRLAFVIVFEVAEAPAGSPIHGMRPRPCALPNSSTW

SEQ ID NO: 14400 - protein, 452 aa, Homo sapiens
MSTTFPGLVHDAEIRHDGSNSYRLMQLGCLESVANSTVAYSSSSPLTYSTTGTEFASPYFSTNHQYTPLHHQSFHYEFQHSHPAVTPDAYSLNSLHHSQQYYQQIHHGEPTDFINLHNARALKSSCLDEQRRELGCLDAYRRHDLSLMSHGSQYGMHPDQRLLPGPSLGLAAAGADDLQGSVEAQCGLVLNGQGGVIRRGGTCVVNPTDLFCSVPGRLSLLSSTSKYKVTIAEVKRRLSPPECLNASLLGGILRRAKSKNGGRCLREKLDRLGLNLPAGRRKAANVTLLTSLVEGEALHLARDFGYTCETEFPAKAVGEHLARQHMEQKEQTARKKMILATKQICKEFQDLLSQDRSPLGSSRPTPILDLDIQRHLTHFSLITHGFGTPAICAALSTFQTVLSEMLNYLEKHTTHKNGGAADSGQGHANSEKAPLRKTSEAAVKEGKTEKTD

SEQ ID NO: 14401 - protein, 782 aa, Homo sapiens
MQGEESLRILVEPEGDSFPLMEISTCETEASEQWDYVLVAQRHTQRDPRQARQQQFLEELRRKGFHIKVIRDQKQVFFGIRADNSVFGLYRTLLLEPEGPAPHAELAAPTTIPVTTSLRIRIVNFVVMNNKTSAGETFEDLMKDGVFEARFPLHKGEGRLKKTWARWRHMFREQPVDEIRNYFGEKVALYFVWLGWYTYMLVPAALTGLLVFLSGFSLFEASQISKEICEAHDILMCPLGDHSRRYQRLSETCTFAKLTHLFDNDGTVVFAIFMALWATVFLEIWKRQRARVVLHWDLYVWDEEQEEMALQLINCPDYKLRPYQHSYLRSTVILVLTLLMICLMIGMAHVLVVYRVLASALFSSSAVPFLEEQVTTAVVVTGALVHYVTIIIMTKINRCVALKLCDFEMPRTFSERESRFTIRFFTLQFFTHFSSLIYIAFILGRINGHPGKSTRLAGLWKLEECHASGCMMDLFVQMAIIMGLKQTLSNCVEYLVPWVTHKCRSLRASESGHLPRDPELRDWRRNYLLNPVNTFSLFDEFMEMMIQYGFTTIFVAAFPLAPLLALFSNLVEIRLDAIKMVWLQRRLVPRKAKDIGTWLQVLETIGVLAVIANGMVIAFTSEFIPRVVYKYRYSPCLKEGNSTVDCLKGYVNHSLSVFHTKDFQDPDGIEGSENVTLCRYRDYRNPPDYNFSEQFWFLLAIRLAFVILFEHVALCIKLIAAWFVPDIPQSVKNKVLEVKYQRLREKMWHGRQRLGGVGAGSRPPMPAHPTPASIFSARSTDV

SEQ ID NO: 14402 - protein, 483 aa, Homo sapiens
MPAVSEEEMALQLINCPDYKLRPYQHSYLRSTVILVLTLLMICLMIGMAHVLVVYRVLASALFSSSAVPFLEEQVTTAVVVTGALVHYVTIIIMTKINRCVALKLCDFEMPRTFSERESRFTIRFFTLQFFTHFSSLIYIAFILGRINGHPGKSTRLAGLWKLEECHASGCMMDLFVQMAIIMGLKQTLSNCVEYLVPWVTHKCRSLRASESGHLPRDPELRDWRRNYLLNPVNTFSLFDEFMEMMIQYGFTTIFVAAFPLAPLLALFSNLVEIRLDAIKMVWLQRRLVPRKAKDIGTWLQVLETIGVLAVIANGMVIAFTSEFIPRVVYKYRYSPCLKEGNSTVDCLKGYVNHSLSVFHTKDFQDPDGIEGSENVTLCRYRDYRNPPDYNFSEQFWFLLAIRLAFVILFEHVALCIKLIAAWFVPDIPQSVKNKVLEVKYQRLREKMWHGRQRLGGVGAGSRPPMPAHPTPASIFSARSTDV

SEQ ID NO: 14403 - protein, 186 aa, Homo sapiens
MQGEESLRILVEPEGDSFPLMEISTCETEASEQWDYVLVAQRHTQRDPRQARQQQFLEELRRKGFHIKVIRDQKQVFFGIRADNSVFGLYRTLLLEPEGPAPHAELAAPTTIPVTTSLRIRIVNFVVMNNKTSAGETFEDLMKDGVFEARFPLHKVRGGPAWRGPWGGTLGWGLSLSVTRARGRDA

SEQ ID NO: 14404 - protein, 348 aa, Homo sapiens
MYTAIPQSGSPFPGSVQDPGLHVWRVEKLKPVPVAQENQGVFFSGDSYLVLHNGPEEVSHLHLWIGQQSSRDEQGACAVLAVHLNTLLGERPVQHREVQGNESDLFMSYFPRGLKYQEGGVESAFHKTSTGAPAAIKKLYQVKGKKNIRATERALNWDSFNTGDCFILDLGQNIFAWCGGKSNILERNKARDLALAIRDSERQGKAQVEIVTDGEEPAEMIQVLGPKPALKEGNPEEDLTADKANAQAAALYKVSDATGQMNLTKVADSSPFALELLISDDCFVLDNGLCGKIYIWKGRKANEKERQAALQVAEGFISRMQYAPNTQVEILPQGHESPIFKQFFKDWK

SEQ ID NO: 14405 - protein, 333 aa, Homo sapiens
MYTAIPQSGSPFPGSVQDPGLHVWRVEKLKPVPVAQENQGVFFSGDSYLVLHNGPEEVSHLHLWIGQQSSRDEQGACAVLAVHLNTLLGERPVQHREVQGNESDLFMSYFPRGLKYQEGGVESAFHKTSTGAPAAIKKLYQVKGKKNIRATERALNWDSFNTGDCFILDLGQNIFAWCGGKSNILERNKARDLALAIRDSERQGKAQVLGPKPALKEGNPEEDLTADKANAQAAALYKVSDATGQMNLTKVADSSPFALELLISDDCFVLDNGLCGKIYIWKGRKANEKERQAALQVAEGFISRMQYAPNTQVEILPQGHESPIFKQFFKDWK

SEQ ID NO: 14406 - protein, 1704 aa, Homo sapiens
MSSVSEVNVDIKDFLMSINLEQYLLHFHESGFTTVKDCAAINDSLLQKIGISPTGHRRRILKQLQIILSKMQDIPIYANVHKTKKNDDPSKDYHVPSSDQNICIELSNSGSVQTSSPPQLETVRKNLEDSDASVERSQYPQSDDKLSPPKRDFPTAEEPHLNLGSLNDSLFGSDNIKIESLITKKTVDHTVEEQQTEKVKLITENLSKLPNADSECLSFVGCSTSGTNSGNGTNGLLEGSPPSPFFKFQGEMIVNDLYVPSSPILAPVRSRSKLVSRPSRSFLLRHRPVPEIPGSTKGVSGSYFRERRNVATSTEKSVAWQNSNEENSSSIFPYGETFLFQRLENSKKRSIKNEFLTQGEALKGEAATATNSFIIKSSIYDNRKEKISEDKVEDIWIPREDKNNFLIDTASESEYSTVEECFQSLRRKNSKASKSRTQKALILDSVNRHSYPLSSTSGNADSSAVSSQAISPYACFYGASAKKVKSGWLDKLSPQGKRMFQKRWVKFDGLSISYYNNEKEMYSKGIIPLSAISTVRVQGDNKFEVVTTQRTFVFRVEKEEERNDWISILLNALKSQSLTSQSQAVVTPEKCGYLELRGYKAKIFTVLSGNSVWLCKNEQDFKSGLGITIIPMNVANVKQVDRTVKQSFEIITPYRSFSFTAETEKEKQDWIEAVQQSIAETLSDYEVAEKIWFNESNRSCADCKAPDPDWASINLCVVICKKCAGQHRSLGPKDSKVRSLKMDASIWSNELIELFIVIGNKRANDFWAGNLQKDEELHMDSPVEKRKNFITQKYKEGKFRKTLLASLTKEELNKALCAAVVKPDVLETMALLFSGADVMCATGDPVHSTPYLLAKKAGQSLQMEFLYHNKFSDFPQHDIHSEGVLSQESSQSTFLCDFLYQAPSAASKLSSEKKLLEETNKKWCVLEGGFLSYYENDKSTTPNGTININEVICLAIHKEDFYLNTGPIFIFEIYLPSERVFLFGAETSQAQRKWTEAIAKHFVPLFAENLTEADYDLIGQLFYKDCHALDQWRKGWFAMDKSSLHFCLQMQEVQGDRMHLRRLQELTISTMVQNGEKLDVLLLVEKGRTLYIHGHTKLDFTVWHTAIEKAAGTDGNALQDQQLSKNDVPIIVNSCIAFVTQYGLGCKYIYQKNGDPLHISELLESFKKDARSFKLRAGKHQLEDVTAVLKSFLSDIDDALLTKELYPYWISALDTQDDKERIKKYGAFIRSLPGVNRATLAAIIEHLYRVQKCSEINHMNAHNLALVFSSCLFQTKGQTSEEVNVIEDLINNYVEIFEVKEDQVKQMDIENSFITKWKDTQVSQAGDLLIEVYVERKEPDCSIIIRISPVMEAEELTNDILAIKNIIPTKGDIWATFEVIENEELERPLHYKENVLEQVLRWSSLAEPGSAYLVVKRFLTADTIKHCSDRSTLGSIKEGILKIKEEPSKILSGNKFQDRYFVLRDGFLFLYKDVKSSKHDKMFSLSSMKFYRGVKKKMKPPTSWGLTAYSEKHHWHLCCDSSRTQTEWMTSIFIAQHEYDIWPPAGKERKRSITKNPKIGGLPLIPIQHEGNATLARKNIESARAELERLRLSEKCDKESVDSSLKERASMVAHCLEHKDDKLRNRPRKHRSFNCLEDTEPEAPLGQPKGHKGLKTLRKTEDRNSKATLDSDHKLPSRVIEELNVVLQRSRTLPKELQDEQILK

SEQ ID NO: 14407 - protein, 1944 aa, Homo sapiens
MSNFYEERTTMIAARDLQEFVPFGRDHCKHHPNALNLQLRQLQPASELWSSDGAAGLVGSLQEVTIHEKQKESWQLRKGVSEIGEDVDYDEELYVAGNMVIWSKGSKSQALAVYKAFTVDSPVQQALWCDFIISQDKSEKAYSSNEVEKCICILQSSCINMHSIEGKDYIASLPFQVANVWPTKYGLLFERSASSHEVPPGSPREPLPTMFSMLHPLDEITPLVCKSGSLFGSSRVQYVVDHAMKIVFLNTDPSIVMTYDAVQNVHSVWTLRRVKSEEENVVLKFSEQGGTPQNVATSSSLTAHLRSLSKGDSPVTSPFQNYSSIHSQSRSTSSPSLHSRSPSISNMAALSRAHSPALGVHSFSGVQRFNISSHNQSPKRHSISHSPNSNSNGSFLAPETEPIVPELCIDHLWTETITNIREKNSQASKVFITSDLCGQKFLCFLVESQLQLRCVKFQESNDKTQLIFGSVTNIPAKDAAPVEKIDTMLVLEGSGNLVLYTGVVRVGKVFIPGLPAPSLTMSNTMPRPSTPLDGVSTPKPLSKLLGSLDEVVLLSPVPELRDSSKLHDSLYNEDCTFQQLGTYIHSIRDPVHNRVTLELSNGSMVRITIPEIATSELVQTCLQAIKFILPKEIAVQMLVKWYNVHSAPGGPSYHSEWNLFVTCLMNMMGYNTDRLAWTRNFDFEGSLSPVIAPKKARPSETGSDDDWEYLLNSDYHQNVESHLLNRSLCLSPSEASQMKDEDFSQNLSLDSSTLLFTHIPAIFFVLHLVYEELKLNTLMGEGICSLVELLVQLARDLKLGPYVDHYYRDYPTLVRTTGQVCTIDPGQTGFMHHPSFFTSEPPSIYQWVSSCLKGEGMPPYPYLPGICERSRLVVLSIALYILGDESLVSDESSQYLTRITIAPQKLQVEQEENRFSFRHSTSVSSLAERLVVWMTNVGFTLRDLETLPFGIALPIRDAIYHCREQPASDWPEAVCLLIGRQDLSKQACEGNLPKGKSVLSSDVPSGTETEEEDDGMNDMNHEVMSLIWSEDLRVQDVRRLLQSAHPVRVNVVQYPELSDHEFIEEKENRLLQLCQRTMALPVGRGMFTLFSYHPVPTEPLPIPKLNLTGRAPPRNTTVDLNSGNIDVPPNMTSWASFHNGVAAGLKIAPASQIDSAWIVYNKPKHAELANEYAGFLMALGLNGHLTKLATLNIHDYLTKGHEMTSIGLLLGVSAAKLGTMDMSITRLLSIHIPALLPPTSTELDVPHNVQVAAVVGIGLVYQGTAHRHTAEVLLAEIGRPPGPEMEYCTDRESYSLAAGLALGMVCLGHGSNLIGMSDLNVPEQLYQYMVGGHRRFQTGMHREKHKSPSYQIKEGDTINVDVTCPGATLALAMIYLKTNNRSIADWLRAPDTMYLLDFVKPEFLLLRTLARCLILWDDILPNSKWVDSNVPQIIRENSISLSEIELPCSEDLNLETLSQAHVYIIAGACLSLGFRFAGSENLSAFNCLHKFAKDFMTYLSAPNASVTGPHNLETCLSVVLLSLAMVMAGSGNLKVLQLCRFLHMKTGGEMNYGFHLAHHMALGLLFLGGGRYSLSTSNSSIAALLCALYPHFPAHSTDNRYHLQALRHLYVLAAEPRLLVPVDVDTNTPCYALLEVTYKGTQWYEQTKEELMAPTLLPELHLLKQIKVKGPRYWELLIDLSKGTQHLKSILSKDGVLYVKLRAGQLSYKEDPMGWQSLLAQTVANRNSEARAFKPETISAFTSDPALLSFAEYFCKPTVNMGQKQEILDLFSSVLYECVTQETPEMLPAYIAMDQAIRRLGRREMSETSELWQIKLVLEFFSSRSHQERLQNHPKRGLFMNSEFLPVVKCTIDNTLDQWLQVGGDMCVHAYLSGQPLEESQLSMLACFLVYHSVPAPQHLPPIGLEGSTSFAELLFKFKQLKMPVRALLRLAPLLLGNPQPMVM

SEQ ID NO: 14408 - protein, 493 aa, Homo sapiens
MSVDMNSQGSDSNEEDYDPNCEEEEEEEEDDPGDIEDYYVGVASDVEQQGADAFDPEEYQFTCLTYKESEGALNEHMTSLASVLKVSHSVAKLILVNFHWQVSEILDRYKSNSAQLLVEARVQPNPSKHVPTSHPPHHCAVCMQFVRKENLLSLACQHQFCRSCWEQHCSVLVKDGVGVGVSCMAQDCPLRTPEDFVFPLLPNEELREKYRRYLFRDYVESHYQLQLCPGADCPMVIRVQEPRARRVQCNRCNEVFCFKCRQMYHAPTDCATIRKWLTKCADDSETANYISAHTKDCPKCNICIEKNGGCNHMQCSKCKHDFCWMCLGDWKTHGSEYYECSRYKENPDIVNQSQQAQAREALKKYLFYFERWENHNKSLQLEAQTYQRIHEKIQERVMNNLGTWIDWQYLQNAAKLLAKCRYTLQYTYPYAYYMESGPRKKLFEYQQAQLEAEIENLSWKVERADSYDRGDLENQMHIAEQRRRTLLKDFHDT

SEQ ID NO: 14409 - protein, 1047 aa, Homo sapiens
MALPSLLLLVAALAGGVRPPGARNLTLAVVLPEHNLSYAWAWPRVGPAVALAVEALGRALPVDLRFVSSELEGACSEYLAPLSAVDLKLYHDPDLLLGPGCVYPAASVARFASHWRLPLLTAGAVASGFSAKNDHYRTLVRTGPSAPKLGEFVVTLHGHFNWTARAALLYLDARTDDRPHYFTIEGVFEALQGSNLSVQHQVYAREPGGPEQATHFIRANGRIVYICGPLEMLHEILLQAQRENLTNGDYVFFYLDVFGESLRAGPTRATGRPWQDNRTREQAQALREAFQTVLVITYREPPNPEYQEFQNRLLIRAREDFGVELGPSLMNLIAGCFYDGILLYAEVLNETIQEGGTREDGLRIVEKMQGRRYHGVTGLVVMDKNNDRETDFVLWAMGDLDSGDFQPAAHYSGAEKQIWWTGRPIPWVKGAPPSDNPPCAFDLDDPSCDKTPLSTLAIVALGTGITFIMFGVSSFLIFRKLMLEKELASMLWRIRWEELQFGNSERYHKGAGSRLTLSLRGSSYGSLMTAHGKYQIFANTGHFKGNVVAIKHVNKKRIELTRQVLFELKHMRDVQFNHLTRFIGACIDPPNICIVTEYCPRGSLQDILENDSINLDWMFRYSLINDLVKGMAFLHNSIISSHGSLKSSNCVVDSRFVLKITDYGLASFRSTAEPDDSHALYAKKLWTAPELLSGNPLPTTGMQKADVYSFGIILQEIALRSGPFYLEGLDLSPKEIVQKVRNGQRPYFRPSIDRTQLNEELVLLMERCWAQDPAERPDFGQIKGFIRRFNKEGGTSILDNLLLRMEQYANNLEKLVEERTQAYLEEKRKAEALLYQILPHSVAEQLKRGETVQAEAFDSVTIYFSDIVGFTALSAESTPMQVVTLLNDLYTCFDAIIDNFDVYKVETIGDAYMVVSGLPGRNGQRHAPEIARMALALLDAVSSFRIRHRPHDQLRLRIGVHTGPVCAGVVGLKMPRYCLFGDTVNTASRMESNGQALKIHVSSTTKDALDELGCFQLELRGDVEMKGKGKMRTYWLLGERKGPPGLL

SEQ ID NO: 14410 - protein, 995 aa, Homo sapiens
MALPSLLLLVAALAGGVRPPGARNLTLAVVLPEHNLSYAWAWPRVGPAVALAVEALGRALPVDLRFVSSELEGACSEYLAPLSAVDLKLYHDPDLLLGPGCVYPAASVARFASHWRLPLLTAGAVASGFSAKNDHYRTLVRTGPSAPKLGEFVVTLHGHFNWTARAALLYLDARTDDRPHYFTIEGVFEALQGSNLSVQHQVYAREPGGPEQATHFIRANGRIVYICGPLEMLHEILLQAQRENLTNGDYVFFYLDVFGESLRAGPTRATGRPWQDNRTREQAQALREAFQTVLVITYREPPNPEYQEFQNRLLIRAREDFGVELGPSLMNLIAGCFYDGILLYAEVLNETIQEGGTREDGLRIVEKMQGRRYHGVTGLVVMDKNNDRETDFVLWAMGDLDSGDFQPAAHYSGAEKQIWWTGRPIPWVKGAPPSDNPPCAFDLDDPSCDKTPLSTLAIVALGTGITFIMFGVSSFLIFRKLMLEKELASMLWRIRWEELQFGNSERYHKGAGSRLTLSLRGSSYGSLMTAHGKYQIFANTGHFKGNVVAIKHVNKKRIELTRQVLFELKHMRDVQFNHLTRFIGACIDPPNICIVTEYCPRGSLQDILENDSINLDWMFRYSLINDLVKGMAFLHNSIISSHGSLKSSNCVVDSRFVLKITDYGLASFRSTAEPDDSHALYAKKLWTAPELLSGNPLPTTGMQKADVYSFGIILQEIALRSGPFYLEGLDLSPKEIVQKVRNGQRPYFRPSIDRTQLNEELVLLMERCWAQDPAERPDFGQIKGFIRRFNKEGGTSILDNLLLRMEQYANNLEKLVEERTQAYLEEKRKAEALLYQILPHSVAEQLKRGETVQAEAFDSVTIYFSDIVGFTALSAESTPMQVVTLLNDLYTCFDAIIDNFDVYKVETIGDAYMVVSGLPGRNGQRHAPEIARMALALLDAVSSFRIRHRPHDQLRLRIGVHTGKADSHSSPSLHLSQTLPTCFFSKGQSVLGLLA

SEQ ID NO: 14411 - protein, 561 aa, Homo sapiens
MEPLQQQQQQQQQQQKQPHLAPLQMDAREKQGQQMREAQFLYAQKLVTQPTLLSATAGRPSGSTPLGPLARVPPTAAVAQVFERGNMNSEPEEEDGGLEDEDGDDEVAEVAEKETQAASKYFHVQKVARQDPRVAPMSNLLPAPGLPPHGQQAKEDHTKDASKASPSVSTAGQPNWNLDEQLKQNGGLAWSDDADGGRGREISRDFAKLYELDGDPERKEFLDDLFVFMQKRGTPINRIPIMAKQILDLYMLYKLVTEKGGLVEIINKKIWREITKGLNLPTSITSAAFTLRTQYMKYLYAYECEKKALSSPAELQAAIDGNRREGRRPSYSSSLFGYSPAAATAAAAAGAPALLSPPKIRFPILGLGSSSGTNTSSPRISPATTLRKGDGAPVTTVPVPNRLAVPVTLASQQAGTRTAALEQLRERLESGEPAEKKASRLSEEEQRLVQQAFQRNFFSMARQLPMKIRINGRAEDRAEASAAALNLTTSSIGSINMSVDIDGTTYAGVLFAQKPVVHLITGSAPQSLGSSASSSSSSHCSPSPTSSRGTPSAEPSTSWSL

SEQ ID NO: 14412 - protein, 435 aa, Homo sapiens
MEPLQQQQQQQQQQQKQPHLAPLQMDAREKQGQQMREAQFLYAQKLVTQPTLLSATAGRPSGSTPLGPLARVPPTAAVAQVFERGNMNSEPEEEDGGLEDEDGDDEVAEVAEKETQAASKYFHVQKVARQDPRVAPMSNLLPAPGLPPHGQQAKEDHTKDASKASPSVSTAGQPNWNLDEQLKQNGGLAWSDDADGGRGREISRDFAKLYELDGDPERKEFLDDLFVFMQKRGTPINRIPIMAKQILDLYMLYKLVTEKGGLVEIINKKIWREITKGLNLPTSITSAAFTLRTQYMKYLYAYECEKKALSSPAELQAAIDGNRREGRRPSYSSSLFGYSPAAATAAAAAGAPALLSPPKIRFPILGLGSSSGTNTSSPRISPATTLRKGQQGSWGRRKKGRKGCQFPVFKTGVLGQEGQLWIGPAPVPLQVMEPQ

SEQ ID NO: 14413 - protein, 560 aa, Homo sapiens
MEPLQQQQQQQQQQQKQPHLAPLQMDAREKQGQQMREAQFLYAQKLVTQPTLLSATAGRPSGSTPLGPLARVPPTAAVAQVFERGNMNSEPEEEDGGLEDEDGDDEVAEVAEKETQAASKYFHVQKVARQDPRVAPMSNLLPAPGLPPHGQQAKEDHTKDASKASPSVSTAGQPNWNLDEQLKQNGGLAWSDDADGGRGREISRDFAKLYELDGDPERKEFLDDLFVFMQKRGTPINRIPIMAKQILDLYMLYKLVTEKGGLVEIINKKIWREITKGLNLPTSITSAAFTLRTQYMKYLYAYECEKKALSSPAELQAAIDGNRREGRRPSYSSSLFGYSPAAATAAAAAGAPALLSPPKIRFPILGLGSSSGTNTSSPRISPATTLRKGDGAPVTTVPVPNRLAVPVTLASQQAGTRTAALEQLRERLESGEPAEKKASRLSEEEQRLVQQAFQRNFFSMARQLPMKIRINGREDRAEASAAALNLTTSSIGSINMSVDIDGTTYAGVLFAQKPVVHLITGSAPQSLGSSASSSSSSHCSPSPTSSRGTPSAEPSTSWSL

SEQ ID NO: 14414 - protein, 755 aa, Homo sapiens
MASVHESLYFNPMMTNGVVHANVFGIKDWVTPYKIAVLVLLNEMSRTGEGAVSLMERRRLNQLLLPLLQGPDITLSKLYKLIEESCPQLANSVQIRIKLMAEGELKDMEQFFDDLSDSFSGTEPEVHKTSVVGLFLRHMILAYSKLSFSQVFKLYTALQQYFQNGEKKTVEDADMELTSRDEGERKMEKEELDVSVREEEVSCSGPLSQKQAEFFLSQQASLLKNDETKALTPASLQKELNNLLKFNPDFAEAHYLSYLNNLRVQDVFSSTHSLLHYFDRLILTGAESKSNGEEGYGRSLRYAALNLAALHCRFGHYQQAELALQEAIRIAQESNDHVCLQHCLSWLYVLGQKRSDSYVLLEHSVKKAVHFGLPYLASLGIQSLVQQRAFAGKTANKLMDALKDSDLLHWKHSLSELIDISIAQKTAIWRLYGRSTMALQQAQMLLSMNSLEAVNAGVQQNNTESFAVALCHLAELHAEQGCFAAASEVLKHLKERFPPNSQHAQLWMLCDQKIQFDRAMNDGKYHLADSLVTGITALNSIEGVYRKAVVLQAQNQMSEAHKLLQKLLVHCQKLKNTEMVISVLLSVAELYWRSSSPTIALPMLLQALALSKEYRLQYLASETVLNLAFAQLILGIPEQALSLLHMAIEPILADGAILDKGRAMFLVAKCQVASAASYDQPKKAEALEAAIENLNEAKNYFAKVDCKERIRDVVYFQARLYHTLGKTQERNRCAMLFRQLHQELPSHGVPLINHL

SEQ ID NO: 14415 - protein, 219 aa, Homo sapiens
MLSPCLSSYFVGLFLRHMILAYSKLSFSQVFKLYTALQQYFQNGEKKTVEDADMELTSRDEGERKMEKEELDVSVREEEVSCSGPLSQKQAEFFLSQQASLLKNDETKALTPASLQKELNNLLKFNPDFAEAHYLSYLNNLRVQDVFSSTHSLLHYFDRLILTGAESKSNGEEGYGRSLRYAALNLAALHCRFGHYTSPPWEYSPLFNRELLLGRRQTS

SEQ ID NO: 14416 - protein, 643 aa, Homo sapiens
MAEGELKDMEQFFDDLSDSFSGTEPEVHKTSVVGLFLRHMILAYSKLSFSQVFKLYTALQQYFQNGEKKTVEDADMELTSRDEGERKMEKEELDVSVREEEVSCSGPLSQKQAEFFLSQQASLLKNDETKALTPASLQKELNNLLKFNPDFAEAHYLSYLNNLRVQDVFSSTHSLLHYFDRLILTGAESKSNGEEGYGRSLRYAALNLAALHCRFGHYQQAELALQEAIRIAQESNDHVCLQHCLSWLYVLGQKRSDSYVLLEHSVKKAVHFGLPRAFAGKTANKLMDALKDSDLLHWKHSLSELIDISIAQKTAIWRLYGRSTMALQQAQMLLSMNSLEAVNAGVQQNNTESFAVALCHLAELHAEQGCFAAASEVLKHLKERFPPNSQHAQLWMLCDQKIQFDRAMNDGKYHLADSLVTGITALNSIEGVYRKAVVLQAQNQMSEAHKLLQKLLVHCQKLKNTEMVISVLLSVAELYWRSSSPTIALPMLLQALALSKEYRLQYLASETVLNLAFAQLILGIPEQALSLLHMAIEPILADGAILDKGRAMFLVAKCQVASAASYDQPKKAEALEAAIENLNEAKNYFAKVDCKERIRDVVYFQARLYHTLGKTQERNRCAMLFRQLHQELPSHGVPLINHL

SEQ ID NO: 14417 - protein, 94 aa, Homo sapiens
MAPLKMLALVTLLLGASLQHIHAARGTNVGRECCLEYFKGAIPLRKLKTWYQTSEDCSRDAIVFVTVQGRAICSDPNNKRVKNAVKYLQSLERS

SEQ ID NO: 14418 - protein, 541 aa, Homo sapiens
MPSLLVLTFSPCVLLGWALLAGGTGGGGVGGGGGGAGIGGGRQEREALPPQKIEVLVLLPQDDSYLFSLTRVRPAIEYALRSVEGNGTGRRLLPPGTRFQVAYEDSDCGNRALFSLVDRVAAARGAKPDLILGPVCEYAAAPVARLASHWDLPMLSAGALAAGFQHKDSEYSHLTRVAPAYAKMGEMMLALFRHHHWSRAALVYSDDKLERNCYFTLEGVHEVFQEEGLHTSIYSFDETKDLDLEDIVRNIQASERVVIMCASSDTIRSIMLVAHRHGMTSGDYAFFNIELFNSSSYGDGSWKRGDKHDFEAKQAYSSLQTVTLLRTVKPEFEKFSMEVKSSVEKQGLNMEDYVNMFVEGFHDAILLYVLALHEVLRAGYSKKDGGKIIQQTWNRTFEGIAGQVSIDANGDRYGDFSVIAMTDVEAGTQEVIGDYFGKEGRFEMRPNVKYPWGPLKLRIDENRIVEHTNSSPCKSSGGLEESAVTGIVVGALLGAGLLMAFYFFRKKYRITIERRTQQEESNLGKHRELREDSIRSHFSVA

SEQ ID NO: 14419 - protein, 540 aa, Homo sapiens
MPSLLVLTFSPCVLLGWALLAGGTGGGGVGGGGGGAGIGGGRQEREALPPQKIEVLVLLPQDDSYLFSLTRVRPAIEYALRSVEGNGTGRRLLPPGTRFQVAYEDSDCGNRALFSLVDRVAAARGAKPDLILGPVCEYAAAPVARLASHWDLPMLSAGALAAGFQHKDSEYSHLTRVAPAYAKMGEMMLALFRHHHWSRAALVYSDDKLERNCYFTLEGVHEVFQEEGLHTSIYSFDETKDLDLEDIVRNIQASERVVIMCASSDTIRSIMLVAHRHGMTSGDYAFFNIELFNSSSYGDGSWKRGDKHDFEAKQAYSSLQTVTLLRTVKPEFEKFSMEVKSSVEKQGLNMEDYVNMFVEGFHDAILLYVLALHEVLRAGYSKKDGGKIIQQTWNRTFEGIAGQVSIDANGDRYGDFSVIAMTDVEAGTQEVIGDYFGKEGRFEMRPNVKYPWGPLKLRIDENRIVEHTNSSPCKSCGLEESAVTGIVVGALLGAGLLMAFYFFRKKYRITIERRTQQEESNLGKHRELREDSIRSHFSVA

SEQ ID NO: 14420 - protein, 324 aa, Homo sapiens
MEPSALGPWSLFPDLAPRDQEGQVLAPRRCFRRECGQNEKVVIMCASSDTIRSIMLVAHRHGMTSGDYAFFNIELFNSSSYGDGSWKRGDKHDFEAKQAYSSLQTVTLLRTVKPEFEKFSMEVKSSVEKQGLNMEDYVNMFVEGFHDAILLYVLALHEVLRAGYSKKDGGKIIQQTWNRTFEGIAGQVSIDANGDRYGDFSVIAMTDVEAGTQEVIGDYFGKEGRFEMRPNVKYPWGPLKLRIDENRIVEHTNSSPCKSCGLEESAVTGIVVGALLGAGLLMAFYFFRKKYRITIERRTQQEESNLGKHRELREDSIRSHFSVA

SEQ ID NO: 14421 - protein, 1257 aa, Homo sapiens
MKAADEPAYLTVGTDVSAKYRGAFCEAKIKTVKRLVKVKVLLKQDNTTQLVQDDQVKGPLRVGAIVETRTSDGSFQEAIISKLTDASWYTVVFDDGDERTLRRTSLCLKGERHFAESETLDQLPLTNPEHFGTPVIAKKTNRGRRSSLPVTEDEKEEESSEEEDEDKRRLNDELLGKVVSVVSATERTEWYPALVISPSCNDDITVKKDQCLVRSFIDSKFYSIARKDIKEVDILNLPESELSTKPGLQKASIFLKTRVVPDNWKMDISEILESSSSDDEDGPAEENDEEKEKEAKKTEEEVPEEELDPEERDNFLQQLYKFMEDRGTPINKPPVLGYKDLNLFKLFRLVYHQGGCDNIDSGAVWKQIYMDLGIPILNSAASYNVKTAYRKYLYGFEEYCRSANIQFRTVHHHEPKVKEEKKDLEESMEEALKLDQEMPLTEVKSEPEENIDSNSESEREEIELKSPRGRRRIARDVNSIKKEIEEEKTEDKLKDNDTENKDVDDDYETAEKKENELLLGRKNTPKQKEKKIKKQEDSDKDSDEEEEKSQEREETESKCDSEGEEDEEDMEPCLTGTKVKVKYGRGKTQKIYEASIKSTEIDDGEVLYLVHYYGWNVRYDEWVKADRIIWPLDKGGPKKKQKKKAKNKEDSEKDEKRDEERQKSKRGRPPLKSTLSSNMPYGLSKTANSEGKSDSCSSDSETEDALEKNLINEELSLKDELEKNENLNDDKLDEENPKISAHILKENDRTQMQPLETLKLEVGENEQIVQIFGNKMEKTEEVKKEAEKSPKGKGRRSKTKDLSLEIIKISSFGQNEAGSEPHIEAHSLELSSLDNKNFSSATEDEIDQCVKEKKLKRKILGQSSPEKKIRIENGMEMTNTVSQERTSDCIGSEGMKNLNFEQHFERENEGMPSLIAESNQCIQQLTSERFDSPAEETVNIPLKEDEDAMPLIGPETLVCHEVDLDDLDEKDKTSIEDVAVESSESNSLVSIPPALPPVVQHNFSVASPLTLSQDESRSVKSESDITIEVDSIAEESQEGLCERESANGFETNVASGTCSIIVQERESREKGQKRPSDGNSGLMAKKQKRTPKRTSAAAKNEKNGTGQSSDSEDLPVLDNSSKCTPVKHLNVSKPQKLARSPARISPHIKDGEKDKHREKHPNSSPRTYKWSFQLNELDNMNSTERISFLQEKLQEIRKYYMSLKSEVATIDRRRKRLKKKDREVSHAGASMSSASSDTGMSPSSSSPPQNVLAVECR

SEQ ID NO: 14422 - protein, 1203 aa, Homo sapiens
MKAADEPAYLTVGTDVSAKYRGAFCEAKIKTVKRLVKVKVLLKQDNTTQLVQDDQVKGPLRVGAIVETRTSDGSFQEAIISKLTDASWYTVVFDDGDERTLRRTSLCLKGERHFAESETLDQLPLTNPEHFGTPVIAKKTNRGRRSSLPVTEDEKEEESSEEEDEDKRRLNDELLGKVVSVVSATERTEWYPALVISPSCNDDITVKKDQCLVRSFIDSKFYSIARKDIKEVDILNLPESELSTKPGLQKASIFLKTRVVPDNWKMDISEILESSSSDDEDGPAEENDEEKEKEAKKTEEEVPEEELDPEERDNFLQQLYKFMEDRGTPINKPPVLGYKDLNLFKLFRLVYHQGGCDNIDSGAVWKQIYMDLGIPILNSAASYNVKTAYRKYLYGFEEYCRSANIQFRTVHHHEPKVKEEKKDLEESMEEALKLDQEMPLTEVKSEPEENIDSNSESEREEIELKSPRGRRRIARDVNSIKKEIEEEKTEDKLKDNDTENKDVDDDYETAEKKENELLLGRKNTPKQKEKKIKKQEDSDKDSDEEEEKSQEREETESKCDSEGEEDEEDMEPCLTGTKVKVKYGRGKTQKIYEASIKSTEIDDGEVLYLVHYYGWNVRYDEWVKADRIIWPLDKGGPKKKQKKKAKNKEDSEKDEKRDEERQKSKRGRPPLKSTLSSNMPYGLSKTANSEGKSDSCSSDSETEDALEKNLINEELSLKDELEKNENLNDDKLDEENPKISAHILKENDRTQMQPLETLKLEVGENEQIVQIFGNKMEKTEEVKKEAEKSPKGKGRRSKTKDLSLEIIKISSFGQNEAGSEPHIEAHSLELSSLDNKNFSSATEDEIDQCVKEKKLKRKILGQSSPEKKIRIENGMEMTNTVSQERTSDCIGSEGMKNLNFEQHFERENEGMPSLIAESNQCIQQLTSERFDSPAEETVNIPLKEDEDAMPLIGPETLVCHEVDLDDLDEKDKTSIEDVAVESSESNSLVSIPPALPPVVQHNFSVASPLTLSQDESRSVKSESDITIEVDSIAEESQEGLCERESANGFETNVASGTCSIIVQERESREKGQKRPSDGNSGLMAKKQKRTPKRTSAAAKNEKNGTGQSSDSEDLPVLDNSNELDNMNSTERISFLQEKLQEIRKYYMSLKSEVATIDRRRKRLKKKDREVSHAGASMSSASSDTGMSPSSSSPPQNVLAVECR

SEQ ID NO: 14423 - protein, 1188 aa, Homo sapiens
MKAADEPAYLTVGTDVSAKYRGAFCEAKIKTVKRLVKVKVLLKQDNTTQLVQDDQVKGPLRVGAIVETRTSDGSFQEAIISKLTDASWYTVVFDDGDERTLRRTSLCLKGERHFAESETLDQLPLTNPEHFGTPVIAKKTNRGRRSSLPVTEDEKEEESSEEEDEDKRRLNDELLGKVVSVVSATERTEWYPALVISPSCNDDITVKKDQCLVRSFIDSKFYSIARKDIKEVDILNLPESELSTKPGLQKASIFLKTRVVPDNWKMDISEILESSSSDDEDGPAEENDEEKEKEAKKTEEEVPEEELDPEERDNFLQQLYKFMEDRGTPINKPPVLGYKDLNLFKLFRLVYHQGGCDNIDSGAVWKQIYMDLGIPILNSAASYNVKTAYRKYLYGFEEYCRSANIQFRTVHHHEPKVKEEKKDLEESMEEALKLDQEMPLTEVKSEPEENIDSNSESEREEIELKSPRGRRRIARDVNSIKKEIEEEKTEDKLKDNDTENKDVDDDYETAEKKENELLLGRKNTPKQKEKKIKKQEDSDKDSDEEEEKSQEREETESKCDSEGEEDEEDMEPCLTGTKVKVKYGRGKTQKIYEASIKSTEIDDGEVLYLVHYYGWNVRYDEWVKADRIIWPLDKGGPKKKQKKKAKNKEDSEKDEKRDEERQKSKRGRPPLKSTLSSNMPYGLSKTANSEGKSDSCSSDSETEDALEKNLINEELSLKDELEKNENLNDDKLDEENPKISAHILKENDRTQMQPLETLKLEVGENEQIVQIFGNKMEKTEEVKKEAEKSPKGKGRRSKTKDLSLEIIKISSFGQNEAGSEPHIEAHSLELSSLDNKNFSSATEDEIDQCVKEKKLKRKILGQSSPEKKIRIENGMEMTNTVSQERTSDCIGSEGMKNLNFEQHFERENEGMPSLIAESNQCIQQLTSERFDSPAEETVNIPLKEDEDAMPLIGPETLVCHEVDLDDLDEKDKTSIEDVAVESSESNSLVSIPPALPPVVQHNFSVASPLTLSQDESRSVKSESDITIEVDSIAEESQEGLCERESANGFETNVASGTCSIIVQERESREKGQKRPSDGNSGLMAKKQKRTPKRTSAAAKNEKNGTDELDNMNSTERISFLQEKLQEIRKYYMSLKSEVATIDRRRKRLKKKDREVSHAGASMSSASSDTGMSPSSSSPPQNVLAVECR

SEQ ID NO: 14424 - protein, 89 aa, Homo sapiens
MKGLAAALLVLVCTMALCSCAQVGTNKELCCLVYTSWQIPQKFIVDYSETSPQCPKPGVILLTKRGRQICADPNKKWVQKYISDLKLNA

SEQ ID NO: 14425 - protein, 1380 aa, Homo sapiens
MASGRDERPPWRLGRLLLLMCLLLLGSSARAAHIKKAEATTTTTSAGAEAAEGQFDRYYHEEELESALREAAAAGLPGLARLFSIGRSVEGRPLWVLRLTAGLGSLIPEGDAGPDAAGPDAAGPLLPGRPQVKLVGNMHGDETVSRQVLIYLARELAAGYRRGDPRLVRLLNTTDVYLLPSLNPDGFERAREGDCGFGDGGPSGASGRDNSRGRDLNRSFPDQFSTGEPPALDEVPEVRALIEWIRRNKFVLSGNLHGGSVVASYPFDDSPEHKATGIYSKTSDDEVFKYLAKAYASNHPIMKTGEPHCPGDEDETFKDGITNGAHWYDVEGGMQDYNYVWANCFEITLELSCCKYPPASQLRQEWENNRESLITLIEKVHIGVKGFVKDSITGSGLENATISVAGINHNITTGRFGDFYRLLVPGTYNLTVVLTGYMPLTVTNVVVKEGPATEVDFSLRPTVTSVIPDTTEAVSTASTVAIPNILSGTSSSYQPIQPKDFHHHHFPDMEIFLRRFANEYPNITRLYSLGKSVESRELYVMEISDNPGVHEPGEPEFKYIGNMHGNEVVGRELLLNLIEYLCKNFGTDPEVTDLVHNTRIHLMPSMNPDGYEKSQEGDSISVIGRNNSNNFDLNRNFPDQFVQITDPTQPETIAVMSWMKSYPFVLSANLHGGSLVVNYPFDDDEQGLATYSKSPDDAVFQQIALSYSKENSQMFQGRPCKNMYPNEYFPHGITNGASWYNVPGGMQDWNYLQTNCFEVTIELGCVKYPLEKELPNFWEQNRRSLIQFMKQVHQGVRGFVLDATDGRGILNATISVAEINHPVTTYKTGDYWRLLVPGTYKITASARGYNPVTKNVTVKSEGAIQVNFTLVRSSTDSNNESKKGKGASSSTNDASDPTTKEFETLIKDLSAENGLESLMLRSSSNLALALYRYHSYKDLSEFLRGLVMNYPHITNLTNLGQSTEYRHIWSLEISNKPNVSEPEEPKIRFVAGIHGNAPVGTELLLALAEFLCLNYKKNPAVTQLVDRTRIVIVPSLNPDGRERAQEKDCTSKIGQTNARGKDLDTDFTNNASQPETKAIIENLIQKQDFSLSVALDGGSMLVTYPYDKPVQTVENKETLKHLASLYANNHPSMHMGQPSCPNKSDENIPGGVMRGAEWHSHLGSMKDYSVTYGHCPEITVYTSCCYFPSAARLPSLWADNKRSLLSMLVEVHKGVHGFVKDKTGKPISKAVIVLNEGIKVQTKEGGYFHVLLAPGVHNIIAIADGYQQQHSQVFVHHDAASSVVIVFDTDNRIFGLPRELVVTVSGATMSALILTACIIWCICSIKSNRHKDGFHRLRQHHDEYEDEIRMMSTGSKKSLLSHEFQDETDTEEETLYSSKH

SEQ ID NO: 14426 - protein, 1133 aa, Homo sapiens
MRFVLSGNLHGGSVVASYPFDDSPEHKATGIYSKTSDDEVFKYLAKAYASNHPIMKTGEPHCPGDEDETFKDGITNGAHWYDVEGGMQDYNYVWANCFEITLELSCCKYPPASQLRQEWENNRESLITLIEKVHIGVKGFVKDSITGSGLENATISVAGINHNITTGRFGDFYRLLVPGTYNLTVVLTGYMPLTVTNVVVKEGPATEVDFSLRPTVTSVIPDTTEAVSTASTVAIPNILSGTSSSYQPIQPKDFHHHHFPDMEIFLRRFANEYPNITRLYSLGKSVESRELYVMEISDNPGVHEPGEPEFKYIGNMHGNEVVGRELLLNLIEYLCKNFGTDPEVTDLVHNTRIHLMPSMNPDGYEKSQEGDSISVIGRNNSNNFDLNRNFPDQFVQITDPTQPETIAVMSWMKSYPFVLSANLHGGSLVVNYPFDDDEQGLATYSKSPDDAVFQQIALSYSKENSQMFQGRPCKNMYPNEYFPHGITNGASWYNVPGGMQDWNYLQTNCFEVTIELGCVKYPLEKELPNFWEQNRRSLIQFMKQVHQGVRGFVLDATDGRGILNATISVAEINHPVTTYKTGDYWRLLVPGTYKITASARGYNPVTKNVTVKSEGAIQVNFTLVRSSTDSNNESKKGKGASSSTNDASDPTTKEFETLIKDLSAENGLESLMLRSSSNLALALYRYHSYKDLSEFLRGLVMNYPHITNLTNLGQSTEYRHIWSLEISNKPNVSEPEEPKIRFVAGIHGNAPVGTELLLALAEFLCLNYKKNPAVTQLVDRTRIVIVPSLNPDGRERAQEKDCTSKIGQTNARGKDLDTDFTNNASQPETKAIIENLIQKQDFSLSVALDGGSMLVTYPYDKPVQTVENKETLKHLASLYANNHPSMHMGQPSCPNKSDENIPGGVMRGAEWHSHLGSMKDYSVTYGHCPEITVYTSCCYFPSAARLPSLWADNKRSLLSMLVEVHKGVHGFVKDKTGKPISKAVIVLNEGIKVQTKEGGYFHVLLAPGVHNIIAIADGYQQQHSQVFVHHDAASSVVIVFDTDNRIFGLPRELVVTVSGATMSALILTACIIWCICSIKSNRHKDGFHRLRQHHDEYEDEIRMMSTGSKKSLLSHEFQDETDTEEETLYSSKH

SEQ ID NO: 14427 - protein, 1312 aa, Homo sapiens
MKALDEPPYLTVGTDVSAKYRGAFCEAKIKTAKRLVKVKVTFRHDSSTVEVQDDHIKGPLKVGAIVEVKNLDGAYQEAVINKLTDASWYTVVFDDGDEKTLRRSSLCLKGERHFAESETLDQLPLTNPEHFGTPVIGKKTNRGRRSNHIPEEESSSSSSDEDEDDRKQIDELLGKVVCVDYISLDKKKALWFPALVVCPDCSDEIAVKKDNILVRSFKDGKFTSVPRKDVHEITSDTAPKPDAVLKQAFEQALEFHKSRTIPANWKTELKEDSSSSEAEEEEEEEDDEKEKEDNSSEEEEEIEPFPEERENFLQQLYKFMEDRGTPINKRPVLGYRNLNLFKLFRLVHKLGGFDNIESGAVWKQVYQDLGIPVLNSAAGYNVKCAYKKYLYGFEEYCRSANIEFQMALPEKVVNKQCKECENVKEIKVKEENETEIKEIKMEEERNIIPREEKPIEDEIERKENIKPSLGSKKNLLESIPTHSDQEKEVNIKKPEDNENLDDKDDDTTRVDESLNIKVEAEEEKAKSGDETNKEEDEDDEEAEEEEEEEEEEEDEDDDDNNEEEEFECYPPGMKVQVRYGRGKNQKMYEASIKDSDVEGGEVLYLVHYCGWNVRYDEWIKADKIVRPADKNVPKIKHRKKIKNKLDKEKDKDEKYSPKNCKLRRLSKPPFQTNPSPEMVSKLDLTDAKNSDTAHIKSIEITSILNGLQASESSAEDSEQEDERGAQDMDNNGKEESKIDHLTNNRNDLISKEEQNSSSLLEENKVHADLVISKPVSKSPERLRKDIEVLSEDTDYEEDEVTKKRKDVKKDTTDKSSKPQIKRGKRRYCNTEECLKTGSPGKKEEKAKNKESLCMENSSNSSSDEDEEETKAKMTPTKKYNGLEEKRKSLRTTGFYSGFSEVAEKRIKLLNNSDERLQNSRAKDRKDVWSSIQGQWPKKTLKELFSDSDTEAAASPPHPAPEEGVAEESLQTVAEEESCSPSVELEKPPPVNVDSKPIEEKTVEVNDRKAEFPSSGSNSVLNTPPTTPESPSSVTVTEGSRQQSSVTVSEPLAPNQEEVRSIKSETDSTIEVDSVAGELQDLQSEGNSSPAGFDASVSSSSSNQPEPEHPEKACTGQKRVKDAQGGGSSSKKQKRSHKATVVNNKKKGKGTNSSDSEELSAGESITKSQPVKSVSTGMKSHSTKSPARTQSPGKCGKNGDKDPDLKEPSNRLPKVYKWSFQMSDLENMTSAERITILQEKLQEIRKHYLSLKSEVASIDRRRKRLKKKERESAATSSSSSSPSSSSITAAVMLTLAEPSMSSASQNGMSVECR

SEQ ID NO: 14428 - protein, 1226 aa, Homo sapiens
MKALDEPPYLTVGTDVSAKYRGAFCEAKIKTAKRLVKVKVTFRHDSSTVEVQDDHIKGPLKVGAIVEVKNLDGAYQEAVINKLTDASWYTVVFDDGDEKTLRRSSLCLKGERHFAESETLDQLPLTNPEHFGTPVIGKKTNRGRRSNHIPEEESSSSSSDEDEDDRKQIDELLGKVVCVDYISLDKKKALWFPALVVCPDCSDEIAVKKDNILVRSFKDGKFTSVPRKDVHEITSDTAPKPDAVLKQAFEQALEFHKSRTIPANWKTELKEDSSSSEAEEEEEEEDDEKEKEDNSSEEEEEIEPFPEERENFLQQLYKFMEDRGTPINKRPVLGYRNLNLFKLFRLVHKLGGFDNIESGAVWKQVYQDLGIPVLNSAAGYNVKCAYKKYLYGFEEYCRSANIEFQMALPEKVVNKQCKECENVKEIKVKEENETEIKEIKMEEERNIIPREEKPIEDEIERKENIKPSLGSKKNLLESIPTHSDQEKEVNIKKPEDNENLDDKDDDTTRVDESLNIKVEAEEEKAKSGYDEWIKADKIVRPADKNVPKIKHRKKIKNKLDKEKDKDEKYSPKNCKLRRLSKPPFQTNPSPEMVSKLDLTDAKNSDTAHIKSIEITSILNGLQASESSAEDSEQEDERGAQDMDNNGKEESKIDHLTNNRNDLISKEEQNSSSLLEENKVHADLVISKPVSKSPERLRKDIEVLSEDTDYEEDEVTKKRKDVKKDTTDKSSKPQIKRGKRRYCNTEECLKTGSPGKKEEKAKNKESLCMENSSNSSSDEDEEETKAKMTPTKKYNGLEEKRKSLRTTGFYSGFSEVAEKRIKLLNNSDERLQNSRAKDRKDVWSSIQGQWPKKTLKELFSDSDTEAAASPPHPAPEEGVAEESLQTVAEEESCSPSVELEKPPPVNVDSKPIEEKTVEVNDRKAEFPSSGSNSVLNTPPTTPESPSSVTVTEGSRQQSSVTVSEPLAPNQEEVRSIKSETDSTIEVDSVAGELQDLQSEGNSSPAGFDASVSSSSSNQPEPEHPEKACTGQKRVKDAQGGGSSSKKQKRSHKATVVNNKKKGKGTNSSDSEELSAGESITKSQPVKSVSTGMKSHSTKSPARTQSPGKCGKNGDKDPDLKEPSNRLPKVYKWSFQMSDLENMTSAERITILQEKLQEIRKHYLSLKSEVASIDRRRKRLKKKERESAATSSSSSSPSSSSITAAVMLTLAEPSMSSASQNGMSVECR

SEQ ID NO: 14429 - protein, 1153 aa, Homo sapiens
MKALDEPPYLTVGTDVSAKYRGAFCEAKIKTAKRLVKVKVTFRHDSSTVEVQDDHIKGPLKVGAIVEVKNLDGAYQEAVINKLTDASWYTVVFDDGDEKTLRRSSLCLKGERHFAESETLDQLPLTNPEHFGTPVIGKKTNRGRRSNHIPEEESSSSSSDEDEDDRKQIDELLGKVVCVDYISLDKKKALWFPALVVCPDCSDEIAVKKDNILVRSFKDGKFTSVPRKDVHEITSDTAPKPDAVLKQAFEQALEFHKSRTIPANWKTELKEDSSSSEAEEEEEEEDDEKEKEDNSSEEEEEIEPFPEERENFLQQLYKFMEDRGTPINKRPVLGYRNLNLFKLFRLVHKLGGFDNIESGAVWKQVYQDLGIPVLNSAAGYNVKCAYKKYLYGFEEYCRSANIEFQMALPEKVVNKQCKECENVKEIKVKEENETEIKEIKMEEERNIIPREEKPIEDEIERKENIKPSLGSKKNLLESIPTHSDQEKEVNIKKPEDNENLDDKDDDTTRVDESLNIKVEAEEEKAKSGDETNKEEDEDDEEAEEEEEEEEEEEDEDDDDNNEEEEFECYPPGMKVQVRYGRGKNQKMYEASIKDSDVEGGEVLYLVHYCGWNVRYDEWIKADKIVRPADKNVPKIKHRKKIKNKLDKEKDKDEKYSPKNCKLRRLSKPPFQTNPSPEMVSKLDLTDAKNSDTAHIKSIEITSILNGLQASESSAEDSEQEDERGAQDMDNNGKEESKIDHLTNNRNDLISKEEQNSSSLLEENKVHADLVISKPVSKSPERLRKDIEVLSEDTDYEEDEVTKKRKDVKKDTTDKSSKPQIKRGKRRYCNTEECLKTGSPGKKEEKAKNKESLCMENSSNSSSDEDEEETKAKMTPTKKYNGLEEKRKSLRTTGFYSGFSEVAEKRIKLLNNSDERLQNSRAKDRKDVWSSIQGQWPKKTLKELFSDSDTEAAASPPHPAPEEGVAEESLQTVAEEESCSPSVELEKPPPVNVDSKPIEEKTVEVNDRKAEFPSSGSNSVLNTPPTTPESPSSVTVTEGSRQQSSVTVSEPLAPNQEEVRSIKSETDSTIEVDSVAGELQDLQSEGNSSPAGFDASVSSSSSNQPEPEHPEKACTGQKRVKDAQGGGSSSKKQKRSHKATVVNNKKKGKGSAPH

SEQ ID NO: 14430 - protein, 803 aa, Homo sapiens
MEDRGTPINKRPVLGYRNLNLFKLFRLVHKLGGFDNIESGAVWKQVYQDLGIPVLNSAAGYNVKCAYKKYLYGFEEYCRSANIEFQMALPEKVVNKQCKECENVKEIKVKEENETEIKEIKMEEERNIIPREEKPIEDEIERKENIKPSLGSKKNLLESIPTHSDQEKEVNIKKPEDNENLDDKDDDTTRVDESLNIKVEAEEEKAKSGDETNKEEDEDDEEAEEEEEEEEEEEDEDDDDNNEEEEFECYPPGMKVQVRYGRGKNQKMYEASIKDSDVEGGEVLYLVHYCGWNVRYDEWIKADKIVRPADKNVPKIKHRKKIKNKLDKEKDKDEKYSPKNCKLRRLSKPPFQTNPSPEMVSKLDLTDAKNSDTAHIKSIEITSILNGLQASESSAEDSEQEDERGAQDMDNNGKEESKIDHLTNNRNDLISKEEQNSSSLLEENKVHADLVISKPVSKSPERLRKDIEVLSEDTDYEEDEVTKKRKDVKKDTTDKSSKPQIKRGKRRYCNTEECLKTGSPGKKEEKAKNKESLCMENSSNSSSDEDEEETKAKMTPTKKYNGLEEKRKSLRTTGFYSGFSEVAEKRIKLLNNSDERLQNSRAKDRKDVWSSIQGQWPKKTLKELFSDSDTEAAASPPHPAPEEGVAEESLQTVAEEESCSPSVELEKPPPVNVDSKPIEEKTVEVNDRKAEFPSSGSNSVLNTPPTTPESPSSVTVTEGSRQQSSVTVSEPLAPNQEEVRSIKSETDSTIEVDSVAGELQDLQSEGNSSPAGFDASVSSSSSNQPEPEHPEKGEKENVYVDLF

SEQ ID NO: 14431 - protein, 96 aa, Homo sapiens
MQIITTALVCLLLAGMWPEDVDSKSMQVPFSRCCFSFAEQEIPLRAILCYRNTSSICSNEGLIFKLKRGKEACALDTVGWVQRHRKMLRHCPSKRK

SEQ ID NO: 14432 - protein, 688 aa, Homo sapiens
MADLEAVLADVSYLMAMEKSKATPAARASKRIVLPEPSIRSVMQKYLAERNEITFDKIFNQKIGFLLFKDFCLNEINEAVPQVKFYEEIKEYEKLDNEEDRLCRSRQIYDAYIMKELLSCSHPFSKQAVEHVQSHLSKKQVTSTLFQPYIEEICESLRGDIFQKFMESDKFTRFCQWKNVELNIHLTMNEFSVHRIIGRGGFGEVYGCRKADTGKMYAMKCLDKKRIKMKQGETLALNERIMLSLVSTGDCPFIVCMTYAFHTPDKLCFILDLMNGGDLHYHLSQHGVFSEKEMRFYATEIILGLEHMHNRFVVYRDLKPANILLDEHGHARISDLGLACDFSKKKPHASVGTHGYMAPEVLQKGTAYDSSADWFSLGCMLFKLLRGHSPFRQHKTKDKHEIDRMTLTVNVELPDTFSPELKSLLEGLLQRDVSKRLGCHGGGSQEVKEHSFFKGVDWQHVYLQKYPPPLIPPRGEVNAADAFDIGSFDEEDTKGIKLLDCDQELYKNFPLVISERWQQEVTETVYEAVNADTDKIEARKRAKNKQLGHEEDYALGKDCIMHGYMLKLGNPFLTQWQRRYFYLFPNRLEWRGEGESRQNLLTMEQILSVEETQIKDKKCILFRIKGGKQFVLQCESDPEFVQWKKELNETFKEAQRLLRRAPKFLNKPRSGTVELPKPSLCHRNSNGL

SEQ ID NO: 14433 - protein, 2663 aa, Homo sapiens
MPKGGCPKAPQQEELPLSSDMVEKQTGKKDKDKVSLTKTPKLERGDGGKEVRERASKRKLPFTAGANGEQKDSDTEKQGPERKRIKKEPVTRKAGLLFGMGLSGIRAGYPLSERQQVALLMQMTAEESANSPVDTTPKHPSQSTVCQKGTPNSASKTKDKVNKRNERGETRLHRAAIRGDARRIKELISEGADVNVKDFAGWTALHEACNRGYYDVAKQLLAAGAEVNTKGLDDDTPLHDAANNGHYKVVKLLLRYGGNPQQSNRKGETPLKVANSPTMVNLLLGKGTYTSSEESSTESSEEEDAPSFAPSSSVDGNNTDSEFEKGLKHKAKNPEPQKATAPVKDEYEFDEDDEQDRVPPVDDKHLLKKDYRKETKSNSFISIPKMEVKSYTKNNTIAPKKASHRILSDTSDEEDASVTVGTGEKLRLSAHTILPGSKTREPSNAKQQKEKNKVKKKRKKETKGREVRFGKRSDKFCSSESESESSESGEDDRDSLGSSGCLKGSPLVLKDPSLFSSLSASSTSSHGSSAAQKQNPSHTDQHTKHWRTDNWKTISSPAWSEVSSLSDSTRTRLTSESDYSSEGSSVESLKPVRKRQEHRKRASLSEKKSPFLSSAEGAVPKLDKEGKVVKKHKTKHKHKNKEKGQCSISQELKLKSFTYEYEDSKQKSDKAILLENDLSTENKLKVLKHDRDHFKKEEKLSKMKLEEKEWLFKDEKSLKRIKDTNKDISRSFREEKDRSNKAEKERSLKEKSPKEEKLRLYKEERKKKSKDRPSKLEKKNDLKEDKISKEKEKIFKEDKEKLKKEKVYREDSAFDEYCNKNQFLENEDTKFSLSDDQRDRWFSDLSDSSFDFKGEDSWDSPVTDYRDMKSDSVAKLILETVKEDSKERRRDSRAREKRDYREPFFRKKDRDYLDKNSEKRKEQTEKHKSVPGYLSEKDKKRRESAEAGRDRKDALESCKERRDGRAKPEEAHREELKECGCESGFKDKSDGDFGKGLEPWERHHPAREKEKKDGPDKERKEKTKPERYKEKSSDKDKSEKSILEKCQKDKEFDKCFKEKKDTKEKHKDTHGKDKERKASLDQGKEKKEKAFPGIISEDFSEKKDDKKGKEKSWYIADIFTDESEDDRDSCMGSGFKMGEASDLPRTDGLQEKEEGREAYASDRHRKSSDKQHPERQKDKEPRDRRKDRGAADAGRDKKEKVFEKHKEKKDKESTEKYKDRKDRASVDSTQDKKNKQKLPEKAEKKHAAEDKAKSKHKEKSDKEHSKERKSSRSADAEKSLLEKLEEEALHEYREDSNDKISEVSSDSFTDRGQEPGLTAFLEVSFTEPPGDDKPRESACLPEKLKEKERHRHSSSSSKKSHDRERAKKEKAEKKEKGEDYKEGGSRKDSGQYEKDFLEADAYGVSYNMKADIEDELDKTIELFSTEKKDKNDSEREPSKKIEKELKPYGSSAINILKEKKKREKHREKWRDEKERHRDRHADGLLRHHRDELLRHHRDEQKPATRDKDSPPRVLKDKSRDEGPRLGDAKLKEKFKDGAEKEKGDPVKMSNGNDKVAPSKDPGKKDARPREKLLGDGDLMMTSFERMLSQKDLEIEERHKRHKERMKQMEKLRHRSGDPKLKEKAKPADDGRKKGLDIPAKKPPGLDPPFKDKKLKESTPIPPAAENKLHPASGADSKDWLAGPHMKEVLPASPRPDQSRPTGVPTPTSVLSCPSYEEVMHTPRTPSCSADDYADLVFDCADSQHSTPVPTAPTSACSPSFFDRFSVASSGLSENASQAPARPLSTNLYRSVSVDIRRTPEEEFSVGDKLFRQQSVPAASSYDSPMPPSMEDRAPLPPVPAEKFACLSPGYYSPDYGLPSPKVDALHCPPAAVVTVTPSPEGVFSSLQAKPSPSPRAELLVPSLEGALPPDLDTSEDQQATAAIIPPEPSYLEPLDEGPFSAVITEEPVEWAHPSEQALASSLIGGTSENPVSWPVGSDLLLKSPQRFPESPKRFCPADPLHSAAPGPFSASEAPYPAPPASPAPYALPVAEPGLEDVKDGVDAVPAAISTSEAAPYAPPSGLESFFSNCKSLPEAPLDVAPEPACVAAVAQVEALGPLENSFLDGSRGLSHLGQVEPVPWADAFAGPEDDLDLGPFSLPELPLQTKDAADGEAEPVEESLAPPEEMPPGAPGVINGGDVSTVVAEEPPALPPDQASTRLPAELEPEPSGEPKLDVALEAAVEAETVPEERARGDPDSSVEPAPVPPEQRPLGSGDQGAEAEGPPAASLCAPDGPAPNTVAQAQAADGAGPEDDTEASRAAAPAEGPPGGIQPEAAEPKPTAEAPKAPRVEEIPQRMTRNRAQMLANQSKQGPPPSEKECAPTPAPVTRAKARGSEDDDAQAQHPRKRRFQRSTQQLQQQLNTSTQQTREVIQQTLAAIVDAIKLDAIEPYHSDRANPYFEYLQIRKKIEEKRKILCCITPQAPQCYAEYVTYTGSYLLDGKPLSKLHIPVIAPPPSLAEPLKELFRQQEAVRGKLRLQHSIEREKLIVSCEQEILRVHCRAARTIANQAVPFSACTMLLDSEVYNMPLESQGDENKSVRDRFNARQFISWLQDVDDKYDRMKTCLLMRQQHEAAALNAVQRMEWQLKVQELDPAGHKSLCVNEVPSFYVPMVDVNDDFVLLPA

SEQ ID NO: 14434 - protein, 119 aa, Homo sapiens
MAGLMTIVTSLLFLGVCAHHIIPTGSVVIPSPCCMFFVSKRIPENRVVSYQLSSRSTCLKAGVIFTTKKGQQFCGDPKQEWVQRYMKNLDAKQKKASPRARAVAVKGPVQRYPGNQTTC

SEQ ID NO: 14435 - protein, 150 aa, Homo sapiens
MNLWLLACLVAGFLGAWAPAVHTQGVFEDCCLAYHYPIGWAVLRRAWTYRIQEVSGSCNLPAAIFYLPKRHRKVCGNPKSREVQRAMKLLDARNKVFAKLHHNTQTFQAGPHAVKKLSSGNSKLSSSKFSNPISSSKRNVSLLISANSGL

SEQ ID NO: 14436 - protein, 84 aa, Homo sapiens
MNLWLLACLVAGFLGAWAPAVHTQGVFEDCCLAYHYPIGWAVLRRAWTYRIQEVSGSCNLPAAIRPSCCKEVEFWKLQVIIIQV

SEQ ID NO: 14437 - protein, 149 aa, Homo sapiens
MNLWLLACLVAGFLGAWAPAVHTQGVFEDCCLAYHYPIGWAVLRRAWTYRIQEVSGSCNLPAAIFYLPKRHRKVCGNPKSREVQRAMKLLDARNKVFAKLHHNTQTFQGPHAVKKLSSGNSKLSSSKFSNPISSSKRNVSLLISANSGL

SEQ ID NO: 14438 - protein, 94 aa, Homo sapiens
MMGLSLASAVLLASLLSLHLGTATRGSDISKTCCFQYSHKPLPWTWVRSYEFTSNSCSQRAVIFTTKRGKKVCTHPRKKWVQKYISLLKTPKQL

SEQ ID NO: 14439 - protein, 474 aa, Homo sapiens
MALAVAPWGRQWEEARALGRAVRMLQRLEEQCVDPRLSVSPPSLRDLLPRTAQLLREVAHSRRAAGGGGPGGPGGSGDFLLIYLANLEAKSRQVAALLPPRGRRSANDELFRAGSRLRRQLAKLAIIFSHMHAELHALFPGGKYCGHMYQLTKAPAHTFWRESCGARCVLPWAEFESLLGTCHPVEPGCTALALRTTIDLTCSGHVSIFEFDVFTRLFQPWPTLLKNWQLLAVNHPGYMAFLTYDEVQERLQACRDKPGSYIFRPSCTRLGQWAIGYVSSDGSILQTIPANKPLSQVLLEGQKDGFYLYPDGKTHNPDLTELGQAEPQQRIHVSEEQLQLYWAMDSTFELCKICAESNKDVKIEPCGHLLCSCCLAAWQHSDSQTCPFCRCEIKGWEAVSIYQFHGQATAEDSGNSSDQEGRELELGQVPLSAPPLPPRPDLPPRKPRNAQPKVRLLKGNSPPAALGPQDPAPA

SEQ ID NO: 14440 - protein, 428 aa, Homo sapiens
MALAVAPWGRQWEEARALGRAVRMLQRLEEQCVDPRLSVSPPSLRDLLPRTAQLLREVAHSRRAAGGGGPGGPGGSGDFLLIYLANLEAKSRQVAALLPPRGRRSANDELFRAGSRLRRQLAKLAIIFSHMHAELHALFPGGKYCGHMYQLTKAPAHTFWRESCGARCVLPWAEFESLLGTCHPVEPGCTALALRTTIDLTCSGHVSIFEFDVFTRLFQPWPTLLKNWQLLAVNHPGYMAFLTYDEVQERLQACRDKPGSYLYPDGKTHNPDLTELGQAEPQQRIHVSEEQLQLYWAMDSTFELCKICAESNKDVKIEPCGHLLCSCCLAAWQHSDSQTCPFCRCEIKGWEAVSIYQFHGQATAEDSGNSSDQEGRELELGQVPLSAPPLPPRPDLPPRKPRNAQPKVRLLKGNSPPAALGPQDPAPA

SEQ ID NO: 14441 - protein, 112 aa, Homo sapiens
MKGPPTFCSLLLLSLLLSPDPTAAFLLPPSTACCTQLYRKPLSDKLLRKVIQVELQEADGDCHLQAFVLHLAQRSICIHPQNPSLSQWFEHQERKLHGTLPKLNFGMLRKMG

SEQ ID NO: 14442 - protein, 443 aa, Homo sapiens
MDFPCLWLGLLLPLVAALDFNYHRQEGMEAFLKTVAQNYSSVTHLHSIGKSVKGRNLWVLVVGRFPKEHRIGIPEFKYVANMHGDETVGRELLLHLIDYLVTSDGKDPEITNLINSTRIHIMPSMNPDGFEAVKKPDCYYSIGRENYNQYDLNRNFPDAFEYNNVSRQPETVAVMKWLKTETFVLSANLHGGALVASYPFDNGVQATGALYSRSLTPDDDVFQYLAHTYASRNPNMKKGDECKNKMNFPNGVTNGYSWYPLQGGMQDYNYIWAQCFEITLELSCCKYPREEKLPSFWNNNKASLIEYIKQVHLGVKGQVFDQNGNPLPNVIVEVQDRKHICPYRTNKYGEYYLLLLPGSYIINVTVPGHDPHITKVIIPEKSQNFSALKKDILLPFQGQLDSIPVSNPSCPMIPLYRNLPDHSAATKPSLFLFLVSLLHIFFK

SEQ ID NO: 14443 - protein, 127 aa, Homo sapiens
MQQRGLAIVALAVCAALHASEAILPIASSCCTEVSHHISRRLLERVNMCRIQRADGDCDLAAVILHVKRRRICVSPHNHTVKQWMKVQAAKKNGKGNVCHRKKHHGKRNSNRAHQGKHETYGHKTPY

SEQ ID NO: 14444 - protein, 117 aa, Homo sapiens
MQQRGLAIVALAVCAALHASEAILPIASSCCTEVSHHISRRLLERVNMCRIQRADGDCDLAAVMLECSDMISAHYNLHLPGSNDSPTSAFQVAGITAFMSSAEESVSARTTILLSSG

SEQ ID NO: 14445 - protein, 2062 aa, Homo sapiens
MPKSGFTKPIQSENSDSDSNMVEKPYGRKSKDKIASYSKTPKIERSDVSKEMKEKSSMKRKLPFTISPSRNEERDSDTDSDPGHTSENWGERLISSYRTYSEKEGPEKKKTKKEAGNKKSTPVSILFGYPLSERKQMALLMQMTARDNSPDSTPNHPSQTTPAQKKTPSSSSRQKDKVNKRNERGETPLHMAAIRGDVKQVKELISLGANVNVKDFAGWTPLHEACNVGYYDVAKILIAAGADVNTQGLDDDTPLHDSASSGHRDIVKLLLRHGGNPFQANKHGERPVDVAETEELELLLKREVPLSDDDESYTDSEEAQSVNPSSVDENIDSETEKDSLICESKQILPSKTPLPSALDEYEFKDDDDEEINKMIDDRHILRKEQRKENEPEAEKTHLFAKQEKAFYPKSFKSKKQKPSRVLYSSTESSDEEALQNKKISTSCSVIPETSNSDMQTKKEYVVSGEHKQKGKVKRKLKNQNKNKENQELKQEKEGKENTRITNLTVNTGLDCSEKTREEGNFRKSFSPKDDTSLHLFHISTGKSPKHSCGLSEKQSTPLKQEHTKTCLSPGSSEMSLQPDLVRYDNTESEFLPESSSVKSCKHKEKSKHQKDFHLEFGEKSNAKIKDEDHSPTFENSDCTLKKMDKEGKTLKKHKLKHKEREKEKHKKEIEGEKEKYKTKDSAKELQRSVEFDREFWKENFFKSDETEDLFLNMEHESLTLEKKSKLEKNIKDDKSTKEKHVSKERNFKEERDKIKKESEKSFREEKIKDLKEERENIPTDKDSEFTSLGMSAIEESIGLHLVEKEIDIEKQEKHIKESKEKPEKRSQIKEKDIEKMERKTFEKEKKIKHEHKSEKDKLDLSECVDKIKEKDKLYSHHTEKCHKEGEKSKNTAAIKKTDDREKSREKMDRKHDKEKPEKERHLAESKEKHLMEKKNKQSDNSEYSKSEKGKNKEKDRELDKKEKSRDKESINITNSKHIQEEKKSSIVDGNKAQHEKPLSLKEKTKDEPLKTPDGKEKDKKDKDIDRYKERDKHKDKIQINSLLKLKSEADKPKPKSSPASKDTRPKEKRLVNDDLMQTSFERMLSLKDLEIEQWHKKHKEKIKQKEKERLRNRNCLELKIKDKEKTKHTPTESKNKELTRSKSSEVTDAYTKEKQPKDAVSNRSQSVDTKNVMTLGKSSFVSDNSLNRSPRSENEKPGLSSRSVSMISVASSEDSCHTTVTTPRPPVEYDSDFMLESSESQMSFSQSPFLSIAKSPALHERELDSLADLPERIKPPYANRLSTSHLRSSSVEDVKLIISEGRPTIEVRRCSMPSVICEHTKQFQTISEESNQGSLLTVPGDTSPSPKPEVFSNVPERDLSNVSNIHSSFATSPTGASNSKYVSADRNLIKNTAPVNTVMDSPVHLEPSSQVGVIQNKSWEMPVDRLETLSTRDFICPNSNIPDQESSLQSFCNSENKVLKENADFLSLRQTELPGNSCAQDPASFMPPQQPCSFPSQSLSDAESISKHMSLSYVANQEPGILQQKNAVQIISSALDTDNESTKDTENTFVLGDVQKTDAFVPVYSDSTIQEASPNFEKAYTLPVLPSEKDFNGSDASTQLNTHYAFSKLTYKSSSGHEVENSTTDTQVISHEKENKLESLVLTHLSRCDSDLCEMNAGMPKGNLNEQDPKHCPESEKCLLSIEDEESQQSILSSLENHSQQSTQPEMHKYGQLVKVELEENAEDDKTENQIPQRMTRNKANTMANQSKQILASCTLLSEKDSESSSPRGRIRLTEDDDPQIHHPRKRKVSRVPQPVQVSPSLLQAKEKTQQSLAAIVDSLKLDEIQPYSSERANPYFEYLHIRKKIEEKRKLLCSVIPQAPQYYDEYVTFNGSYLLDGNPLSKICIPTITPPPSLSDPLKELFRQQEVVRMKLRLQHSIEREKLIVSNEQEVLRVHYRAARTLANQTLPFSACTVLLDAEVYNVPLDSQSDDSKTSVRDRFNARQFMSWLQDVDDKFDKLKTCLLMRQQHEAAALNAVQRLEWQLKLQELDPATYKSISIYEIQEFYVPLVDVNDDFELTPI

SEQ ID NO: 14446 - protein, 2039 aa, Homo sapiens
MPKSGFTKPIQSENSDSDSNMVEKPYGRKSKDKIASYSKTPKIERSDVSKEMKEKSSMKRKLPFTISPSRNEERDSDTEKEGPEKKKTKKEAGNKKSTPVSILFGYPLSERKQMALLMQMTARDNSPDSTPNHPSQTTPAQKKTPSSSSRQKDKVNKRNERGETPLHMAAIRGDVKQVKELISLGANVNVKDFAGWTPLHEACNVGYYDVAKILIAAGADVNTQGLDDDTPLHDSASSGHRDIVKLLLRHGGNPFQANKHGERPVDVAETEELELLLKREVPLSDDDESYTDSEEAQSVNPSSVDENIDSETEKDSLICESKQILPSKTPLPSALDEYEFKDDDDEEINKMIDDRHILRKEQRKENEPEAEKTHLFAKQEKAFYPKSFKSKKQKPSRVLYSSTESSDEEALQNKKISTSCSVIPETSNSDMQTKKEYVVSGEHKQKGKVKRKLKNQNKNKENQELKQEKEGKENTRITNLTVNTGLDCSEKTREEGNFRKSFSPKDDTSLHLFHISTGKSPKHSCGLSEKQSTPLKQEHTKTCLSPGSSEMSLQPDLVRYDNTESEFLPESSSVKSCKHKEKSKHQKDFHLEFGEKSNAKIKDEDHSPTFENSDCTLKKMDKEGKTLKKHKLKHKEREKEKHKKEIEGEKEKYKTKDSAKELQRSVEFDREFWKENFFKSDETEDLFLNMEHESLTLEKKSKLEKNIKDDKSTKEKHVSKERNFKEERDKIKKESEKSFREEKIKDLKEERENIPTDKDSEFTSLGMSAIEESIGLHLVEKEIDIEKQEKHIKESKEKPEKRSQIKEKDIEKMERKTFEKEKKIKHEHKSEKDKLDLSECVDKIKEKDKLYSHHTEKCHKEGEKSKNTAAIKKTDDREKSREKMDRKHDKEKPEKERHLAESKEKHLMEKKNKQSDNSEYSKSEKGKNKEKDRELDKKEKSRDKESINITNSKHIQEEKKSSIVDGNKAQHEKPLSLKEKTKDEPLKTPDGKEKDKKDKDIDRYKERDKHKDKIQINSLLKLKSEADKPKPKSSPASKDTRPKEKRLVNDDLMQTSFERMLSLKDLEIEQWHKKHKEKIKQKEKERLRNRNCLELKIKDKEKTKHTPTESKNKELTRSKSSEVTDAYTKEKQPKDAVSNRSQSVDTKNVMTLGKSSFVSDNSLNRSPRSENEKPGLSSRSVSMISVASSEDSCHTTVTTPRPPVEYDSDFMLESSESQMSFSQSPFLSIAKSPALHERELDSLADLPERIKPPYANRLSTSHLRSSSVEDVKLIISEGRPTIEVRRCSMPSVICEHTKQFQTISEESNQGSLLTVPGDTSPSPKPEVFSNVPERDLSNVSNIHSSFATSPTGASNSKYVSADRNLIKNTAPVNTVMDSPVHLEPSSQVGVIQNKSWEMPVDRLETLSTRDFICPNSNIPDQESSLQSFCNSENKVLKENADFLSLRQTELPGNSCAQDPASFMPPQQPCSFPSQSLSDAESISKHMSLSYVANQEPGILQQKNAVQIISSALDTDNESTKDTENTFVLGDVQKTDAFVPVYSDSTIQEASPNFEKAYTLPVLPSEKDFNGSDASTQLNTHYAFSKLTYKSSSGHEVENSTTDTQVISHEKENKLESLVLTHLSRCDSDLCEMNAGMPKGNLNEQDPKHCPESEKCLLSIEDEESQQSILSSLENHSQQSTQPEMHKYGQLVKVELEENAEDDKTENQIPQRMTRNKANTMANQSKQILASCTLLSEKDSESSSPRGRIRLTEDDDPQIHHPRKRKVSRVPQPVQVSPSLLQAKEKTQQSLAAIVDSLKLDEIQPYSSERANPYFEYLHIRKKIEEKRKLLCSVIPQAPQYYDEYVTFNGSYLLDGNPLSKICIPTITPPPSLSDPLKELFRQQEVVRMKLRLQHSIEREKLIVSNEQEVLRVHYRAARTLANQTLPFSACTVLLDAEVYNVPLDSQSDDSKTSVRDRFNARQFMSWLQDVDDKFDKLKTCLLMRQQHEAAALNAVQRLEWQLKLQELDPATYKSISIYEIQEFYVPLVDVNDDFELTPI

SEQ ID NO: 14447 - protein, 361 aa, Homo sapiens
MAQPGDPRRLCRLVQEGRLRALKEELQAAGGCPGPAGDTLLHCAARHGHRDVLAYLAEAWGMDIEATNRDYKRPLHEAASMGHRDCVRYLLGRGAAVDCLKKADWTPLMMACTRKNLGVIQELVEHGANPLLKNKDGWNSFHIASREGDPLILQYLLTVCPGAWKTESKIRRTPLHTAAMHGHLEAVKVLLKRCQYEPDYRDNCGVTALMDAIQCGHIDVARLLLDEHGACLSAEDSLGAQALHRAAVTGQDEAIRFLVSELGVDVDVRATSTHLTALHYAAKEGHTSTIQTLLSLGADINSKDEKNRSALHLACAGQHLACAKFLLQSGLKDSEDITGTLAQQLPRRADVLQGSGHSAMT

SEQ ID NO: 14448 - protein, 304 aa, Homo sapiens
MAQPGDPRRLCRLVQEGRLRALKEELQAAGGCPGPAGDTLLHCAARHGHRDVLAYLAEAWGMDIEATNRDYKRPLHEAASMGHRDCVRYLLGRGAAVDCLKKADWTPLMMACTRKNLGVIQELVEHGANPLLKNKDGWNSFHIASREGDPLILQYLLTVCPGAWKTESKIRRTPLHTAAMHGHLEAVKVLLKRCQYEPDYRDNCGVTALMDAIQCGHIDVARLLLDEHGACLSAEDSLGAQALHRAAVTGQDEAIRFLVSELGVDVDVRATSTHLTALHYAAKPCIWPVQVSTWPVPSFSCSRD

SEQ ID NO: 14449 - protein, 341 aa, Homo sapiens
MPFPFGKSHKSPADIVKNLKESMAVLEKQDISDKKAEKATEEVSKNLVAMKEILYGTNEKEPQTEAVAQLAQELYNSGLLSTLVADLQLIDFEGKKDVAQIFNNILRRQIGTRTPTVEYICTQQNILFMLLKGYESPEIALNCGIMLRECIRHEPLAKIILWSEQFYDFFRYVEMSTFDIASDAFATFKDLLTRHKLLSAEFLEQHYDRFFSEYEKLLHSENYVTKRQSLKLLGELLLDRHNFTIMTKYISKPENLKLMMNLLRDKSRNIQFEAFHVFKVFVANPNKTQPILDILLKNQAKLIEFLSKFQNDRTEDEQFNDEKTYLVKQIRDLKRPAQQEA

SEQ ID NO: 14450 - protein, 395 aa, Homo sapiens
MLPAVGSVDEEEDPAEEDCPELVPIETTQSEEEEKSGLGAKIPVTIITGYLGAGKTTLLNYILTEQHSKRVAVILNESGEGSALEKSLAVSQGGELYEEWLELRNGCLCCSVKDNGLRAIENLMQKKGKFDDILLETTGLADPGAVTSMFWVDAELGSDIYLDGIITIVDSKYGLKHLTEEKPDGLINEATRQVALADIILINKTDLVPEEDVKKLRTTIRSINGLGQILETQRSRVDLSNVLDLHAFDSLSGISLQKKLQHVPGTQPHLDQSIVTITFEVPGNAKEEHLNMFIQNLLWEKNVRNKDNHCMEVIRLKGLVSIKDKSQQVIVQGVHELYDLEETPVSWKDDTERTNRLVLIGRNLDKDILKQLFIATVTETEKQWTTHFKEDQVCT

SEQ ID NO: 14451 - protein, 104 aa, Homo sapiens
MFIQNLLWEKNVRNKDNHCMEVIRLKGLVSIKDKSQQVIVQGVHELYDLEETPVSWKDDTERTNRLVLIGRNLDKDILKQLFIATVTETEKQWTTHFKEDQVCT

SEQ ID NO: 14452 - protein, 347 aa, Homo sapiens
MLPAVGSVDEEEDPAEEDCPELVPIETTQSEEEEKSGLGAKIPVTIITGYLGAGKTTLLNYILTEQHSKRVAVILNESGEGSALEKSLAVSQGGELYEEWLELRNGCLCCSVKDNGLRAIENLMQKKGKFDDILLETTGLADPGAVTSMFWVDAELGSDIYLDGIITIVDSKYGLKHLTEEKPDGLINEATRSINGLGQILETQRSSLQKKLQHVPGTQPHLDQSIVTITFEVPGNAKEEHLNMFIQNLLWEKNVRNKDNHCMEVIRLKGLVSIKDKSQQVIVQGVHELYDLEETPVSWKDDTERTNRLVLIGRNLDKDILKQLFIATVTETEKQWTTHFKEDQVCT

SEQ ID NO: 14453 - protein, 331 aa, Homo sapiens
MSRQLSRARPATVLGAMEMGRRMDAPTSAAVTRAFLERGHTEIDTAFVYSEGQSETILGGLGLRLGGSDCRVKIDTKAIPLFGNSLKPDSLRFQLETSLKRLQCPRVDLFYLHMPDHSTPVEETLRACHQLHQEGKFVELGLSNYAAWEVAEICTLCKSNGWILPTVYQGMYNAITRQVETELFPCLRHFGLRFYAFNPLAGGLLTGKYKYEDKNGKQPVGRFFGNTWAEMYRNRYWKEHHFEGIALVEKALQAAYGASAPSMTSATLRWMYHHSQLQGAHGDAVILGMSSLEQLEQNLAAAEEGPLEPAVVDAFNQAWHLVTHECPNYFR

SEQ ID NO: 14454 - protein, 2303 aa, Homo sapiens
MASSVAPYEQLVRQVEALKAENSHLRQELRDNSSHLSKLETETSGMKEVLKHLQGKLEQEARVLVSSGQTEVLEQLKALQMDITSLYNLKFQPPTLGPEPAARTPEGSPVHGSGPSKDSFGELSRATIRLLEELDRERCFLLNEIEKEEKEKLWYYSQLQGLSKRLDELPHVETQFSMQMDLIRQQLEFEAQHIRSLMEERFGTSDEMVQRAQIRASRLEQIDKELLEAQDRVQQTEPQALLAVKSVPVDEDPETEVPTHPEDGTPQPGNSKVEVVFWLLSMLATRDQEDTARTLLAMSSSPESCVAMRRSGCLPLLLQILHGTEAAAGGRAGAPGAPGAKDARMRANAALHNIVFSQPDQGLARKEMRVLHVLEQIRAYCETCWDWLQARDGGPEGGGAGSAPIPIEPQICQATCAVMKLSFDEEYRRAMNELGGLQAVAELLQVDYEMHKMTRDPLNLALRRYAGMTLTNLTFGDVANKATLCARRGCMEAIVAQLASDSEELHQVVSSILRNLSWRADINSKKVLREAGSVTALVQCVLRATKESTLKSVLSALWNLSAHSTENKAAICQVDGALGFLVSTLTYKCQSNSLAIIESGGGILRNVSSLVATREDYRQVLRDHNCLQTLLQHLTSHSLTIVSNACGTLWNLSARSARDQELLWDLGAVGMLRNLVHSKHKMIAMGSAAALRNLLAHRPAKHQAAATAVSPGSCVPSLYVRKQRALEAELDARHLAQALEHLEKQGPPAAEAATKKPLPPLRHLDGLAQDYASDSGCFDDDDAPSSLAAAAATGEPASPAALSLFLGSPFLQGQALARTPPTRRGGKEAEKDTSGEAAVAAKAKAKLALAVARIDQLVEDISALHTSSDDSFSLSSGDPGQEAPREGRAQSCSPCRGPEGGRREAGSRAHPLLRLKAAHASLSNDSLNSGSASDGYCPREHMLPCPLAALASRREDPRCGQPRPSRLDLDLPGCQAEPPAREATSADARVRTIKLSPTYQHVPLLEGASRAGAEPLAGPGISPGARKQAWLPADHLSKVPEKLAAAPLSVASKALQKLAAQEGPLSLSRCSSLSSLSSAGRPGPSEGGDLDDSDSSLEGLEEAGPSEAELDSTWRAPGATSLPVAIPAPRRNRGRGLGVEDATPSSSSENYVQETPLVLSRCSSVSSLGSFESPSIASSIPSEPCSGQGSGTISPSELPDSPGQTMPPSRSKTPPLAPAPQGPPEATQFSLQWESYVKRFLDIADCRERCRLPSELDAGSVRFTVEKPDENFSCASSLSALALHEHYVQQDVELRLLPSACPERGGGAGGAGLHFAGHRRREEGPAPTGSRPRGAADQELELLRECLGAAVPARLRKVASALVPGRRALPVPVYMLVPAPAPAQEDDSCTDSAEGTPVNFSSAASLSDETLQGPPRDQPGGPAGRQRPTGRPTSARQAMGHRHKAGGAGRSAEQSRGAGKNRAGLELPLGRPPSAPADKDGSKPGRTRGDGALQSLCLTTPTEEAVYCFYGNDSDEEPPAAAPTPTHRRTSAIPRAFTRERPQGRKEAPAPSKAAPAAPPPARTQPSLIADETPPCYSLSSSASSLSEPEPSEPPAVHPRGREPAVTKDPGPGGGRDSSPSPRAAEELLQRCISSALPRRRPPVSGLRRRKPRATRLDERPAEGSRERGEEAAGSDRASDLDSVEWRAIQEGANSIVTWLHQAAAATREASSESDSILSFVSGLSVGSTLQPPKHRKGRQAEGEMGSARRPEKRGAASVKTSGSPRSPAGPEKPRGTQKTTPGVPAVLRGRTVIYVPSPAPRAQPKGTPGPRATPRKVAPPCLAQPAAPAKVPSPGQQRSRSLHRPAKTSELATLSQPPRSATPPARLAKTPSSSSSQTSPASQPLPRKRPPVTQAAGALPGPGASPVPKTPARTLLAKQHKTQRSPVRIPFMQRPARRGPPPLARAVPEPGPRGRAGTEAGPGARGGRLGLVRVASALSSGSESSDRSGFRRQLTFIKESPGLRRRRSELSSAESAASAPQGASPRRGRPALPAVFLCSSRCEELRAAPRQGPAPARQRPPAARPSPGERPARRTTSESPSRLPVRAPAARPETVKRYASLPHISVARRPDGAVPAAPASADAARRSSDGEPRPLPRVAAPGTTWRRIRDEDVPHILRSTLPATALPLRGSTPEDAPAGPPPRKTSDAVVQTEEVAAPKTNSSTSPSLETREPPGAPAGGQLSLLGSDVDGPSLAKAPISAPFVHEGLGVAVGGFPASRHGSPSRSARVPPFNYVPSPMVVAATTDSAAEKAPATASATLLE

SEQ ID NO: 14455 - protein, 2029 aa, Homo sapiens
MASSVAPYEQLVRQVEALKAENSHLRQELRDNSSHLSKLETETSGMKEVLKHLQGKLEQEARVLVSSGQTEVLEQLKALQMDITSLYNLKFQPPTLGPEPAARTPEGSPVHGSGPSKDSFGELSRATIRLLEELDRERCFLLNEIEKEEKEKLWYYSQLQGLSKRLDELLQVDYEMHKMTRDPLNLALRRYAGMTLTNLTFGDVANKATLCARRGCMEAIVAQLASDSEELHQVVSSILRNLSWRADINSKKVLREAGSVTALVQCVLRATKESTLKSVLSALWNLSAHSTENKAAICQVDGALGFLVSTLTYKCQSNSLAIIESGGGILRNVSSLVATREDYRQVLRDHNCLQTLLQHLTSHSLTIVSNACGTLWNLSARSARDQELLWDLGAVGMLRNLVHSKHKMIAMGSAAALRNLLAHRPAKHQAAATAVSPGSCVPSLYVRKQRALEAELDARHLAQALEHLEKQGPPAAEAATKKPLPPLRHLDGLAQDYASDSGCFDDDDAPSSLAAAAATGEPASPAALSLFLGSPFLQGQALARTPPTRRGGKEAEKDTSGEAAVAAKAKAKLALAVARIDQLVEDISALHTSSDDSFSLSSGDPGQEAPREGRAQSCSPCRGPEGGRREAGSRAHPLLRLKAAHASLSNDSLNSGSASDGYCPREHMLPCPLAALASRREDPRCGQPRPSRLDLDLPGCQAEPPAREATSADARVRTIKLSPTYQHVPLLEGASRAGAEPLAGPGISPGARKQAWLPADHLSKVPEKLAAAPLSVASKALQKLAAQEGPLSLSRCSSLSSLSSAGRPGPSEGGDLDDSDSSLEGLEEAGPSEAELDSTWRAPGATSLPVAIPAPRRNRGRGLGVEDATPSSSSENYVQETPLVLSRCSSVSSLGSFESPSIASSIPSEPCSGQGSGTISPSELPDSPGQTMPPSRSKTPPLAPAPQGPPEATQFSLQWESYVKRFLDIADCRERCRLPSELDAGSVRFTVEKPDENFSCASSLSALALHEHYVQQDVELRLLPSACPERGGGAGGAGLHFAGHRRREEGPAPTGSRPRGAADQELELLRECLGAAVPARLRKVASALVPGRRALPVPVYMLVPAPAPAQEDDSCTDSAEGTPVNFSSAASLSDETLQGPPRDQPGGPAGRQRPTGRPTSARQAMGHRHKAGGAGRSAEQSRGAGKNRAGLELPLGRPPSAPADKDGSKPGRTRGDGALQSLCLTTPTEEAVYCFYGNDSDEEPPAAAPTPTHRRTSAIPRAFTRERPQGRKEAPAPSKAAPAAPPPARTQPSLIADETPPCYSLSSSASSLSEPEPSEPPAVHPRGREPAVTKDPGPGGGRDSSPSPRAAEELLQRCISSALPRRRPPVSGLRRRKPRATRLDERPAEGSRERGEEAAGSDRASDLDSVEWRAIQEGANSIVTWLHQAAAATREASSESDSILSFVSGLSVGSTLQPPKHRKGRQAEGEMGSARRPEKRGAASVKTSGSPRSPAGPEKPRGTQKTTPGVPAVLRGRTVIYVPSPAPRAQPKGTPGPRATPRKVAPPCLAQPAAPAKVPSPGQQRSRSLHRPAKTSELATLSQPPRSATPPARLAKTPSSSSSQTSPASQPLPRKRPPVTQAAGALPGPGASPVPKTPARTLLAKQHKTQRSPVRIPFMQRPARRGPPPLARAVPEPGPRGRAGTEAGPGARGGRLGLVRVASALSSGSESSDRSGFRRQLTFIKESPGLRRRRSELSSAESAASAPQGASPRRGRPALPAVFLCSSRCEELRAAPRQGPAPARQRPPAARPSPGERPARRTTSESPSRLPVRAPAARPETVKRYASLPHISVARRPDGAVPAAPASADAARRSSDGEPRPLPRVAAPGTTWRRIRDEDVPHILRSTLPATALPLRGSTPEDAPAGPPPRKTSDAVVQTEEVAAPKTNSSTSPSLETREPPGAPAGGQLSLLGSDVDGPSLAKAPISAPFVHEGLGVAVGGFPASRHGSPSRSARVPPFNYVPSPMVVAATTDSAAEKAPATASATLLE

SEQ ID NO: 14456 - protein, 2302 aa, Homo sapiens
MASSVAPYEQLVRQVEALKAENSHLRQELRDNSSHLSKLETETSGMKEVLKHLQGKLEQEARVLVSSGQTEVLEQLKALQMDITSLYNLKFQPPTLGPEPAARTPEGSPVHGSGPSKDSFGELSRATIRLLEELDRERCFLLNEIEKEEKEKLWYYSQLQGLSKRLDELPHVETFSMQMDLIRQQLEFEAQHIRSLMEERFGTSDEMVQRAQIRASRLEQIDKELLEAQDRVQQTEPQALLAVKSVPVDEDPETEVPTHPEDGTPQPGNSKVEVVFWLLSMLATRDQEDTARTLLAMSSSPESCVAMRRSGCLPLLLQILHGTEAAAGGRAGAPGAPGAKDARMRANAALHNIVFSQPDQGLARKEMRVLHVLEQIRAYCETCWDWLQARDGGPEGGGAGSAPIPIEPQICQATCAVMKLSFDEEYRRAMNELGGLQAVAELLQVDYEMHKMTRDPLNLALRRYAGMTLTNLTFGDVANKATLCARRGCMEAIVAQLASDSEELHQVVSSILRNLSWRADINSKKVLREAGSVTALVQCVLRATKESTLKSVLSALWNLSAHSTENKAAICQVDGALGFLVSTLTYKCQSNSLAIIESGGGILRNVSSLVATREDYRQVLRDHNCLQTLLQHLTSHSLTIVSNACGTLWNLSARSARDQELLWDLGAVGMLRNLVHSKHKMIAMGSAAALRNLLAHRPAKHQAAATAVSPGSCVPSLYVRKQRALEAELDARHLAQALEHLEKQGPPAAEAATKKPLPPLRHLDGLAQDYASDSGCFDDDDAPSSLAAAAATGEPASPAALSLFLGSPFLQGQALARTPPTRRGGKEAEKDTSGEAAVAAKAKAKLALAVARIDQLVEDISALHTSSDDSFSLSSGDPGQEAPREGRAQSCSPCRGPEGGRREAGSRAHPLLRLKAAHASLSNDSLNSGSASDGYCPREHMLPCPLAALASRREDPRCGQPRPSRLDLDLPGCQAEPPAREATSADARVRTIKLSPTYQHVPLLEGASRAGAEPLAGPGISPGARKQAWLPADHLSKVPEKLAAAPLSVASKALQKLAAQEGPLSLSRCSSLSSLSSAGRPGPSEGGDLDDSDSSLEGLEEAGPSEAELDSTWRAPGATSLPVAIPAPRRNRGRGLGVEDATPSSSSENYVQETPLVLSRCSSVSSLGSFESPSIASSIPSEPCSGQGSGTISPSELPDSPGQTMPPSRSKTPPLAPAPQGPPEATQFSLQWESYVKRFLDIADCRERCRLPSELDAGSVRFTVEKPDENFSCASSLSALALHEHYVQQDVELRLLPSACPERGGGAGGAGLHFAGHRRREEGPAPTGSRPRGAADQELELLRECLGAAVPARLRKVASALVPGRRALPVPVYMLVPAPAPAQEDDSCTDSAEGTPVNFSSAASLSDETLQGPPRDQPGGPAGRQRPTGRPTSARQAMGHRHKAGGAGRSAEQSRGAGKNRAGLELPLGRPPSAPADKDGSKPGRTRGDGALQSLCLTTPTEEAVYCFYGNDSDEEPPAAAPTPTHRRTSAIPRAFTRERPQGRKEAPAPSKAAPAAPPPARTQPSLIADETPPCYSLSSSASSLSEPEPSEPPAVHPRGREPAVTKDPGPGGGRDSSPSPRAAEELLQRCISSALPRRRPPVSGLRRRKPRATRLDERPAEGSRERGEEAAGSDRASDLDSVEWRAIQEGANSIVTWLHQAAAATREASSESDSILSFVSGLSVGSTLQPPKHRKGRQAEGEMGSARRPEKRGAASVKTSGSPRSPAGPEKPRGTQKTTPGVPAVLRGRTVIYVPSPAPRAQPKGTPGPRATPRKVAPPCLAQPAAPAKVPSPGQQRSRSLHRPAKTSELATLSQPPRSATPPARLAKTPSSSSSQTSPASQPLPRKRPPVTQAAGALPGPGASPVPKTPARTLLAKQHKTQRSPVRIPFMQRPARRGPPPLARAVPEPGPRGRAGTEAGPGARGGRLGLVRVASALSSGSESSDRSGFRRQLTFIKESPGLRRRRSELSSAESAASAPQGASPRRGRPALPAVFLCSSRCEELRAAPRQGPAPARQRPPAARPSPGERPARRTTSESPSRLPVRAPAARPETVKRYASLPHISVARRPDGAVPAAPASADAARRSSDGEPRPLPRVAAPGTTWRRIRDEDVPHILRSTLPATALPLRGSTPEDAPAGPPPRKTSDAVVQTEEVAAPKTNSSTSPSLETREPPGAPAGGQLSLLGSDVDGPSLAKAPISAPFVHEGLGVAVGGFPASRHGSPSRSARVPPFNYVPSPMVVAATTDSAAEKAPATASATLLE

SEQ ID NO: 14457 - protein, 622 aa, Homo sapiens
MDSHSGEPALLPCGTCDMVFRSSALLATHTQRFCIGHPTQEMTFGAQASVATEPQRAAVVPQEHQGVPQEPQGLPDQQASRSALKRLTEEVQWLRLSLQEMRPWITEVPRVFAGPWTRSEARPQSPMSEAVGSPSERLRALFRTRARRVAEMEAQSRALQLRGEELSRRLQVVACTRGGMSRLFGLEQEIRELQAEAGRTRGALEVLGARIQELQAEPGNPLSSRREAELYSPVQKANPGTLAAEIRALREAYIRDGGRDPGVLGQIWQLQVEASALELQRSQTRRGRAGATSGELPVVEAENRRLEAEILALQMQRGRAPLGPQDLRLLGDASLQPKGRRDPPLLPPPVAPPLPPLPGFSEPQLPGTMTRNLGLDSHFLLPTSDMLGPAPYDPGAGLVIFYDFLRGLEASWIWVQLRTGLARDGRDTGRTTALPPALCLPPPPAPGPMGNCAILASRQPVPRLPPSSSVSLVCELQVWQGLAWARAPQPKAWVSLGLFDQDQRVLSGRWRLPLRALPLDPSLSLGQLNGIPQAGQAELFLRLVNARDAAVQTLAEINPASVHEYQYPPPVSSTSSLEASFLTPAVGFADPPPRTEEPLSGVKDRDEGLGPHHSSDLPPVSF

SEQ ID NO: 14458 - protein, 613 aa, Homo sapiens
MDSHSGEPALLPCGTCDMVFRSSALLATHTQRFCIGHPTQEMTFGAQASVATEPQRAAVVPQEHQGVPQEPQGLPDQQASRSALKRLTEEEMRPWITEVPRVFAGPWTRSEARPQSPMSEAVGSPSERLRALFRTRARRVAEMEAQSRALQLRGEELSRRLQVVACTRGGMSRLFGLEQEIRELQAEAGRTRGALEVLGARIQELQAEPGNPLSSRREAELYSPVQKANPGTLAAEIRALREAYIRDGGRDPGVLGQIWQLQVEASALELQRSQTRRGRAGATSGELPVVEAENRRLEAEILALQMQRGRAPLGPQDLRLLGDASLQPKGRRDPPLLPPPVAPPLPPLPGFSEPQLPGTMTRNLGLDSHFLLPTSDMLGPAPYDPGAGLVIFYDFLRGLEASWIWVQLRTGLARDGRDTGRTTALPPALCLPPPPAPGPMGNCAILASRQPVPRLPPSSSVSLVCELQVWQGLAWARAPQPKAWVSLGLFDQDQRVLSGRWRLPLRALPLDPSLSLGQLNGIPQAGQAELFLRLVNARDAAVQTLAEINPASVHEYQYPPPVSSTSSLEASFLTPAVGFADPPPRTEEPLSGVKDRDEGLGPHHSSDLPPVSF

SEQ ID NO: 14459 - protein, 443 aa, Homo sapiens
MSRLFGLEQEIRELQAEAGRTRGALEVLGARIQELQAEPGNPLSSRREAELYSPVQKANPGTLAAEIRALREAYIRDGGRDPGVLGQIWQLQVEASALELQRSQTRRGRAGATSGELPVVEAENRRLEAEILALQMQRGRAPLGPQDLRLLGDASLQPKGRRDPPLLPPPVAPPLPPLPGFSEPQLPGTMTRNLGLDSHFLLPTSDMLGPAPYDPGAGLVIFYDFLRGLEASWIWVQLRTGLARDGRDTGRTTALPPALCLPPPPAPGPMGNCAILASRQPVPRLPPSSSVSLVCELQVWQGLAWARAPQPKAWVSLGLFDQDQRVLSGRWRLPLRALPLDPSLSLGQLNGIPQAGQAELFLRLVNARDAAVQTLAEINPASVHEYQYPPPVSSTSSLEASFLTPAVGFADPPPRTEEPLSGVKDRDEGLGPHHSSDLPPVSF

SEQ ID NO: 14460 - protein, 110 aa, Homo sapiens
MDSHSGEPALLPCGTCDMVFRSSALLATHTQRFCIGHPTQEMTFGAQASVATEPQRAAVSSTSSLEASFLTPAVGFADPPPRTEEPLSGVKDRDEGLGPHHSSDLPPVSF

SEQ ID NO: 14461 - protein, 360 aa, Homo sapiens
MAKAPSWAGVGALAYKAPEALWPAEAVMDGTMEDSEAVQRATALIEQRLAQEEENEKLRGDARQKLPMDLLVLEDEKHHGAQSAALQKVKGQERVRKTSLDLRREIIDVGGIQNLIELRKKRKQKKRDALAASHEPPPEPEEITGPVDEETFLKAAVEGKMKVIEKFLADGGSADTCDQFRRTALHRASLEGHMEILEKLLDNGATVDFQDRLDCTAMHWACRGGHLEVVKLLQSHGADTNVRDKLLSTPLHVAVRTGQVEIVEHFLSLGLEINARDREGDTALHDAVRLNRYKIIKLLLLHGADMMTKNLAGKTPTDLVQLWQADTRHALEHPEPGAEHNGLEGPNDSGRETPQPVPAQ

SEQ ID NO: 14462 - protein, 327 aa, Homo sapiens
MAKAPSWAGVGALAYKAPEALWPAEAVMDGTMEDSEAVQRATALIEQRLAQEEENEKLRGDARQKLPMDLLVLEDEKHHGAQSAALQKVKGQERVRKTSLDLRREIIDVGGIQNLIELRKKRKQKKRDALAASHEPPPEPEEITGPVDEETFLKAAVEGKMKVIEKFLADGGSADTCDQFRRTALHRASLEGHMEILEKLLDNGATVDFQDRLDCTAMHWACRGGHLEVVKLLQSHGADTNVRDKEGDTALHDAVRLNRYKIIKLLLLHGADMMTKNLAGKTPTDLVQLWQADTRHALEHPEPGAEHNGLEGPNDSGRETPQPVPAQ

SEQ ID NO: 14463 - protein, 419 aa, Homo sapiens
MAMRLILFFGALFGHIYCLETFVGDQVLEIVPSNEEQIKNLLQLEAQEHLQLDFWKSPTTPGETAHVRVPFVNVQAVKVFLESQGIAYSIMIEDVQVLLDKENEEMLFNRRRERSGNFNFGAYHTLEEISQEMDNLVAEHPGLVSKVNIGSSFENRPMNVLKFSTGGDKPAIWLDAGIHAREWVTQATALWTANKIVSDYGKDPSITSILDALDIFLLPVTNPDGYVFSQTKNRMWRKTRSKVSGSLCVGVDPNRNWDAGFGGPGASSNPCSDSYHGPSANSEVEVKSIVDFIKSHGKVKAFITLHSYSQLLMFPYGYKCTKLDDFDELSEVAQKAAQSLRSLHGTKYKVGPICSVIYQASGGSIDWSYDYGIKYSFAFELRDTGRYGFLLPARQILPTAEETWLGLKAIMEHVRDHPY

SEQ ID NO: 14464 - protein, 277 aa, Homo sapiens
MSSCSRVALVTGANRGIGLAIARELCRQFSGDVVLTARDVARGQAAVQQLQAEGLSPRFHQLDIDDLQSIRALRDFLRKEYGGLNVLVNNAAVAFKSDDPMPFDIKAEMTLKTNFFATRNMCNELLPIMKPHGRVVNISSLQCLRAFENCSEDLQERFHSETLTEGDLVDLMKKFVEDTKNEVHEREGWPNSPYGVSKLGVTVLSRILARRLDEKRKADRILVNACCPGPVKTDMDGKDSIRTVEEGAETPVYLALLPPDATEPQGQLVHDKVVQNW

SEQ ID NO: 14465 - protein, 417 aa, Homo sapiens
MRLILPVGLIATTLAIAPVRFDREKVFRVKPQDEKQADIIKDLAKTNELDFWYPGATHHVAANMMVDFRVSEKESQAIQSALDQNKMHYEILIHDLQEEIEKQFDVKEDIPGRHSYAKYNNWEKIVAWTEKMMDKYPEMVSRIKIGSTVEDNPLYVLKIGEKNERRKAIFTDCGIHAREWVSPAFCQWFVYQATKTYGRNKIMTKLLDRMNFYILPVFNVDGYIWSWTKNRMWRKNRSKNQNSKCIGTDLNRNFNASWNSIPNTNDPCADNYRGSAPESEKETKAVTNFIRSHLNEIKVYITFHSYSQMLLFPYGYTSKLPPNHEDLAKVAKIGTDVLSTRYETRYIYGPIESTIYPISGSSLDWAYDLGIKHTFAFELRDKGKFGFLLPESRIKPTCRETMLAVKFIAKYILKHTS

SEQ ID NO: 14466 - protein, 192 aa, Homo sapiens
MGSLGSKNPQTKQAQVLLLGLDSAGKSTLLYKLKLAKDITTIPTIGFNVEMIELERNLSLTVWDVGGQEKMRTVWGCYCENTDGLVYVVDSTDKQRLEESQRQFEHILKNEHIKNVPVVLLANKQDMPGALTAEDITRMFKVKKLCSDRNWYVQPCCALTGEGLAQGFRKLTGFVKSHMKSRGDTLAFFKQN

SEQ ID NO: 14467 - protein, 184 aa, Homo sapiens
MGLLTILKKMKQKERELRLLMLGLDNAGKTTILKKFNGEDIDTISPTLGFNIKTLEHRGFKLNIWDVGGQKSLRSYWRNYFESTDGLIWVVDSADRQRMQDCQRELQSLLVEERLAGATLLIFANKQDLPGALSSNAIREVLELDSIRSHHWCIQGCSAVTGENLLPGIDWLLDDISSRIFTAD

SEQ ID NO: 14468 - protein, 157 aa, Homo sapiens
MGLLTILKKMKQKERELRLLMLGLDNAGKTTILKKFNGEDIDTISPTLGFNIKTLEHRGFKLNIWDVGGQKSLRSYWRNYFESTDGLIWVVDSADRQRMQDCQRELQSLLVEEVLELDSIRSHHWCIQGCSAVTGENLLPGIDWLLDDISSRIFTAD

SEQ ID NO: 14469 - protein, 656 aa, Homo sapiens
MSELSDEASEPELLNRSLSMWHGLGTQVSGEELDVPLDLHTAASIGQYEVVKECVQRRELDLNKKNGGGWTPLMYASYIGHDTIVHLLLEAGVSVNVPTPEGQTPLMLASSCGNESIAYFLLQQGAELEMKDIQGWTALFHCTSAGHQHMVRFLLDSGANANVREPICGFTPLMEAAAAGHEIIVQYFLNHGVKVDARDHSGATARMLAKQYGHMKIVALMDTYSPSLPKSLYRSPEKYEDLSSSDESCPAPQRQRPCRKKGVSIHEGPRALARITGIGLGGRAPRPRYEQAPPRGYVTFNSSGENPLEEEGLCCRDVTSPINERDVESSSSSSSREEHAFCANLGPVQSSSSSEGLARAQGLSSEASVESNEDSDHACKSSARKQAKSYMKTKNPDSQWPPRAATDREGFLAESSPQTQRAPYSGPQDLAALLEQIGCLKYLQVFEEQDVDLRIFLTLTESDLKEIGITLFGPKRKMTSAIARWHSSARPPGDALELAYADRLEAEMQELAIQLHKRCEEVEATRGQVCQEQELRAVVESCLLEQDRAREDLQARLRETWALARDAALVLDQLRACQAELSSRVRQDQPPGAATLGLAVPPADSKGWQASLQAMSLPELSGALEDRVREMGQALCLVTQSLEKLQVLNGKKWRET

SEQ ID NO: 14470 - protein, 583 aa, Homo sapiens
MYASYIGHDTIVHLLLEAGVSVNVPTPEGQTPLMLASSCGNESIAYFLLQQGAELEMKDIQGWTALFHCTSAGHQHMVRFLLDSGANANVREPICGFTPLMEAAAAGHEIIVQYFLNHGVKVDARDHSGATARMLAKQYGHMKIVALMDTYSPSLPKSLYRSPEKYEDLSSSDESCPAPQRQRPCRKKGVSIHEGPRALARITGIGLGGRAPRPRYEQAPPRGYVTFNSSGENPLEEEGLCCRDVTSPINERDVESSSSSSSREEHAFCANLGPVQSSSSSEGLARAQGLSSEASVESNEDSDHACKSSARKQAKSYMKTKNPDSQWPPRAATDREGFLAESSPQTQRAPYSGPQDLAALLEQIGCLKYLQVFEEQDVDLRIFLTLTESDLKEIGITLFGPKRKMTSAIARWHSSARPPGDALELAYADRLEAEMQELAIQLHKRCEEVEATRGQVCQEQELRAVVESCLLEQDRAREDLQARLRETWALARDAALVLDQLRACQAELSSRVRQDQPPGAATLGLAVPPADSKGWQASLQAMSLPELSGALEDRVREMGQALCLVTQSLEKLQVLNGKKWRET

SEQ ID NO: 14471 - protein, 295 aa, Homo sapiens
MAGLNVSLSFFFATFTLCEAARRASKALLPVGAYEVFAREAMRTLVELGPWAGDFGPDLLLTLLFLLFLAHGVTLDGASANPTVSLQEFLMAEESLPGTLLKLAAQGLGMQAACTLTRLCWAWELSDLHLLQSLMAQSCSSALRTSVPHGALVEAACAFCFHLTLLHLRHSPPAYSGPAVALLVTVTAYTAGPFTSAFFNPALAASVTFACSGHTLLEYVQVYWLGPLTGMVLAVLLHQGRLPHLFQRNLFYGQKNKYRAPRGKPAPASGDTQTPAKGSSVREPGRSGVEGPHSS

SEQ ID NO: 14472 - protein, 307 aa, Homo sapiens
MAGLNVSLSFFFATFTLCEAARRASKALLPVGAYEVFAREAVGAVQLGACFLEMRTLVELGPWAGDFGPDLLLTLLFLLFLAHGVTLDGASANPTVSLQEFLMAEESLPGTLLKLAAQGLGMQAACTLTRLCWAWELSDLHLLQSLMAQSCSSALRTSVPHGALVEAACAFCFHLTLLHLRHSPPAYSGPAVALLVTVTAYTAGPFTSAFFNPALAASVTFACSGHTLLEYVQVYWLGPLTGMVLAVLLHQGRLPHLFQRNLFYGQKNKYRAPRGKPAPASGDTQTPAKGSSVREPGRSGVEGPHSS

SEQ ID NO: 14473 - protein, 423 aa, Homo sapiens; identical to SEQ ID NO: 217

SEQ ID NO: 14474 - protein, 435 aa, Homo sapiens; identical to SEQ ID NO: 218

SEQ ID NO: 14475 - protein, 1397 aa, Homo sapiens
MEEISAAAVKVVPGPERPSPFSQLVYTSNDSYIVHSGDLRKIHKAASRGQVRKLEKMTKRKKTINLNIQDAQKRTALHWACVNGHEEVVTFLVDRKCQLDVLDGEHRTPLMKALQCHQEACANILIDSGADINLVDVYGNTALHYAVYSEILSVVAKLLSHGAVIEVHNKASLTPLLLSITKRSEQIVEFLLIKNANANAVNKYKCTALMLAVCHGSSEIVGMLLQQNVDVFAADICGVTAEHYAVTCGFHHIHEQIMEYIRKLSKNHQNTNPEGTSAGTPDEAAPLAERTPDTAESLVEKTPDEAAPLVERTPDTAESLVEKTPDEAASLVEGTSDKIQCLEKATSGKFEQSAEETPREITSPAKETSEKFTWPAKGRPRKIAWEKKEDTPREIMSPAKETSEKFTWAAKGRPRKIAWEKKETPVKTGCVARVTSNKTKVLEKGRSKMIACPTKESSTKASANDQRFPSESKQEEDEEYSCDSRSLFESSAKIQVCIPESIYQKVMEINREVEEPPKKPSAFKPAIEMQNSVPNKAFELKNEQTLRADPMFPPESKQKDYEENSWDSESLCETVSQKDVCLPKATHQKEIDKINGKLEESPNKDGLLKATCGMKVSIPTKALELKDMQTFKAEPPGKPSAFEPATEMQKSVPNKALELKNEQTLRADEILPSESKQKDYEENSWDTESLCETVSQKDVCLPKAAHQKEIDKINGKLEGSPVKDGLLKANCGMKVSIPTKALELMDMQTFKAEPPEKPSAFEPAIEMQKSVPNKALELKNEQTLRADEILPSESKQKDYEESSWDSESLCETVSQKDVCLPKATHQKEIDKINGKLEESPDNDGFLKAPCRMKVSIPTKALELMDMQTFKAEPPEKPSAFEPAIEMQKSVPNKALELKNEQTLRADQMFPSESKQKKVEENSWDSESLRETVSQKDVCVPKATHQKEMDKISGKLEDSTSLSKILDTVHSCERARELQKDHCEQRTGKMEQMKKKFCVLKKKLSEAKEIKSQLENQKVKWEQELCSVRLTLNQEEEKRRNADILNEKIREELGRIEEQHRKELEVKQQLEQALRIQDIELKSVESNLNQVSHTHENENYLLHENCMLKKEIAMLKLEIATLKHQYQEKENKYFEDIKILKEKNAELQMTLKLKEESLTKRASQYSGQLKVLIAENTMLTSKLKEKQDKEILEAEIESHHPRLASAVQDHDQIVTSRKSQEPAFHIAGDACLQRKMNVDVSSTIYNNEVLHQPLSEAQRKSKSLKINLNYAGDALRENTLVSEHAQRDQRETQCQMKEAEHMYQNEQDNVNKHTEQQESLDQKLFQLQSKNMWLQQQLVHAHKKADNKSKITIDIHFLERKMQHHLLKEKNEEIFNYNNHLKNRIYQYEKEKAETENS

SEQ ID NO: 14476 - protein, 967 aa, Homo sapiens
MAKGFYISKSLGILGILLGVAAVCTIIALSVVYSQEKNKNANSSPVASTTPSASATTNPASATTLDQSKAWNRYRLPNTLKPDSYRVTLRPYLTPNDRGLYVFKGSSTVRFTCKEATDVIIIHSKKLNYTLSQGHRVVLRGVGGSQPPDIDKTELVEPTEYLVVHLKGSLVKDSQYEMDSEFEGELADDLAGFYRSEYMEGNVRKVVATTQMQAADARKSFPCFDEPAMKAEFNITLIHPKDLTALSNMLPKGPSTPLPEDPNWNVTEFHTTPKMSTYLLAFIVSEFDYVEKQASNGVLIRIWARPSAIAAGHGDYALNVTGPILNFFAGHYDTPYPLPKSDQIGLPDFNAGAMENWGLVTYRENSLLFDPLSSSSSNKERVVTVIAHELAHQWFGNLVTIEWWNDLWLNEGFASYVEYLGADYAEPTWNLKDLMVLNDVYRVMAVDALASSHPLSTPASEINTPAQISELFDAISYSKGASVLRMLSSFLSEDVFKQGLASYLHTFAYQNTIYLNLWDHLQEAVNNRSIQLPTTVRDIMNRWTLQMGFPVITVDTSTGTLSQEHFLLDPDSNVTRPSEFNYVWIVPITSIRDGRQQQDYWLIDVRAQNDLFSTSGNEWVLLNLNVTGYYRVNYDEENWRKIQTQLQRDHSAIPVINRAQIINDAFNLASAHKVPVTLALNNTLFLIEERQYMPWEAALSSLSYFKLMFDRSEVYGPMKNYLKKQVTPLFIHFRNNTNNWREIPENLMDQYSEVNAISTACSNGVPECEEMVSGLFKQWMENPNNNPIHPNLRSTVYCNAIAQGGEEEWDFAWEQFRNATLVNEADKLRAALACSKELWILNRYLSYTLNPDLIRKQDATSTIISITNNVIGQGLVWDFVQSNWKKLFNDYGGGSFSFSNLIQAVTRRFSTEYELQQLEQFKKDNEETGFGSGTRALEQALEKTKANIKWVKENKEVVLQWFTENSK

SEQ ID NO: 14477 - protein, 957 aa, Homo sapiens
MNFAEREGSKRYCIQTKHVAILCAVVVGVGLIVGLAVGLTRSCDSSGDGGPGTAPAPSHLPSSTASPSGPPAQDQDICPASEDESGQWKNFRLPDFVNPVHYDLHVKPLLEEDTYTGTVSISINLSAPTRYLWLHLRETRITRLPELKRPSGDQVQVRRCFEYKKQEYVVVEAEEELTPSSGDGLYLLTMEFAGWLNGSLVGFYRTTYTENGQVKSIVATDHEPTDARKSFPCFDEPNKKATYTISITHPKEYGALSNMPVAKEESVDDKWTRTTFEKSVPMSTYLVCFAVHQFDSVKRISNSGKPLTIYVQPEQKHTAEYAANITKSVFDYFEEYFAMNYSLPKLDKIAIPDFGTGAMENWGLITYRETNLLYDPKESASSNQQRVATVVAHELVHQWFGNIVTMDWWEDLWLNEGFASFFEFLGVNHAETDWQMRDQMLLEDVLPVQEDDSLMSSHPIIVTVTTPDEITSVFDGISYSKGSSILRMLEDWIKPENFQKGCQMYLEKYQFKNAKTSDFWAALEEASRLPVKEVMDTWTRQMGYPVLNVNGVKNITQKRFLLDPRANPSQPPSDLGYTWNIPVKWTEDNITSSVLFNRSEKEGITLNSSNPSGNAFLKINPDHIGFYRVNYEVATWDSIATALSLNHKTFSSADRASLIDDAFALARAQLLDYKVALNLTKYLKREENFLPWQRVISAVTYIISMFEDDKELYPMIEEYFQGQVKPIADSLGWNDAGDHVTKLLRSSVLGFACKMGDREALNNASSLFEQWLNGTVSLPVNLRLLVYRYGMQNSGNEISWNYTLEQYQKTSLAQEKEKLLYGLASVKNVTLLSRYLDLLKDTNLIKTQDVFTVIRYISYNSYGKNMAWNWIQLNWDYLVNRYTLNNRNLGRIVTIAEPFNTELQLWQMESFFAKYPQAGAGEKPREQVLETVKNNIEWLKQHRNTIREWFFNLLESG

SEQ ID NO: 14478 - protein, 380 aa, Homo sapiens
MEEGGDFDNYYGADNQSECEYTDWKSSGALIPAIYMLVFLLGTTGNGLVLWTVFRSSREKRRSADIFIASLAVADLTFVVTLPLWATYTYRDYDWPFGTFFCKLSSYLIFVNMYASVFCLTGLSFDRYLAIVRPVANARLRLRVSGAVATAVLWVLAALLAMPVMVLRTTGDLENTTKVQCYMDYSMVATVSSEWAWEVGLGVSSTTVGFVVPFTIMLTCYFFIAQTIAGHFRKERIEGLRKRRRLLSIIVVLVVTFALCWMPYHLVKTLYMLGSLLHWPCDFDLFLMNIFPYCTCISYVNSCLNPFLYAFFDPRFRQACTSMLCCGQSRCAGTSHSSSGEKSASYSSGHSQGPGPNMGKGGEQMHEKSIPYSQETLVVD

SEQ ID NO: 14479 - protein, 313 aa, Homo sapiens
MDTSTNLDIGAQLIVEECPSTYSLTGMPDIKIEHPLDPNSEEGSAQGVAMGMKFILPNRFDMNVCSRFVKSLNEEDSKNIQDQVNSDLEVASVLFKAECNIHTSPSPGIQVRHVYTPSTTKHFSPIKQSTTLTNKHRGNEVSTTPLLANSLSVHQLAAQGEMLYLATRIEQENVINHTDEEGFTPLMWAAAHGQIAVVEFLLQNGADPQLLGKGRESALSLACSKGYTDIVKMLLDCGVDVNEYDWNGGTPLLYAVHGNHVKCVKMLLESGADPTIETDSGYNSMDLAVALGYRSVQQVIESHLLKLLQNIKE

SEQ ID NO: 14480 - protein, 345 aa, Homo sapiens
MTRGRAWGMRRAAAGAGGARAAGPTGGASRLHPNAGRRSGARAGAQGCGGPRVGSADSRALPAQPLACARGRSQRLVCDPKAASALPDLAPDVFVLRVRLEETGEMFRVANCRGDMTVRELKEELDLMVGIPFNLQRLQYLDEGVLMDDTTLKFHDVVPGGIISLCIWHHDGWTELVLAAVEGDPSKLSCLGLTEDSFYRTANSEHFEGEKWKHWTSQRAFVALYVASHRGHFDAVQYLLEHGASCLSRSPLGRTPLHVAAAMGRSDCIILLLQHGASIHDRDAKGETPISIAHRLNHTLSERQMVLLHRIAKSGIRDLNDLVMKNALQRVKSGFRSEKMTMTPH

SEQ ID NO: 14481 - protein, 1220 aa, Homo sapiens
MGDMANNSVAYSGVKNSLKEANHDGDFGITLAELRALMELRSTDALRKIQESYGDVYGICTKLKTSPNEGLSGNPADLERREAVFGKNFIPPKKPKTFLQLVWEALQDVTLIILEIAAIVSLGLSFYQPPEGDNALCGEVSVGEEEGEGETGWIEGAAILLSVVCVVLVTAFNDWSKEKQFRGLQSRIEQEQKFTVIRGGQVIQIPVADITVGDIAQVKYGDLLPADGILIQGNDLKIDESSLTGESDHVKKSLDKDPLLLSGTHVMEGSGRMVVTAVGVNSQTGIIFTLLGAGGEEEEKKDEKKKEKKNKKQDGAIENRNKAKAQDGAAMEMQPLKSEEGGDGDEKDKKKANLPKKEKSVLQGKLTKLAVQIGKAGLLMSAITVIILVLYFVIDTFWVQKRPWLAECTPIYIQYFVKFFIIGVTVLVVAVPEGLPLAVTISLAYSVKKMMKDNNLVRHLDACETMGNATAICSDKTGTLTMNRMTVVQAYINEKHYKKVPEPEAIPPNILSYLVTGISVNCAYTSKILPPEKEGGLPRHVGNKTECALLGLLLDLKRDYQDVRNEIPEEALYKVYTFNSVRKSMSTVLKNSDGSYRIFSKGASEIILKKCFKILSANGEAKVFRPRDRDDIVKTVIEPMASEGLRTICLAFRDFPAGEPEPEWDNENDIVTGLTCIAVVGIEDPVRPEVPDAIKKCQRAGITVRMVTGDNINTARAIATKCGILHPGEDFLCLEGKDFNRRIRNEKGEIEQERIDKIWPKLRVLARSSPTDKHTLVKGIIDSTVSDQRQVVAVTGDGTNDGPALKKADVGFAMGIAGTDVAKEASDIILTDDNFTSIVKAVMWGRNVYDSISKFLQFQLTVNVVAVIVAFTGACITQDSPLKAVQMLWVNLIMDTLASLALATEPPTESLLLRKPYGRNKPLISRTMMKNILGHAFYQLVVVFTLLFAGEKFFDIDSGRNAPLHAPPSEHYTIVFNTFVLMQLFNEINARKIHGERNVFEGIFNNAIFCTIVLGTFVVQIIIVQFGGKPFSCSELSIEQWLWSIFLGMGTLLWGQLISTIPTSRLKFLKEAGHGTQKEEIPEEELAEDVEEIDHAERELRRGQILWFRGLNRIQTQIRVVNAFRSSLYEGLEKPESRSSIHNFMTHPEFRIEDSEPHIPLIDDTDAEDDAPTKRNSSPPPSPNKNNNAVDSGIHLTIEMNKSATSSSPGSPLHSLETSL

SEQ ID NO: 14482 - protein, 1258 aa, Homo sapiens
MGDMANNSVAYSGVKNSLKEANHDGDFGITLAELRALMELRSTDALRKIQESYGDVYGICTKLKTSPNEGLSGNPADLERREAVFGKNFIPPKKPKTFLQLVWEALQDVTLIILEIAAIVSLGLSFYQPPEGDNALCGEVSVGEEEGEGETGWIEGAAILLSVVCVVLVTAFNDWSKEKQFRGLQSRIEQEQKFTVIRGGQVIQIPVADITVGDIAQVKYGDLLPADGILIQGNDLKIDESSLTGESDHVKKSLDKDPLLLSGTHVMEGSGRMVVTAVGVNSQTGIIFTLLGAGGEEEEKKDEKKKEKKNKKQDGAIENRNKAKAQDGAAMEMQPLKSEEGGDGDEKDKKKANLPKKEKSVLQGKLTKLAVQIGKAGLLMSAITVIILVLYFVIDTFWVQKRPWLAECTPIYIQYFVKFFIIGVTVLVVAVPEGLPLAVTISLAYSVKKMMKDNNLVRHLDACETMGNATAICSDKTGTLTMNRMTVVQAYINEKHYKKVPEPEAIPPNILSYLVTGISVNCAYTSKILPPEKEGGLPRHVGNKTECALLGLLLDLKRDYQDVRNEIPEEALYKVYTFNSVRKSMSTVLKNSDGSYRIFSKGASEIILKKCFKILSANGEAKVFRPRDRDDIVKTVIEPMASEGLRTICLAFRDFPAGEPEPEWDNENDIVTGLTCIAVVGIEDPVRPEVPDAIKKCQRAGITVRMVTGDNINTARAIATKCGILHPGEDFLCLEGKDFNRRIRNEKGEIEQERIDKIWPKLRVLARSSPTDKHTLVKGIIDSTVSDQRQVVAVTGDGTNDGPALKKADVGFAMGIAGTDVAKEASDIILTDDNFTSIVKAVMWGRNVYDSISKFLQFQLTVNVVAVIVAFTGACITQDSPLKAVQMLWVNLIMDTLASLALATEPPTESLLLRKPYGRNKPLISRTMMKNILGHAFYQLVVVFTLLFAGEKFFDIDSGRNAPLHAPPSEHYTIVFNTFVLMQLFNEINARKIHGERNVFEGIFNNAIFCTIVLGTFVVQIIIVQFGGKPFSCSELSIEQWLWSIFLGMGTLLWGQLISTIPTSRLKFLKEAGHGTQKEEIPEEELAEDVEEIDHAERELRRGQILWFRGLNRIQTQMDVVNAFQSGSSIQGALRRQPSIASQHHDVTNISTPTHIRVVNAFRSSLYEGLEKPESRSSIHNFMTHPEFRIEDSEPHIPLIDDTDAEDDAPTKRNSSPPPSPNKNNNAVDSGIHLTIEMNKSATSSSPGSPLHSLETSL

SEQ ID NO: 14483 - protein, 1176 aa, Homo sapiens
MGDMANNSVAYSGVKNSLKEANHDGDFGITLAELRALMELRSTDALRKIQESYGDVYGICTKLKTSPNEGLSGNPADLERREAVFGKNFIPPKKPKTFLQLVWEALQDVTLIILEIAAIVSLGLSFYQPPEGDNALCGEVSVGEEEGEGETGWIEGAAILLSVVCVVLVTAFNDWSKEKQFRGLQSRIEQEQKFTVIRGGQVIQIPVADITVGDIAQVKYGDLLPADGILIQGNDLKIDESSLTGESDHVKKSLDKDPLLLSGTHVMEGSGRMVVTAVGVNSQTGIIFTLLGAGGEEEEKKDEKKKEKKNKKQDGAIENRNKAKAQDGAAMEMQPLKSEEGGDGDEKDKKKANLPKKEKSVLQGKLTKLAVQIGKAGLLMSAITVIILVLYFVIDTFWVQKRPWLAECTPIYIQYFVKFFIIGVTVLVVAVPEGLPLAVTISLAYSVKKMMKDNNLVRHLDACETMGNATAICSDKTGTLTMNRMTVVQAYINEKHYKKVPEPEAIPPNILSYLVTGISVNCAYTSKILPPEKEGGLPRHVGNKTECALLGLLLDLKRDYQDVRNEIPEEALYKVYTFNSVRKSMSTVLKNSDGSYRIFSKGASEIILKKCFKILSANGEAKVFRPRDRDDIVKTVIEPMASEGLRTICLAFRDFPAGEPEPEWDNENDIVTGLTCIAVVGIEDPVRPEVPDAIKKCQRAGITVRMVTGDNINTARAIATKCGILHPGEDFLCLEGKDFNRRIRNEKGEIEQERIDKIWPKLRVLARSSPTDKHTLVKGIIDSTVSDQRQVVAVTGDGTNDGPALKKADVGFAMGIAGTDVAKEASDIILTDDNFTSIVKAVMWGRNVYDSISKFLQFQLTVNVVAVIVAFTGACITQDSPLKAVQMLWVNLIMDTLASLALATEPPTESLLLRKPYGRNKPLISRTMMKNILGHAFYQLVVVFTLLFAGEKFFDIDSGRNAPLHAPPSEHYTIVFNTFVLMQLFNEINARKIHGERNVFEGIFNNAIFCTIVLGTFVVQIIIVQFGGKPFSCSELSIEQWLWSIFLGMGTLLWGQLISTIPTSRLKFLKEAGHGTQKEEIPEEELAEDVEEIDHAERELRRGQILWFRGLNRIQTQMDVVNAFQSGSSIQGALRRQPSIASQHHDVTNISTPTHVVFSSSTASTTVGYSSGECIS

SEQ ID NO: 14484 - protein, 1249 aa, Homo sapiens
MGDMANNSVAYSGVKNSLKEANHDGDFGITLAELRALMELRSTDALRKIQESYGDVYGICTKLKTSPNEGLSGNPADLERREAVFGKNFIPPKKPKTFLQLVWEALQDVTLIILEIAAIVSLGLSFYQPPEGDNALCGEVSVGEEEGEGETGWIEGAAILLSVVCVVLVTAFNDWSKEKQFRGLQSRIEQEQKFTVIRGGQVIQIPVADITVGDIAQVKYGDLLPADGILIQGNDLKIDESSLTGESDHVKKSLDKDPLLLSGTHVMEGSGRMVVTAVGVNSQTGIIFTLLGAGGEEEEKKDEKKKEKKNKKQDGAIENRNKAKAQDGAAMEMQPLKSEEGGDGDEKDKKKANLPKKEKSVLQGKLTKLAVQIGKAGLLMSAITVIILVLYFVIDTFWVQKRPWLAECTPIYIQYFVKFFIIGVTVLVVAVPEGLPLAVTISLAYSVKKMMKDNNLVRHLDACETMGNATAICSDKTGTLTMNRMTVVQAYINEKHYKKVPEPEAIPPNILSYLVTGISVNCAYTSKILPPEKEGGLPRHVGNKTECALLGLLLDLKRDYQDVRNEIPEEALYKVYTFNSVRKSMSTVLKNSDGSYRIFSKGASEIILKKCFKILSANGEAKVFRPRDRDDIVKTVIEPMASEGLRTICLAFRDFPAGEPEPEWDNENDIVTGLTCIAVVGIEDPVRPEVPDAIKKCQRAGITVRMVTGDNINTARAIATKCGILHPGEDFLCLEGKDFNRRIRNEKGEIEQERIDKIWPKLRVLARSSPTDKHTLVKGIIDSTVSDQRQVVAVTGDGTNDGPALKKADVGFAMGIAGTDVAKEASDIILTDDNFTSIVKAVMWGRNVYDSISKFLQFQLTVNVVAVIVAFTGACITQDSPLKAVQMLWVNLIMDTLASLALATEPPTESLLLRKPYGRNKPLISRTMMKNILGHAFYQLVVVFTLLFAGEKFFDIDSGRNAPLHAPPSEHYTIVFNTFVLMQLFNEINARKIHGERNVFEGIFNNAIFCTIVLGTFVVQIIIVQFGGKPFSCSELSIEQWLWSIFLGMGTLLWGQLISTIPTSRLKFLKEAGHGTQKEEIPEEELAEDVEEIDHAERELRRGQILWFRGLNRIQTQMDVVNAFQSGSSIQGALRRQPSIASQHHDIRVVNAFRSSLYEGLEKPESRSSIHNFMTHPEFRIEDSEPHIPLIDDTDAEDDAPTKRNSSPPPSPNKNNNAVDSGIHLTIEMNKSATSSSPGSPLHSLETSL

SEQ ID NO: 14485 - protein, 1171 aa, Homo sapiens
MGDMANNSVAYSGVKNSLKEANHDGDFGITLAELRALMELRSTDALRKIQESYGDVYGICTKLKTSPNEGLSGNPADLERREAVFGKNFIPPKKPKTFLQLVWEALQDVTLIILEIAAIVSLGLSFYQPPEGDNALCGEVSVGEEEGEGETGWIEGAAILLSVVCVVLVTAFNDWSKEKQFRGLQSRIEQEQKFTVIRGGQVIQIPVADITVGDIAQVKYGDLLPADGILIQGNDLKIDESSLTGESDHVKKSLDKDPLLLSGTHVMEGSGRMVVTAVGVNSQTGIIFTLLGAGGEEEEKKDEKKKEKKNKKQDGAIENRNKAKAQDGAAMEMQPLKSEEGGDGDEKDKKKANLPKKEKSVLQGKLTKLAVQIGKAGLLMSAITVIILVLYFVIDTFWVQKRPWLAECTPIYIQYFVKFFIIGVTVLVVAVPEGLPLAVTISLAYSVKKMMKDNNLVRHLDACETMGNATAICSDKTGTLTMNRMTVVQAYINEKHYKKVPEPEAIPPNILSYLVTGISVNCAYTSKILPPEKEGGLPRHVGNKTECALLGLLLDLKRDYQDVRNEIPEEALYKVYTFNSVRKSMSTVLKNSDGSYRIFSKGASEIILKKCFKILSANGEAKVFRPRDRDDIVKTVIEPMASEGLRTICLAFRDFPAGEPEPEWDNENDIVTGLTCIAVVGIEDPVRPEVPDAIKKCQRAGITVRMVTGDNINTARAIATKCGILHPGEDFLCLEGKDFNRRIRNEKGEIEQERIDKIWPKLRVLARSSPTDKHTLVKGIIDSTVSDQRQVVAVTGDGTNDGPALKKADVGFAMGIAGTDVAKEASDIILTDDNFTSIVKAVMWGRNVYDSISKFLQFQLTVNVVAVIVAFTGACITQDSPLKAVQMLWVNLIMDTLASLALATEPPTESLLLRKPYGRNKPLISRTMMKNILGHAFYQLVVVFTLLFAGEKFFDIDSGRNAPLHAPPSEHYTIVFNTFVLMQLFNEINARKIHGERNVFEGIFNNAIFCTIVLGTFVVQIIIVQFGGKPFSCSELSIEQWLWSIFLGMGTLLWGQLISTIPTSRLKFLKEAGHGTQKEEIPEEELAEDVEEIDHAERELRRGQILWFRGLNRIQTQMDVVNAFQSGSSIQGALRRQPSIASQHHDVTNISTPTHVVFSSSTASTTVGFEW

SEQ ID NO: 14486 - protein, 1184 aa, Homo sapiens
MGDMANNSVAYSGVKNSLKEANHDGDFGITLAELRALMELRSTDALRKIQESYGDVYGICTKLKTSPNEGLSGNPADLERREAVFGKNFIPPKKPKTFLQLVWEALQDVTLIILEIAAIVSLGLSFYQPPEGDNALCGEVSVGEEEGEGETGWIEGAAILLSVVCVVLVTAFNDWSKEKQFRGLQSRIEQEQKFTVIRGGQVIQIPVADITVGDIAQVKYGDLLPADGILIQGNDLKIDESSLTGESDHVKKSLDKDPLLLSGTHVMEGSGRMVVTAVGVNSQTGIIFTLLGAGGEEEEKKDEKKKEKKNKKQDGAIENRNKAKAQDGAAMEMQPLKSEEGGDGDEKDKKKANLPKKEKSVLQGKLTKLAVQIGKAGLLMSAITVIILVLYFVIDTFWVQKRPWLAECTPIYIQYFVKFFIIGVTVLVVAVPEGLPLAVTISLAYSVKKMMKDNNLVRHLDACETMGNATAICSDKTGTLTMNRMTVVQAYINEKHYKKVPEPEAIPPNILSYLVTGISVNCAYTSKILPPEKEGGLPRHVGNKTECALLGLLLDLKRDYQDVRNEIPEEALYKVYTFNSVRKSMSTVLKNSDGSYRIFSKGASEIILKKCFKILSANGEAKVFRPRDRDDIVKTVIEPMASEGLRTICLAFRDFPAGEPEPEWDNENDIVTGLTCIAVVGIEDPVRPEVPDAIKKCQRAGITVRMVTGDNINTARAIATKCGILHPGEDFLCLEGKDFNRRIRNEKGEIEQERIDKIWPKLRVLARSSPTDKHTLVKGIIDSTVSDQRQVVAVTGDGTNDGPALKKADVGFAMGIAGTDVAKEASDIILTDDNFTSIVKAVMWGRNVYDSISKFLQFQLTVNVVAVIVAFTGACITQDSPLKAVQMLWVNLIMDTLASLALATEPPTESLLLRKPYGRNKPLISRTMMKNILGHAFYQLVVVFTLLFAGEKFFDIDSGRNAPLHAPPSEHYTIVFNTFVLMQLFNEINARKIHGERNVFEGIFNNAIFCTIVLGTFVVQLISTIPTSRLKFLKEAGHGTQKEEIPEEELAEDVEEIDHAERELRRGQILWFRGLNRIQTQIRVVNAFRSSLYEGLEKPESRSSIHNFMTHPEFRIEDSEPHIPLIDDTDAEDDAPTKRNSSPPPSPNKNNNAVDSGIHLTIEMNKSATSSSPGSPLHSLETSL

SEQ ID NO: 14487 - protein, 483 aa, Homo sapiens
MGDDRPFVCNAPGCGQRFTNEDHLAVHKHKHEMTLKFGPARTDSVIIADQTPTPTRFLKNCEEVGLFNELASSFEHEFKKAADEDEKKAAAGPLDMSLPSTPDIKIKEEEPVEVDSSPPDSPASSPCSPPLKEKEVTPKPVLISTPTPTIVRPGSLPLHLGYDPLHPTLPSPTSVITQAPPSNRQMGSPTGSLPLVMHLANGQTMPVLPGPPVQMPSVISLARPVSMVPNIPGIPGPPVNSSGSISPSGHPIPSEAKMRLKATLTHQVSSINGGCGMVVGTASTMVTARPEQSQILIQHPDAPSPAQPQVSPAQPTPSTGGRRRRTVDEDPDERRQRFLERNRAAASRCRQKRKLWVSSLEKKAEELTSQNIQLSNEVTLLRNEVAQLKQLLLAHKDCPVTALQKKTQGYLESPKESSEPTGSPAPVIQHSSATAPSNGLSVRSAAEAVATSVLTQMASQRTELSMPIQSHVIMTPQSQSAGR

SEQ ID NO: 14488 - protein, 494 aa, Homo sapiens
MGDDRPFVCNAPGCGQRFTNEDHLAVHKHKHEMTLKFGPARTDSVIIADQTPTPTRFLKNCEEVGLFNELASSFEHEFKKAADEDEKKARSRTVAKKLVAAAGPLDMSLPSTPDIKIKEEEPVEVDSSPPDSPASSPCSPPLKEKEVTPKPVLISTPTPTIVRPGSLPLHLGYDPLHPTLPSPTSVITQAPPSNRQMGSPTGSLPLVMHLANGQTMPVLPGPPVQMPSVISLARPVSMVPNIPGIPGPPVNSSGSISPSGHPIPSEAKMRLKATLTHQVSSINGGCGMVVGTASTMVTARPEQSQILIQHPDAPSPAQPQVSPAQPTPSTGGRRRRTVDEDPDERRQRFLERNRAAASRCRQKRKLWVSSLEKKAEELTSQNIQLSNEVTLLRNEVAQLKQLLLAHKDCPVTALQKKTQGYLESPKESSEPTGSPAPVIQHSSATAPSNGLSVRSAAEAVATSVLTQMASQRTELSMPIQSHVIMTPQSQSAGR

SEQ ID NO: 14489 - protein, 462 aa, Homo sapiens
MGDDRPFVCNAPGCGQRFTNEDHLAVHKHKHEMTLKFGPARTDSVIIADQTPTPTRFLKNCEEVGLFNELASSFEHEFKKAADEDEKKAAAGPLDMSLPSTPDIKIKEEEPVEEVTPKPVLISTPTPTIVRPGSLPLHLGYDPLHPTLPSPTSVITQAPPSNRQMGSPTGSLPLVMHLANGQTMPVLPGPPVQMPSVISLARPVSMVPNIPGIPGPPVNSSGSISPSGHPIPSEAKMRLKATLTHQVSSINGGCGMVVGTASTMVTARPEQSQILIQHPDAPSPAQPQVSPAQPTPSTGGRRRRTVDEDPDERRQRFLERNRAAASRCRQKRKLWVSSLEKKAEELTSQNIQLSNEVTLLRNEVAQLKQLLLAHKDCPVTALQKKTQGYLESPKESSEPTGSPAPVIQHSSATAPSNGLSVRSAAEAVATSVLTQMASQRTELSMPIQSHVIMTPQSQSAGR

SEQ ID NO: 14490 - protein, 473 aa, Homo sapiens
MGDDRPFVCNAPGCGQRFTNEDHLAVHKHKHEMTLKFGPARTDSVIIADQTPTPTRFLKNCEEVGLFNELASSFEHEFKKAADEDEKKARSRTVAKKLVAAAGPLDMSLPSTPDIKIKEEEPVEEVTPKPVLISTPTPTIVRPGSLPLHLGYDPLHPTLPSPTSVITQAPPSNRQMGSPTGSLPLVMHLANGQTMPVLPGPPVQMPSVISLARPVSMVPNIPGIPGPPVNSSGSISPSGHPIPSEAKMRLKATLTHQVSSINGGCGMVVGTASTMVTARPEQSQILIQHPDAPSPAQPQVSPAQPTPSTGGRRRRTVDEDPDERRQRFLERNRAAASRCRQKRKLWVSSLEKKAEELTSQNIQLSNEVTLLRNEVAQLKQLLLAHKDCPVTALQKKTQGYLESPKESSEPTGSPAPVIQHSSATAPSNGLSVRSAAEAVATSVLTQMASQRTELSMPIQSHVIMTPQSQSAGR

SEQ ID NO: 14491 - protein, 307 aa, Homo sapiens
MGDDRPFVCNAPGCGQRFTNEDHLAVHKHKHEMTLKFGPARTDSVIIADQTPTPTRFLKNCEEVGLFNELASSFEHEFKKAADEDEKKAAAGPLDMSLPSTPDIKIKEEEPVEVDSSPPDSPASSPCSPPLKEKSPAQPTPSTGGRRRRTVDEDPDERRQRFLERNRAAASRCRQKRKLWVSSLEKKAEELTSQNIQLSNEVTLLRNEVAQLKQLLLAHKDCPVTALQKKTQGYLESPKESSEPTGSPAPVIQHSSATAPSNGLSVRSAAEAVATSVLTQMASQRTELSMPIQSHVIMTPQSQSAGR

SEQ ID NO: 14492 - protein, 117 aa, Homo sapiens
MGDDRPFVCNAPGCGQRFTNEDHLAVHKHKHEMTLKFGPARTDSVIIADQTPTPTRFLKNCEEVGLFNELASSFEHEFKKAADEDEKKARSRTVAKKLVVFRPRLFLLCFGIIFLIG

SEQ ID NO: 14493 - protein, 679 aa, Homo sapiens
MGIRGLMSFVEDHSNEFFTDLKLRDTKIVIDGYALFHRLCFSSNLDLRYGGDYDSFADVVQKFFESLFACNICPYVVLDGGCDISDKKLTTLKDRAREKIQMAHSLSVGGSGYVCPLLIREVFIQVLIKLRVCFVQCFSEADRDIMTLANHWNCPVLSSDSDFCIFDLKTGFCPLNSFQWRNMNTIKGTQNYIPAKCFSLDAFCHHFSNMNKALLPLFAVLCGNDHVNLPIMETFLSKARLPLGATSSKGRRHHRILGLLNWLSHFANPTEALDNVLKYLPKKDRENVKELLCCSMEEYQQSQVKLQDFFQCGTYVCPDALNLGLPEWVLVALAKGQLSPFISDALVLRRTILPTQVENMQQPNAHRISQPIRQIIYGLLLNASPHLDKTSWNALPPQPLAFSEVERINKNIRTSIIDAVELAKDHSDLSRLTELSLRRRQMLLLETLKVKQTILEPIPTSLKLPIAVSCYWLQHTETKAKLHHLQSLLLTMLVGPLIAIINSPGKEELQEDGAKMLYAEFQRVKAQTRLGTRLDLDTAHIFCQWQSCLQMGMYLNQLLSTPLPEPDLTRLYSGSLVHGLCQQLLASTSVESLLSICPEAKQLYEYLFNATRSYAPAEIFLPKGRSNSKKKRQKKQNTSCSKNRGRTTAHTKCWYEGNNRFGLLMVENLEEHSEASNIE

SEQ ID NO: 14494 - protein, 520 aa, Homo sapiens
MGIRGLMSFVEDHSNEFFTDLKLRDTKIVIDGYALFHRLCFSSNLDLRYGGDYDSFADVVQKFFESLFACNICPYVVLDGGCDISDKKLTTLKDRAREKIQMAHSLSVGGSGYVCPLLIREVFIQVLIKLRVCFVQCFSEADRDIMTLANHWNCPVLSSDSDFCIFDLKTGFCPLNSFQWRNMNTIKGTQNYIPAKCFSLDAFCHHFSNMNKALLPLFAVLCGNDHVNLPIMETFLSKARLPLGATSSKGRRHHRILGLLNWLSHFANPTEALDNVLKYLPKKDRENVKELLCCSMEEYQQSQVKLQDFFQCGTYVCPDALNLGLPEWVLVALAKGQLSPFISDALVLRRTILPTQVENMQQPNAHRISQPIRQIIYGLLLNASPHLDKTSWNALPPQPLAFSEVERINKNIRTSIIDAVELAKDHSDLSRLTELSLRRRQMLLLETLKVKQTILEPIPTSLKLPIAVSCYWLQHTETKAKLHHLQSLLLTMLVGPLIAIINSPGNVDPVPRQAQCLAPR

SEQ ID NO: 14495 - protein, 1192 aa, Homo sapiens
MFCSEKKLREVERIVKANDREYNEKFQYADNRIHTSKYNILTFLPINLFEQFQRVANAYFLCLLILQLIPEISSLTWFTTIVPLVLVITMTAVKDATDDYFRHKSDNQVNNRQSEVLINSKLQNEKWMNVKVGDIIKLENNQFVAADLLLLSSSEPHGLCYVETAELDGETNLKVRHALSVTSELGADISRLAGFDGIVVCEVPNNKLDKFMGILSWKDSKHSLNNEKIILRGCILRNTSWCFGMVIFAGPDTKLMQNSGKTKFKRTSIDRLMNTLVLWIFGFLICLGIILAIGNSIWESQTGDQFRTFLFWNEGEKSSVFSGFLTFWSYIIILNTVVPISLYVSVEVIRLGHSYFINWDRKMYYSRKAIPAVARTTTLNEELGQIEYIFSDKTGTLTQNIMTFKRCSINGRIYGEVHDDLDQKTEITQEKEPVDFSVKSQADREFQFFDHHLMESIKMGDPKVHEFLRLLALCHTVMSEENSAGELIYQVQSPDEGALVTAARNFGFIFKSRTPETITIEELGTLVTYQLLAFLDFNNTRKRMSVIVRNPEGQIKLYSKGADTILFEKLHPSNEVLLSLTSDHLSEFAGEGLRTLAIAYRDLDDKYFKEWHKMLEDANAATEERDERIAGLYEEIERDLMLLGATAVEDKLQEGVIETVTSLSLANIKIWVLTGDKQETAINIGYACNMLTDDMNDVFVIAGNNAVEVREELRKAKQNLFGQNRNFSNGHVVCEKKQQLELDSIVEETITGDYALIINGHSLAHALESDVKNDLLELACMCKTVICCRVTPLQKAQVVELVKKYRNAVTLAIGDGANDVSMIKSAHIGVGISGQEGLQAVLASDYSFAQFRYLQRLLLVHGRWSYFRMCKFLCYFFYKNFAFTLVHFWFGFFCGFSAQTVYDQWFITLFNIVYTSLPVLAMGIFDQDVSDQNSVDCPQLYKPGQLNLLFNKRKFFICVLHGIYTSLVLFFIPYGAFYNVAGEDGQHIADYQSFAVTMATSLVIVVSVQIALDTSYWTFINHVFIWGSIAIYFSILFTMHSNGIFGIFPNQFPFVGNARHSLTQKCIWLVILLTTVASVMPVVAFRFLKVDLYPTLSDQIRRWQKAQKKARPPSSRRPRTRRSSSRRSGYAFAHQEGYGELITSGKNMRAKNPPPTSGLEKTHYNSTSWIENLCKKTTDTVSSFSQDKTVKL

SEQ ID NO: 14496 - protein, 106 aa, Homo sapiens
MSTNNMSDPRRPNKVLRYKPPPSECNPALDDPTPDYMNLLGMIFSMCGLMLKLKWCAWVAVYCSFISFANSRSSEDTKQMMSSFMLSISAVVMSYLQNPQPMTPPW

SEQ ID NO: 14497 - protein, 1129 aa, Homo sapiens
MRSSASRLSSFSSRDSLWNRMPDQISVSEFIAETTEDYNSPTTSSFTTRLHNCRNTVTLLEEALDQDRTALQKVKKSVKAIYNSGQDHVQNEENYAQVLDKFGSNFLSRDNPDLGTAFVKFSTLTKELSTLLKNLLQGLSHNVIFTLDSLLKGDLKGVKGDLKKPFDKAWKDYETKFTKIEKEKREHAKQHGMIRTEITGAEIAEEMEKERRLFQLQMCEYLIKVNEIKTKKGVDLLQNLIKYYHAQCNFFQDGLKTADKLKQYIEKLAADLYNIKQTQDEEKKQLTALRDLIKSSLQLDQKEDSQSRQGGYSMHQLQGNKEYGSEKKGYLLKKSDGIRKVWQRRKCSVKNGILTISHATSNRQPAKLNLLTCQVKPNAEDKKSFDLISHNRTYHFQAEDEQDYVAWISVLTNSKEEALTMAFRGEQSAGENSLEDLTKAIIEDVQRLPGNDICCDCGSSEPTWLSTNLGILTCIECSGIHREMGVHISRIQSLELDKLGTSELLLAKNVGNNSFNDIMEANLPSPSPKPTPSSDMTVRKEYITAKYVDHRFSRKTCSTSSAKLNELLEAIKSRDLLALIQVYAEGVELMEPLLEPGQELGETALHLAVRTADQTSLHLVDFLVQNCGNLDKQTALGNTVLHYCSMYSKPECLKLLLRSKPTVDIVNQAGETALDIAKRLKATQCEDLLSQAKSGKFNPHVHVEYEWNLRQEEIDESDDDLDDKPSPIKKERSPRPQSFCHSSSISPQDKLALPGFSTPRDKQRLSYGAFTNQIFVSTSTDSPTSPTTEAPPLPPRNAGKGPTGPPSTLPLSTQTSSGSSTLSKKRPPPPPPGHKRTLSDPPSPLPHGPPNKGAVPWGNDGGPSSSSKTTNKFEGLSQQSSTSSAKTALGPRVLPKLPQKVALRKTDHLSLDKATIPPEIFQKSSQLAELPQKPPPGDLPPKPTELAPKPQIGDLPPKPGELPPKPQLGDLPPKPQLSDLPPKPQMKDLPPKPQLGDLLAKSQTGDVSPKAQQPSEVTLKSHPLDLSPNVQSRDAIQKQASEDSNDLTPTLPETPVPLPRKINTGKNKVRRVKTIYDCQADNDDELTFIEGEVIIVTGEEDQEWWIGHIEGQPERKGVFPVSFVHILSD

SEQ ID NO: 14498 - protein, 1132 aa, Homo sapiens
MRSSASRLSSFSSRDSLWNRMPDQISVSEFIAETTEDYNSPTTSSFTTRLHNCRNTVTLLEEALDQDRTALQKVKKSVKAIYNSGQDHVQNEENYAQVLDKFGSNFLSRDNPDLGTAFVKFSTLTKELSTLLKNLLQGLSHNVIFTLDSLLKGDLKGVKGDLKKPFDKAWKDYETKFTKIEKEKREHAKQHGMIRTEITGAEIAEEMEKERRLFQLQMCEYLIKVNEIKTKKGVDLLQNLIKYYHAQCNFFQDGLKTADKLKQYIEKLAADLYNIKQTQDEEKKQLTALRDLIKSSLQLDQKESRRDSQSRQGGYSMHQLQGNKEYGSEKKGYLLKKSDGIRKVWQRRKCSVKNGILTISHATSNRQPAKLNLLTCQVKPNAEDKKSFDLISHNRTYHFQAEDEQDYVAWISVLTNSKEEALTMAFRGEQSAGENSLEDLTKAIIEDVQRLPGNDICCDCGSSEPTWLSTNLGILTCIECSGIHREMGVHISRIQSLELDKLGTSELLLAKNVGNNSFNDIMEANLPSPSPKPTPSSDMTVRKEYITAKYVDHRFSRKTCSTSSAKLNELLEAIKSRDLLALIQVYAEGVELMEPLLEPGQELGETALHLAVRTADQTSLHLVDFLVQNCGNLDKQTALGNTVLHYCSMYSKPECLKLLLRSKPTVDIVNQAGETALDIAKRLKATQCEDLLSQAKSGKFNPHVHVEYEWNLRQEEIDESDDDLDDKPSPIKKERSPRPQSFCHSSSISPQDKLALPGFSTPRDKQRLSYGAFTNQIFVSTSTDSPTSPTTEAPPLPPRNAGKGPTGPPSTLPLSTQTSSGSSTLSKKRPPPPPPGHKRTLSDPPSPLPHGPPNKGAVPWGNDGGPSSSSKTTNKFEGLSQQSSTSSAKTALGPRVLPKLPQKVALRKTDHLSLDKATIPPEIFQKSSQLAELPQKPPPGDLPPKPTELAPKPQIGDLPPKPGELPPKPQLGDLPPKPQLSDLPPKPQMKDLPPKPQLGDLLAKSQTGDVSPKAQQPSEVTLKSHPLDLSPNVQSRDAIQKQASEDSNDLTPTLPETPVPLPRKINTGKNKVRRVKTIYDCQADNDDELTFIEGEVIIVTGEEDQEWWIGHIEGQPERKGVFPVSFVHILSD

SEQ ID NO: 14499 - protein, 132 aa, Homo sapiens
MDVTRLLLATLLVFLCFFTANSHLPPEEKLRDDRSLRSNSSVNLLDVPSVSIVALNKKSKQIGRKAAEKKRSSKKEASMKKVVRPRTPLSAPCVATRNSCKPPAPACCDPCASCQCRFFRSACSCRVLSLNC

SEQ ID NO: 14500 - protein, 200 aa, Homo sapiens
MPCPGAPCCSLVATGSRVPFSGLKEEEEEDGEDDEEEEEEGFFQKVLTPLLSWLLSRRLWLGPQCSKLPLPSCCRQPPPAGPPVEGDGWLKSFQRSRRMCFTSKSFRPEPDMLYAQKAKGWQLTQDSGGWEVQDQCTRIWSKENLLALNTHSRRQKGKRENKVCVSTWQKSRGDRTYSSMATTPSMTKILEGCMYRKLKC

SEQ ID NO: 14501 - protein, 193 aa, Homo sapiens
MSGPPSAPQGALAAPRSPAVRRKGLQAPSWGSPGRPAAHSPWACGPPHWGPQRGPRNAAAARPGPRSRWHKRCAAACGACARPPGHQLQPPGAGAPQPGVACSYLGPRPQRTPCSAQSRPGWCAGPRRRHAPGTEPHVAPGRAPPPRAGASPGSRLLPGSPSLLLPAATWRTWGQESKVLRKILKAWDPFSLL

SEQ ID NO: 14502 - protein, 151 aa, Homo sapiens
MFLHLDSHSSLERTKPTVVGVDTHMELDEVHCCPGRDSGGGFIKGPMLQGLQGEGKLAPIPKPTLPSPSRLTLFVSSSQMEDHGFPARRNGLTQASFIYQMPAGWGSPGGLFLPCQPVPTPVVLKPPLPPCPISWGESGPAVDGIRRTPAP

SEQ ID NO: 14503 - protein, 335 aa, Homo sapiens
MAEGGSPDGRAGPGSAGRNLKEWLREQFCDHPLEHCEDTRLHDAAYVGDLQTLRSLLQEESYRSRINEKSVWCCGWLPCTPLRIAATAGHGSCVDFLIRKGAEVDLVDVKGQTALYVAVVNGHLESTQILLEAGADPNGSRHHRSTPVYHASRVGRADILKALIRYGADVDVNHHLTPDVQPRFSRRLTSLVVCPLYISAAYHNLQCFRLLLLAGANPDFNCNGPVNTQGFYRGSPGCVMDAVLRHGCEAAFVSLLVEFGANLNLVKWESLGPESRGRRKVDPEALQVFKEARSVPRTLLCLCRVAVRRALGKHRLHLIPSLPLPDPIKKFLLHE

SEQ ID NO: 14504 - protein, 1390 aa, Homo sapiens
MVVLRSSLELHNHSAASATGSLDLSSDFLSLEHIGRRRLRSAGAAQKKPAATTAKAGDGSSVKEVETYHRTRALRSLRKDAQNSSDSSFEKNVEITEQLANGRHFTRQLARQQADKKKEEHREDKVIPVTRSLRARNIVQSTEHLHEDNGDVEVRRSCRIRSRYSGVNQSMLFDKLITNTAEAVLQKMDDMKKMRRQRMRELEDLGVFNETEESNLNMYTRGKQKDIQRTDEETTDNQEGSVESSEEGEDQEHEDDGEDEDDEDDDDDDDDDDDDDDEDDEDEEDGEEENQKRYYLRQRKATVYYQAPLEKPRHQRKPNIFYSGPASPARPRYRLSSAGPRSPYCKRMNRRRHAIHSSDSTSSSSSEDEQHFERRRKRSRNRAINRCLPLNFRKDELKGIYKDRMKIGASLADVDPMQLDSSVRFDSVGGLSNHIAALKEMVVFPLLYPEVFEKFKIQPPRGCLFYGPPGTGKTLVARALANECSQGDKRVAFFMRKGADCLSKWVGESERQLRLLFDQAYQMRPSIIFFDEIDGLAPVRSSRQDQIHSSIVSTLLALMDGLDSRGEIVVIGATNRLDSIDPALRRPGRFDREFLFSLPDKEARKEILKIHTRDWNPKPLDTFLEELAENCVGYCGADIKSICAEAALCALRRRYPQIYTTSEKLQLDLSSINISAKDFEVAMQKMIPASQRAVTSPGQALSTVVKPLLQNTVDKILEALQRVFPHAEFRTNKTLDSDISCPLLESDLAYSDDDVPSVYENGLSQKSSHKAKDNFNFLHLNRNACYQPMSFRPRILIVGEPGFGQGSHLAPAVIHALEKFTVYTLDIPVLFGVSTTSPEETCAQVIREAKRTAPSIVYVPHIHVWWEIVGPTLKATFTTLLQNIPSFAPVLLLATSDKPHSALPEEVQELFIRDYGEIFNVQLPDKEERTKFFEDLILKQAAKPPISKKKAVLQALEVLPVAPPPEPRSLTAEEVKRLEEQEEDTFRELRIFLRNVTHRLAIDKRFRVFTKPVDPDEVPDYVTVIKQPMDLSSVISKIDLHKYLTVKDYLRDIDLICSNALEYNPDRDPGDRLIRHRACALRDTAYAIIKEELDEDFEQLCEEIQESRKKRGCSSSKYAPSYYHVMPKQNSTLVGDKRSDPEQNEKLKTPSTPVACSTPAQLKRKIRKKSNWYLGTIKKRRKISQAKDDSQNAIDHKIESDTEETQDTSVDHNETGNTGESSVEENEKQQNASESKLELRNNSNTCNIENELEDSRKTTACTELRDKIACNGDASSSQIIHISDENEGKEMCVLRMTRARRSQVEQQQLITVEKALAILSQPTPSLVVDHERLKNLLKTVVKKSQNYNIFQLENLYAVISQCIYRHRKDHDKTSLIQKMEQEVENFSCSR

SEQ ID NO: 14505 - protein, 412 aa, Homo sapiens
MLFDKLITNTAEAVLQKMDDMKKMRRQRMRELEDLGVFNETEESNLNMYTRGKQKDIQRTDEETTDNQEGSVESSEEGEDQEHEDDGEDEDDEDDDDDDDDDDDDDDEDDEDEEDGEEENQKRYYLRQRKATVYYQAPLEKPRHQRKPNIFYSGPASPARPRYRLSSAGPRSPYCKRMNRRRHAIHSSDSTSSSSSEDEQHFERRRKRSRNRAINRCLPLNFRKDELKGIYKDRMKIGASLADVDPMQLDSSVRFDSVGGLSNHIAALKEMVVFPLLYPEVFEKFKIQPPRGCLFYGPPGTGKTLVARALANECSQGDKRVAFFMRKGADCLSKWVGESERQLRLLFDQAYQMRPSIIFFDEIDGLAPVRSSRQDQIHSSYGWIGQQRGNCGHWCYEQARFYRSCFTKAWSL

SEQ ID NO: 14506 - protein, 946 aa, Homo sapiens
MVEGRVSEFLKKLGFSGGGRQYQALEKDEEEALIDEQSELKAIEKEKKVTALPPKEACKCQKEDLARAFCVDLHTGLSEFSVTQRRLAHGWNEFVADNSEPVWKKYLDQFKNPLILLLLGSALVSVLTKEYEDAVSIATAVLVVVTVAFIQEYRSEKSLEELTKLVPPECNCLREGKLQHLLARELVPGDVVSLSIGDRIPADIRLTEVTDLLVDESSFTGEAEPCSKTDSPLTGGGDLTTLSNIVFMGTLVQYGRGQGVVIGTGESSQFGEVFKMMQAEETPKTPLQKSMDRLGKQLTLFSFGIIGLIMLIGWSQGKQLLSMFTIGVSLAVAAIPEGLPIVVMVTLVLGVLRMAKKRVIVKKLPIVETLGCCSVLCSDKTGTLTANEMTVTQLVTSDGLRAEVSGVGYDGQGTVCLLPSKEVIKEFSNVSVGKLVEAGCVANNAVIRKNAVMGQPTEGALMALAMKMDLSDIKNSYIRKKEIPFSSEQKWMAVKCSLKTEDQEDIYFMKGALEEVIRYCTMYNNGGIPLPLTPQQRSFCLQEEKRMGSLGLRVLALASGPELGRLTFLGLVGIIDPPRVGVKEAVQVLSESGVSVKMITGDALETALAIGRNIGLCNGKLQAMSGEEVDSVEKGELADRVGKVSVFFRTSPKHKLKIIKALQESGAIVAMTGDGVNDAVALKSADIGIAMGQTGTDVSKEAANMILVDDDFSAIMNAVEEGKGIFYNIKNFVRFQLSTSISALSLITLSTVFNLPSPLNAMQILWINIIMDGPPAQSLGVEPVDKDAFRQPPRSVRDTILSRALILKILMSAAIIISGTLFIFWKEMPEDRASTPRTTTMTFTCFVFFDLFNALTCRSQTKLIFEIGFLRNHMFLYSVLGSILGQLAVIYIPPLQRVFQTENLGALDLLFLTGLASSVFILSELLKLCEKYCCSPKRVQMHPEDV

SEQ ID NO: 14507 - protein, 963 aa, Homo sapiens
MLHFHLLKFKTRVVFSAVIIMVTGLCLFLLSLPHLHGVFEQVPAPWWTSLCPWPIMEAAAFQSGSLYPVASFLAAPMSELVPDLSFQVDLHTGLSEFSVTQRRLAHGWNEFVADNSEPVWKKYLDQFKNPLILLLLGSALVSVLTKEYEDAVSIATAVLVVVTVAFIQEYRSEKSLEELTKLVPPECNCLREGKLQHLLARELVPGDVVSLSIGDRIPADIRLTEVTDLLVDESSFTGEAEPCSKTDSPLTGGGDLTTLSNIVFMGTLVQYGRGQGVVIGTGESSQFGEVFKMMQAEETPKTPLQKSMDRLGKQLTLFSFGIIGLIMLIGWSQGKQLLSMFTIGVSLAVAAIPEGLPIVVMVTLVLGVLRMAKKRVIVKKLPIVETLGCCSVLCSDKTGTLTANEMTVTQLVTSDGLRAEVSGVGYDGQGTVCLLPSKEVIKEFSNVSVGKLVEAGCVANNAVIRKNAVMGQPTEGALMALAMKMDLSDIKNSYIRKKEIPFSSEQKWMAVKCSLKTEDQEDIYFMKGALEEVIRYCTMYNNGGIPLPLTPQQRSFCLQEEKRMGSLGLRVLALASGPELGRLTFLGLVGIIDPPRVGVKEAVQVLSESGVSVKMITGDALETALAIGRNIGLCNGKLQAMSGEEVDSVEKGELADRVGKVSVFFRTSPKHKLKIIKALQESGAIVAMTGDGVNDAVALKSADIGIAMGQTGTDVSKEAANMILVDDDFSAIMNAVEEGKGIFYNIKNFVRFQLSTSISALSLITLSTVFNLPSPLNAMQILWINIIMDGPPAQSLGVEPVDKDAFRQPPRSVRDTILSRALILKILMSAAIIISGTLFIFWKEMPEDRASTPRTTTMTFTCFVFFDLFNALTCRSQTKLIFEIGFLRNHMFLYSVLGSILGQLAVIYIPPLQRVFQTENLGALDLLFLTGLASSVFILSELLKLCEKYCCSPKRVQMHPEDV

SEQ ID NO: 14508 - protein, 975 aa, Homo sapiens
MVEGRVSEFLKKLGFSGGGRQYQALEKDEEEALIDEQSELKAIEKEKKVTALPPKEACKCQKEDLARAFCVDLHTGLSEFSVTQRRLAHGWNEFVADNSEPVWKKYLDQFKNPLILLLLGSALVSVLTKEYEDAVSIATAVLVVVTVAFIQEYRSEKSLEELTKLVPPECNCLREGKLQHLLARELVPGDVVSLSIGDRIPADIRLTEVTDLLVDESSFTGEAEPCSKTDSPLTGGGDLTTLSNIVFMGTLVQYGRGQGVVIGTGESSQFGEVFKMMQAEETPKTPLQKSMDRLGKQLTLFSFGIIGLIMLIGWSQGKQLLSMFTIGVSLAVAAIPEGLPIVVMVTLVLGVLRMAKKRVIVKKLPIVETLGCCSVLCSDKTGTLTANEMTVTQLVTSDGLRAEVSGVGYDGQGTVCLLPSKEVIKEFSNVSVGKLVEAGCVANNAVIRKNAVMGQPTEGALMALAMKMDLSDIKNSYIRKKEIPFSSEQKWMAVKCSLKTEDQEDIYFMKGALEEVIRYCTMYNNGGIPLPLTPQQRSFCLQEEKRMGSLGLRVLALASGPELGRLTFLGLVGIIDPPRVGVKEAVQVLSESGVSVKMITGDALETALAIGRNIGLCNGKLQAMSGEEVDSVEKGELADRVGKVSVFFRTSPKHKLKIIKALQESGAIVAMTGDGVNDAVALKSADIGIAMGQTGTDVSKEAANMILVDDDFSAIMNAVEEGKGIFYNIKNFVRFQLSTSISALSLITLSTVFNLPSPLNAMQILWINIIMDGPPAQRSSQKTEVCCTAVRLGVEGRGESTWAGRAGLGVEPVDKDAFRQPPRSVRDTILSRALILKILMSAAIIISGTLFIFWKEMPEDRASTPRTTTMTFTCFVFFDLFNALTCRSQTKLIFEIGFLRNHMFLYSVLGSILGQLAVIYIPPLQRVFQTENLGALDLLFLTGLASSVFILSELLKLCEKYCCSPKRVQMHPEDV

SEQ ID NO: 14509 - protein, 512 aa, Homo sapiens
MDLKESPSEGSLQPSSIQIFANTSTLHGIRHIFVYGPLTIRRVLWAVAFVGSLGLLLVESSERVSYYFSYQHVTKVDEVVAQSLVFPAVTLCNLNGFRFSRLTTNDLYHAGELLALLDVNLQIPDPHLADPSVLEALRQKANFKHYKPKQFSMLEFLHRVGHDLKDMMLYCKFKGQECGHQDFTTVFTKYGKCYMFNSGEDGKPLLTTVKGGTGNGLEIMLDIQQDEYLPIWGETEETTFEAGVKVQIHSQSEPPFIQELGFGVAPGFQTFVATQEQRLTYLPPPWGECRSSEMGLDFFPVYSITACRIDCETRYIVENCNCRMVHMPGDAPFCTPEQHKECAEPALGLLAEKDSNYCLCRTPCNLTRYNKELSMVKIPSKTSAKYLEKKFNKSEKYISENILVLDIFFEALNYETIEQKKAYEVAALLGDIGGQMGLFIGASILTILELFDYIYELIKEKLLDLLGKEEDEGSHDENVSTCDTMPNHSETISHTVNVPLQTTLGTLEEIAC

SEQ ID NO: 14510 - protein, 563 aa, Homo sapiens
MSRIGGAGLPAAALTGPGRFRMAREEPAPAALAAAGQPGGGRGGERALQGPGVARRGRPSLSRAKLHGLRHMCAGRTAAGGSFQRRALWVLAFCTSFGLLLSWSSNRLLYWLSFPSHTRVHREWSRQLPFPAVTVCNNNPLRFPRLSKGDLYYAGHWLGLLLPNRTARPLVSELLRGDEPRRQWFRKLADFRLFLPPRHFEGISAAFMDRLGHQLEDMLLSCKYRGELCGPHNFSSVFTKYGKCYMFNSGEDGKPLLTTVKGGTGNGLEIMLDIQQDEYLPIWGETEETTFEAGVKVQIHSQSEPPFIQELGFGVAPGFQTFVATQEQRLTYLPPPWGECRSSEMGLDFFPVYSITACRIDCETRYIVENCNCRMVHMPGDAPFCTPEQHKECAEPALGLLAEKDSNYCLCRTPCNLTRYNKELSMVKIPSKTSAKYLEKKFNKSEKYISENILVLDIFFEALNYETIEQKKAYEVAALLGDIGGQMGLFIGASILTILELFDYIYELIKEKLLDLLGKEEDEGSHDENVSTCDTMPNHSETISHTVNVPLQTTLGTLEEIAC

SEQ ID NO: 14511 - protein, 151 aa, Homo sapiens
MSKNTVSSARFRKVDVDEYDENKFVDEEDGGDGQAGPDEGEVDSCLRQGNMTAALQAALKNPPINTKSQAVKDRAGSIVLKVLISFKANDIEKAVQSLDKNGVDLLMKYIYKGFESPSDNSSAMLLQWHEKALAAGGVGSIVRVLTARKTV

SEQ ID NO: 14512 - protein, 154 aa, Homo sapiens
MSKNTVSSARFRKVDVDEYDENKFVDEEDGGDGQAGPDEGEVDSCLRHSITGNMTAALQAALKNPPINTKSQAVKDRAGSIVLKVLISFKANDIEKAVQSLDKNGVDLLMKYIYKGFESPSDNSSAMLLQWHEKALAAGGVGSIVRVLTARKTV

SEQ ID NO: 14513 - protein, 418 aa, Homo sapiens
MGDKGTRVFKKASPNGKLTVYLGKRDFVDHIDLVDPVDGVVLVDPEYLKERRVYVTLTCAFRYGREDLDVLGLTFRKDLFVANVQSFPPAPEDKKPLTRLQERLIKKLGEHAYPFTFEIPPNLPCSVTLQPGPEDTGKACGVDYEVKAFCAENLEEKIHKRNSVRLVIRKVQYAPERPGPQPTAETTRQFLMSDKPLHLEASLDKEIYYHGEPISVNVHVTNNTNKTVKKIKISVRQYADICLFNTAQYKCPVAMEEADDTVAPSSTFCKVYTLTPFLANNREKRGLALDGKLKHEDTNLASSTLLREGANREILGIIVSYKVKVKLVVSRGGLLGDLASSDVAVELPFTLMHPKPKEEPPHREVPENETPVDTNLIELDTNDDDIVFEDFARQRLKGMKDDKEEEEDGTGSPQLNNR

SEQ ID NO: 14514 - protein, 410 aa, Homo sapiens
MGDKGTRVFKKASPNGKLTVYLGKRDFVDHIDLVDPVDGVVLVDPEYLKERRVYVTLTCAFRYGREDLDVLGLTFRKDLFVANVQSFPPAPEDKKPLTRLQERLIKKLGEHAYPFTFEIPPNLPCSVTLQPGPEDTGKACGVDYEVKAFCAENLEEKIHKRNSVRLVIRKVQYAPERPGPQPTAETTRQFLMSDKPLHLEASLDKEIYYHGEPISVNVHVTNNTNKTVKKIKISVRQYADICLFNTAQYKCPVAMEEADDTVAPSSTFCKVYTLTPFLANNREKRGLALDGKLKHEDTNLASSTLLREGANREILGIIVSYKVKVKLVVSRGGDVAVELPFTLMHPKPKEEPPHREVPENETPVDTNLIELDTNDDDIVFEDFARQRLKGMKDDKEEEEDGTGSPQLNNR

SEQ ID NO: 14515 - protein, 136 aa, Homo sapiens
MSAALLRRGLELLAASEAPRDPPGQAKPRGAPVKRPRKTKAIQAQKLRNSAKGKVPKSALDEYRKRECRDHLRVNLKFLTRTRSTVAESVSQQILRQNRGRKACDRPVAKTKKKKAEGTVFTEEDFQKFQQEYFGS

SEQ ID NO: 14516 - protein, 179 aa, Homo sapiens
MELQGAQEDLGISLSSPRRNHETRPGSKAKGRSSICLQASVWMAGGKLRLRASEHLTQGHQQELRDWNLGEDASLLFSKSPFGAGKLIQAPAHVFRQCWVQGNAWISCITKFDSKRSPEVASSPSYLTVPRRSPLPVFLRPSDRCVCGGCYLGKSTRRRACQSLLSDPLGVTFPTQTRP

SEQ ID NO: 14517 - protein, 1910 aa, Homo sapiens
MWVAKWLTGLLYHLSLFITRSWEVDFHPRQEALVRTLTSYEVVIPERVNEFGEVFPQSHHFSRQKRSSEALEPMPFRTHYRFTAYGQLFQLNLTADASFLAAGYTEVHLGTPERGAWESDAGPSDLRHCFYRGQVNSQEDYKAVVSLCGGLTGTFKGQNGEYFLEPIMKADGNEYEDGHNKPHLIYRQDLNNSFLQTLKYCSVSESQIKETSLPFHTYSNMNEDLNVMKERVLGHTSKNVPLKDERRHSRKKRLISYPRYIEIMVTADAKVVSAHGSNLQNYILTLMSIVATIYKDPSIGNLIHIVVVKLVMIHREEEGPVINFDGATTLKNFCSWQQTQNDLDDVHPSHHDTAVLITREDICSSKEKCNMLGLSYLGTICDPLQSCFINEEKGLISAFTIAHELGHTLGVQHDDNPRCKEMKVTKYHVMAPALSFHMSPWSWSNCSRKYVTEFLDTGYGECLLDKPDEEIYNLPSELPGSRYDGNKQCELAFGPGSQMCPHINICMHLWCTSTEKLHKGCFTQHVPPADGTDCGPGMHCRHGLCVNKETETRPVNGEWGPWEPYSSCSRTCGGGIESATRRCNRPEPRNGGNYCVGRRMKFRSCNTDSCPKGTQDFREKQCSDFNGKHLDISGIPSNVRWLPRYSGIGTKDRCKLYCQVAGTNYFYLLKDMVEDGTPCGTETHDICVQGQCMAAGCDHVLNSSAKIDKCGVCGGDNSSCKTITGVFNSSHYGYNVVVKIPAGATNVDIRQYSYSGQPDDSYLALSDAEGNFLFNGNFLLSTSKKEINVQGTRTVIEYSGSNNAVERINSTNRQEKEILIEVLCVGNLYNPDVHYSFNIPLEERSDMFTWDPYGPWEGCTKMCQGLQRRNITCIHKSDHSVVSDKECDHLPLPSFVTQSCNTDCELRWHVIGKSECSSQCGQGYRTLDIHCMKYSIHEGQTVQVDDHYCGDQLKPPTQELCHGNCVFTRWHYSEWSQCSRSCGGGERSRESYCMNNFGHRLADNECQELSRVTRENCNEFSCPSWAASEWSECLVTCGKGTKQRQVWCQLNVDHLSDGFCNSSTKPESLSPCELHTCASWQVGPWGPCTTTCGHGYQMRDVKCVNELASAVLEDTECHEASRPSDRQSCVLTPCSFISKLETALLPTVLIKKMAQWRHGSWTPCSVSCGRGTQARYVSCRDALDRIADESYCAHLPRPAEIWDCFTPCGEWQAGDWSPCSASCGHGKTTRQVLCMNYHQPIDENYCDPEVRPLMEQECSLAACPPAHSHFPSSPVQPSYYLSTNLPLTQKLEDNENQVVHPSVRGNQWRTGPWGSCSSSCSGGLQHRAVVCQDENGQSASYCDAASKPPELQQCGPGPCPQWNYGNWGECSQTCGGGIKSRLVICQFPNGQILEDHNCEIVNKPPSVIQCHMHACPADVSWHQEPWTSCSASCGKGRKYREVFCIDQFQRKLEDTNCSQVQKPPTHKACRSVRCPSWKANSWNECSVTCGSGVQQRDVYCRLKGVGQVVEEMCDQSTRPCSQRRCWSQDCVQHKGMERGRLNCSTSCERKDSHQRMECTDNQIRQVNEIVYNSSTISLTSKNCRNPPCNYIVVTADSSQCANNCGFSYRQRITYCTEIPSTKKHKLHRLRPIVYQECPVVPSSQVYQCINSCLHLATWKVGKWSKCSVTCGIGIMKRQVKCITKHGLSSDLCLNHLKPGAQKKCYANDCKSFTTCKEIQVKNHIRKDGDYYLNIKGRIIKIYCADMYLENPKEYLTLVQGEENFSEVYGFRLKNPYQCPFNGSRREDCECDNGHLAAGYTVFSKIRIDLTSMQIKTTDLLFSKTIFGNAVPFATAGDCYSAFRCPQGQFSINLSGTGMKISSTAKWLTQGSYTSVSIRRSEDGTRFFGKCGGYCGKCLPHMTTGLPIQVI

SEQ ID NO: 14518 - protein, 1504 aa, Homo sapiens
MWVAKWLTGLLYHLSLFITRSWEVDFHPRQEALVRTLTSYEVVIPERVNEFGEVFPQSHHFSRQKRSSEALEPMPFRTHYRFTAYGQLFQLNLTADASFLAAGYTEVHLGTPERGAWESDAGPSDLRHCFYRGQVNSQEDYKAVVSLCGGLTGTFKGQNGEYFLEPIMKADGNEYEDGHNKPHLIYRQDLNNSFLQTLKYCSVSESQIKETSLPFHTYSNMNEDLNVMKERVLGHTSKNVPLKDERRHSRKKRLISYPRYIEIMVTADAKVVSAHGSNLQNYILTLMSIVATIYKDPSIGNLIHIVVVKLVMIHREEEGPVINFDGATTLKNFCSWQQTQNDLDDVHPSHHDTAVLITREDICSSKEKCNMLGLSYLGTICDPLQSCFINEEKGLISAFTIAHELGHTLGVQHDDNPRCKEMKVTKYHVMAPALSFHMSPWSWSNCSRKYVTEFLDTGYGECLLDKPDEEIYNLPSELPGSRYDGNKQCELAFGPGSQMCPHINICMHLWCTSTEKLHKGCFTQHVPPADGTDCGPGMHCRHGLCVNKETETRPVNGEWGPWEPYSSCSRTCGGGIESATRRCNRPEPRNGGNYCVGRRMKFRSCNTDSCPKGTQDFREKQCSDFNGKHLDISGIPSNVRWLPRYSGIGTKDRCKLYCQVAGTNYFYLLKDMVEDGTPCGTESYNIDCNCVLKAAGCDHVLNSSAKIDKCGVCGGDNSSCKTITGVFNSSHYGYNVVVKIPAGATNVDIRQYSYSGQPDDSYLALSDAEGNFLFNGNFLLSTSKKEINVQGTRTVIEYSGSNNAVERINSTNRQEKEILIEVLCVGNLYNPDVHYSFNIPLEERSDMFTWDPYGPWEGCTKMCQGLQRRNITCIHKSDHSVVSDKECDHLPLPSFVTQSCNTDCELRWHVIGKSECSSQCGQGYRTLDIHCMKYSIHEGQTVQVDDHYCGDQLKPPTQELCHGNCVFTRWHYSEWSQCSRSCGGGERSRESYCMNNFGHRLADNECQELSRVTRENCNEFSCPSWAASEWSECLVTCGKGTKQRQVWCQLNVDHLSDGFCNSSTKPESLSPCELHTCASWQVGPWGPCTTTCGHGYQMRDVKCVNELASAVLEDTECHEASRPSDRQSCVLTPCSFISKLETALLPTVLIKKMAQWRHGSWTPCSVSCGRGTQARYVSCRDALDRIADESYCAHLPRPAEIWDCFTPCGEWQAGDWSPCSASCGHGKTTRQVLCMNYHQPIDENYCDPEVRPLMEQECSLAACPPAHSHFPSSPVQPSYYLSTNLPLTQKLEDNENQVVHPSVRGNQWRTGPWGSCSSSCSGGLQHRAVVCQDENGQSASYCDAASKPPELQQCGPGPCPQWNYGNWGECSQTCGGGIKSRLVICQFPNGQILEDHNCEIVNKPPSVIQCHMHACPADVSWHQEPWTSEDLKVKLLPQRTIILWELMKNIFCHGKHSHMYLINVVTDHLLYPRHCDPETIETYFLSLWSLQFTWGDLKYYKNSL

SEQ ID NO: 14519 - protein, 1910 aa, Homo sapiens
MWVAKWLTGLLYHLSLFITRSWEVDFHPRQEALVRTLTSYEVVIPERVNEFGEVFPQSHHFSRQKRSSEALEPMPFRTHYRFTAYGQLFQLNLTADASFLAAGYTEVHLGTPERGAWESDAGPSDLRHCFYRGQVNSQEDYKAVVSLCGGLTGTFKGQNGEYFLEPIMKADGNEYEDGHNKPHLIYRQDLNNSFLQTLKYCSVSESQIKETSLPFHTYSNMNEDLNVMKERVLGHTSKNVPLKDERRHSRKKRLISYPRYIEIMVTADAKVVSAHGSNLQNYILTLMSIVATIYKDPSIGNLIHIVVVKLVMIHREEEGPVINFDGATTLKNFCSWQQTQNDLDDVHPSHHDTAVLITREDICSSKEKCNMLGLSYLGTICDPLQSCFINEEKGLISAFTIAHELGHTLGVQHDDNPRCKEMKVTKYHVMAPALSFHMSPWSWSNCSRKYVTEFLDTGYGECLLDKPDEEIYNLPSELPGSRYDGNKQCELAFGPGSQMCPHINICMHLWCTSTEKLHKGCFTQHVPPADGTDCGPGMHCRHGLCVNKETETRPVNGEWGPWEPYSSCSRTCGGGIESATRRCNRPEPRNGGNYCVGRRMKFRSCNTDSCPKGTQDFREKQCSDFNGKHLDISGIPSNVRWLPRYSGIGTKDRCKLYCQVAGTNYFYLLKDMVEDGTPCGTETHDICVQGQCMAAGCDHVLNSSAKIDKCGVCGGDNSSCKTITGVFNSSHYGYNVVVKIPAGATNVDIRQYSYSGQPDDSYLALSDAEGNFLFNGNFLLSTSKKEINVQGTRTVIEYSGSNNAVERINSTNRQEKELILQVLCVGNLYNPDVHYSFNIPLEERSDMFTWDPYGPWEGCTKMCQGLQRRNITCIHKSDHSVVSDKECDHLPLPSFVTQSCNTDCELRWHVIGKSECSSQCGQGYRTLDIHCMKYSIHEGQTVQVDDHYCGDQLKPPTQELCHGNCVFTRWHYSEWSQCSRSCGGGERSRESYCMNNFGHRLADNECQELSRVTRENCNEFSCPSWAASEWSECLVTCGKGTKQRQVWCQLNVDHLSDGFCNSSTKPESLSPCELHTCASWQVGPWGPCTTTCGHGYQMRDVKCVNELASAVLEDTECHEASRPSDRQSCVLTPCSFISKLETALLPTVLIKKMAQWRHGSWTPCSVSCGRGTQARYVSCRDALDRIADESYCAHLPRPAEIWDCFTPCGEWQAGDWSPCSASCGHGKTTRQVLCMNYHQPIDENYCDPEVRPLMEQECSLAACPPAHSHFPSSPVQPSYYLSTNLPLTQKLEDNENQVVHPSVRGNQWRTGPWGSCSSSCSGGLQHRAVVCQDENGQSASYCDAASKPPELQQCGPGPCPQWNYGNWGECSQTCGGGIKSRLVICQFPNGQILEDHNCEIVNKPPSVIQCHMHACPADVSWHQEPWTSCSASCGKGRKYREVFCIDQFQRKLEDTNCSQVQKPPTHKACRSVRCPSWKANSWNECSVTCGSGVQQRDVYCRLKGVGQVVEEMCDQSTRPCSQRRCWSQDCVQHKGMERGRLNCSTSCERKDSHQRMECTDNQIRQVNEIVYNSSTISLTSKNCRNPPCNYIVVTADSSQCANNCGFSYRQRITYCTEIPSTKKHKLHRLRPIVYQECPVVPSSQVYQCINSCLHLATWKVGKWSKCSVTCGIGIMKRQVKCITKHGLSSDLCLNHLKPGAQKKCYANDCKSFTTCKEIQVKNHIRKDGDYYLNIKGRIIKIYCADMYLENPKEYLTLVQGEENFSEVYGFRLKNPYQCPFNGSRREDCECDNGHLAAGYTVFSKIRIDLTSMQIKTTDLLFSKTIFGNAVPFATAGDCYSAFRCPQGQFSINLSGTGMKISSTAKWLTQGSYTSVSIRRSEDGTRFFGKCGGYCGKCLPHMTTGLPIQVI

SEQ ID NO: 14520 - protein, 433 aa, Homo sapiens
MGRVQLFEISLSHGRVVYSPGEPLAGTVRVRLGAPLPFRAIRVTCIGSCGVSNKANDTAWVVEEGYFNSSLSLADKGSLPAGEHSFPFQFLLPATAPTSFEGPFGKIVHQVRAAIHTPRFSKDHKCSLVFYILSPLNLNSIPDIEQPNVASATKKFSYKLVKTGSVVLTASTDLRGYVVGQALQLHADVENQSGKDTSPVVASLLQKVSYKAKRWIHDVRTIAEVEGAGVKAWRRAQWHEQILVPALPQSALPGCSLIHIDYYLQVSLKAPEATVTLPVFIGNIAVNHAPVSPRPGLGLPPGAPPLVVPSAPPQEEAEAEAAAGGPHFLDPVFLSTKSHSQRQPLLATLSSVPGAPEPCPQDGSPASHPLHPPLCISTGATVPYFAEGSGGPVPTTSTLILPPEYSSWGYPYEAPPSYEQSCGGVEPSLTPES

SEQ ID NO: 14521 - protein, 388 aa, Homo sapiens
MSKVFKKTSSNGKLSIYLGKRDFVDHVDTVEPIDGVVLVDPEYLKCRKLFVMLTCAFRYGRDDLEVIGLTFRKDLYVQTLQVVPAESSSPQGPLTVLQERLLHKLGDNAYPFTLQMVTNLPCSVTLQPGPEDAGKPCGIDFEVKSFCAENPEETVSKRDYVRLVVRKVQFAPPEAGPGPSAQTIRRFLLSAQPLQLQAWMDREVHYHGEPISVNVSINNCTNKVIKKIKISVDQITDVVLYSLDKYTKTVFIQEFTETVAANSSFSQSFAVTPILAASCQKRGLALDGKLKHEDTNLASSTIIRPGMDKELLGILVSYKVRVNLMVSCGGILGDLTASDVGVELPLVLIHPKPSHEAASSEDIVIEEFTRKGEEESQKAVEAEGDEGS

SEQ ID NO: 14522 - protein, 359 aa, Homo sapiens
MSKVFKKTSSNGKLSIYLGKRDFVDHVDTVEPIDGVVLVDPEYLKCRKLFVMLTCAFRYGRDDLEVIGLTFRKDLYVQTLQVVPAESSSPQGPLTVLQERLLHKLGDNAYPFTLQMVTNLPCSVTLQPGPEDAGKPCGIDFEVKSFCAENPEETVSKRDYVRLVVRKVQFAPPEAGPGPSAQTIRRFLLSAQPLQLQAWMDREVHYHGEPISVNVSINNCTNKVIKKIKISVDQITDVVLYSLDKYTKTVFIQEFTETVAANSSFSQSFAVTPILAASCQKRGLALDGKLKHEDTNLASSTIIRPGMDKELLGILVSYKVRVNLMVSCGGILGDLTASDVGVELPLVLIHPKPSHEAAR

SEQ ID NO: 14523 - protein, 121 aa, Homo sapiens
MTDRNRDKKSTSPSNSDTEMKSEQLPPCVNPGNPVFSCMLDPKTLQTATSLSKPQMIMYKTNSSHYGEFLPIPQFFPCNYTPKEQVFSSHIRATGFYQNNTLNTAPDRTRTLDFPNIQHTL

SEQ ID NO: 14524 - protein, 405 aa, Homo sapiens
MAASGKTSKSEPNHVIFKKISRDKSVTIYLGNRDYIDHVSQVQPVDGVVLVDPDLVKGKKVYVTLTCAFRYGQEDIDVIGLTFRRDLYFSRVQVYPPVGAASTPTKLQESLLKKLGSNTYPFLLTFPDYLPCSVMLQPAPQDSGKSCGVDFEVKAFATDSTDAEEDKIPKKSSVRLLIRKVQHAPLEMGPQPRAEAAWQFFMSDKPLHLAVSLNKEIYFHGEPIPVTVTVTNNTEKTVKKIKAFVEQVANVVLYSSDYYVKPVAMEEAQEKVPPNSTLTKTLTLLPLLANNRERRGIALDGKIKHEDTNLASSTIIKEGIDRTVLGILVSYQIKVKLTVSGFLGELTSSEVATEVPFRLMHPQPEDPAKESYQDANLVFEEFARHNLKDAGEAEEGKRDKNDVDE

SEQ ID NO: 14525 - protein, 343 aa, Homo sapiens
MGGPRGAGWVAAGLLLGAGACYCIYRLTRGRRRGDRELGIRSSKSAGALEEGTSEGQLCGRSARPQTGGTWESQWSKTSQPEDLTDGSYDDVLNAEQLQKLLYLLESTEDPVIIERALITLGNNAAFSVNQAIIRELGGIPIVANKINHSNQSIKEKALNALNNLSVNVENQIKIKIYISQVCEDVFSGPLNSAVQLAGLTLLTNMTVTNDHQHMLHSYITDLFQVLLTGNGNTKVQVLKLLLNLSENPAMTEGLLRAQVDSSFLSLYDSHVAKEILLRVLTLFQNIKNCLKIEGHLAVQPTFTEGSLFFLLHGEECAQKIRALVDHHDAEVKEKVVTIIPKI

SEQ ID NO: 14526 - protein, 308 aa, Homo sapiens
MGGPRGAGWVAAGLLLGAGACYCIYRLTRGRRRGDRELGIRSSKSAEDLTDGSYDDVLNAEQLQKLLYLLESTEDPVIIERALITLGNNAAFSVNQAIIRELGGIPIVANKINHSNQSIKEKALNALNNLSVNVENQIKIKIYISQVCEDVFSGPLNSAVQLAGLTLLTNMTVTNDHQHMLHSYITDLFQVLLTGNGNTKVQVLKLLLNLSENPAMTEGLLRAQVDSSFLSLYDSHVAKEILLRVLTLFQNIKNCLKIEGHLAVQPTFTEGSLFFLLHGEECAQKIRALVDHHDAEVKEKVVTIIPKI

SEQ ID NO: 14527 - protein, 284 aa, Homo sapiens
MGGPRGAGWVAAGLLLGAGACYCIYRLTRGRRRGDRELGIRSSKSAGALEEGTSEGQLCGRSARPQTGGTWESQWSKTSQPEDLTDGSYDDVLNAEQLQKLLYLLESTEDPVIIERALITLGNNAAFSVNQAIIRELGGIPIVANKINHSNQSIKEKALNALNNLSVNVENQIKIKVQVLKLLLNLSENPAMTEGLLRAQVDSSFLSLYDSHVAKEILLRVLTLFQNIKNCLKIEGHLAVQPTFTEGSLFFLLHGEECAQKIRALVDHHDAEVKEKVVTIIPKI

SEQ ID NO: 14528 - protein, 249 aa, Homo sapiens
MGGPRGAGWVAAGLLLGAGACYCIYRLTRGRRRGDRELGIRSSKSAEDLTDGSYDDVLNAEQLQKLLYLLESTEDPVIIERALITLGNNAAFSVNQAIIRELGGIPIVANKINHSNQSIKEKALNALNNLSVNVENQIKIKVQVLKLLLNLSENPAMTEGLLRAQVDSSFLSLYDSHVAKEILLRVLTLFQNIKNCLKIEGHLAVQPTFTEGSLFFLLHGEECAQKIRALVDHHDAEVKEKVVTIIPKI

SEQ ID NO: 14529 - protein, 284 aa, Homo sapiens
MGGPRGAGWVAAGLLLGAGACYCIYRLTRGRRRGDRELGIRSSKSAEDLTDGSYDDVLNAEQLQKLLYLLESTEDPVIIERALITLGNNAAFSVNQAIIRELGGIPIVANKINHSNQSIKEKALNALNNLSVNVENQIKIKIYISQVCEDVFSGPLNSAVQLAGLTLLTNMTVTNDHQHMLHSYITDLFQVLLTGNGNTKVDSSFLSLYDSHVAKEILLRVLTLFQNIKNCLKIEGHLAVQPTFTEGSLFFLLHGEECAQKIRALVDHHDAEVKEKVVTIIPKI

SEQ ID NO: 14530 - protein, 225 aa, Homo sapiens
MGGPRGAGWVAAGLLLGAGACYCIYRLTRGRRRGDRELGIRSSKSAEDLTDGSYDDVLNAEQLQKLLYLLESTEDPVIIERALITLGNNAAFSVNQAIIRELGGIPIVANKINHSNQSIKEKALNALNNLSVNVENQIKIKVDSSFLSLYDSHVAKEILLRVLTLFQNIKNCLKIEGHLAVQPTFTEGSLFFLLHGEECAQKIRALVDHHDAEVKEKVVTIIPKI

SEQ ID NO: 14531 - protein, 867 aa, Homo sapiens
MLSPNDKMLGKLDPFYQPSVSKQKTSAEIISEARNALRTVRTQRPFTPQEAQRKLFGPASSRTSENRPPSSFSLHASSFESSDSRPISGTRLSPLELKPKVPASPTREEDSCFSFPKPPVDPAKIRRVSNARARLFRAASQRALLPDRSLPPSDSKKTVESKETVMMGDSMVKINGIYLTKSNAICHLKSHPLQLTDDGGFSEIKEQEMFKGTTSLPSHLKNGGDQGKRHARASSCPSSSDLSRLQTKAVPKADLQEEDAEIEVDEVFWNTRIVPILRELEKEENIETVCAACTQLHHALEEGNMLGNKFKGRSILLKTLCKLVDVGSDSLSLKLAKIILALKVSRKNLLNVCKLIFKISRNEKNDSLIQNDSILESLLEVLRSEDLQTNMEAFLYCMGSIKFISGNLGFLNEMISKGAVEILINLIKQINENIKKCGTFLPNSGHLLVQVTATLRNLVDSSLVRSKFLNISALPQLCTAMEQYKGDKDVCTNIARIFSKLTSYRDCCTALASYSRCYALFLNLINKYQKKQDLVVRVVFILGNLTAKNNQAREQFSKEKGSIQTLLSLFQTFHQLDLHSQKPVGQRGEQHRAQRPPSEAEDVLIKLTRVLANIAIHPGVGPVLAANPGIVGLLLTTLEYKSLDDCEELVINATATINNLSYYQVKNSIIQDKKLYIAELLLKLLVSNNMDGILEAVRVFGNLSQDHDVCDFIVQNNVHRFMMALLDAQHQDICFSACGVLLNLTVDKDKRVILKEGGGIKKLVDCLRDLGPTDWQLACLVCKTLWNFSENITNASSCFGNEDTNTLLLLLSSFLDEELALDGSFDPDLKNYHKLHWETEFKPVAQQLLNRIQRHHTFLEPLPIPSF

SEQ ID NO: 14532 - protein, 702 aa, Homo sapiens
MMGDSMVKINGIYLTKSNAICHLKSHPLQLTDDGGFSEIKEQEMFKGTTSLPSHLKNGGDQGKRHARASSCPSSSDLSRLQTKAVPKADLQEEDAEIEVDEVFWNTRIVPILRELEKEENIETVCAACTQLHHALEEGNMLGNKFKGRSILLKTLCKLVDVGSDSLSLKLAKIILALKVSRKNLLNVCKLIFKISRNEKNDSLIQNDSILESLLEVLRSEDLQTNMEAFLYCMGSIKFISGNLGFLNEMISKGAVEILINLIKQINENIKKCGTFLPNSGHLLVQVTATLRNLVDSSLVRSKFLNISALPQLCTAMEQYKGDKDVCTNIARIFSKLTSYRDCCTALASYSRCYALFLNLINKYQKKQDLVVRVVFILGNLTAKNNQAREQFSKEKGSIQTLLSLFQTFHQLDLHSQKPVGQRGEQHRAQRPPSEAEDVLIKLTRVLANIAIHPGVGPVLAANPGIVGLLLTTLEYKSLDDCEELVINATATINNLSYYQVKNSIIQDKKLYIAELLLKLLVSNNMDGILEAVRVFGNLSQDHDVCDFIVQNNVHRFMMALLDAQHQDICFSACGVLLNLTVDKDKRVILKEGGGIKKLVDCLRDLGPTDWQLACLVCKTLWNFSENITNASSCFGNEDTNTLLLLLSSFLDEELALDGSFDPDLKNYHKLHWETEFKPVAQQLLNRIQRHHTFLEPLPIPSF

SEQ ID NO: 14533 - protein, 340 aa, Homo sapiens
MGKSIPQYLGQLDIRKSVVSLATGAGAIYLLYKAIKAGIKCKPPLCSNSPICIARLAVERERHGRDSGELRRLLNSLECKQDEYAKSMILHSITRCVYLLEAEASACTTDDIVLLGYMLDDKDNSVKTQALNTLKAFSGIRKFRLKIQEHSIKVLELISTIWDTELHIAGLRLLNNLPLPDYVHPQLRRVMPALMEILQSDYILAQVQAVRLLSYLAQKNDLLYDILNCQVHSNFLNLFQPTQSGSLLYEVLVFAERLSEGRNAPHYHVVKWHYNEQSLHESLFGEESRLADRLLALVIHPEEDVQIQACKVIVSLQYPQDLRARPSSCQPSRSYFKNTE

SEQ ID NO: 14534 - protein, 367 aa, Homo sapiens
MGKSIPQYLGQLDIRKSVVSLATGAGAIYLLYKAIKAGIKCKPPLCSNSPICIARECPGPGERALPQEAPAPEASAVGGPKGLAVERERHGRDSGELRRLLNSLECKQDEYAKSMILHSITRCVYLLEAEASACTTDDIVLLGYMLDDKDNSVKTQALNTLKAFSGIRKFRLKIQEHSIKVLELISTIWDTELHIAGLRLLNNLPLPDYVHPQLRRVMPALMEILQSDYILAQVQAVRLLSYLAQKNDLLYDILNCQVHSNFLNLFQPTQSGSLLYEVLVFAERLSEGRNAPHYHVVKWHYNEQSLHESLFGEESRLADRLLALVIHPEEDVQIQACKVIVSLQYPQDLRARPSSCQPSRSYFKNTE

SEQ ID NO: 14535 - protein, 330 aa, Homo sapiens
MGKSIPQYLGQLDIRKSVVSLATGAGAIYLLYKAIKAGIKCKPPLCSNSPICIARLAVERERHGRDSGELRRLLNSLECKQDEYAKSMILHSITRCVYLLEAEASACTTDDIVLLGYMLDDKDNSVKTQALNTLKAFSGIRKFRLKIQEHSIKVLELISTIWDTELHIAGLRLLNNLPLPDYVHPQLRRVMPALMEILQSDYILAQVQAVRLLSYLAQKNDLLYDILNCQPTQSGSLLYEVLVFAERLSEGRNAPHYHVVKWHYNEQSLHESLFGEESRLADRLLALVIHPEEDVQIQACKVIVSLQYPQDLRARPSSCQPSRSYFKNTE

SEQ ID NO: 14536 - protein, 872 aa, Homo sapiens
MGKKIKKEVEPPPKDVFDPLMIESKKAATVVLMLNSPEEEILAKACEAIYKFALKGEENKTTLLELGAVEPLTKLLTHEDKIVRRNATMIFGILASNNDVKKLLRELDVMNSVIAQLAPEEEVVIHEFASLCLANMSAEYTSKVQIFEHGGLEPLIRLLSSPDPDVKKNSMECIYNLVQDFQCRAKLQELNAIPPILDLLKSEYPVIQLLALKTLGVIANDKESRTMLRDNQGLDHLIKILETKELNDLHIEALAVIANCLEDMDTMVQIQQTGGLKKLLSFAENSTIPDIQKNAAKAITKAAYDPENRKLFHEQEVEKCLVALLGSENDGTKIAASQAISAMCENSGSKDFFNNQGIPQLIQLLKSDNEEVREAAALALANLTTCNPANANAAAEADGIDPLINLLSSKRDGAIANAATVLTNMAMQEPLRLNIQNHDIMHAIISPLRSANTVVQSKAALAVTATACDVEARTELRNSGGLEPLVELLRSKNDEVRKHASWAVMVCAGDELTANELCRLGALDILEEVNVSGTRKNKFSEAAYNKLLNNNLSLKYSQTGYLSSSNIINDGFYDYGRINPGTKLLPLKELCLQEPSDLRAVLLINSKSYVSPPSSMEDKSDVGYGRSISSSSSLRRSSKEKNKKNSYHFSAGFGSPIEDKSEPASGRNTVLSKSATKEKGWRKSKGKKEEEKVKEEEEVMVVPKFVGEGSSDKEWCPPSDPDFSMYVYEVTKSILPITNIKEQIEDLAKYVAEKMGGKIPKEKLPDFSWELHISELKFQLKSNVIPIGHVKKGIFYHRALLFKALADRIGIGCSLVRGEYGRAWNEVMLQNDSRKGVIGGLPAPEMYVIDLMFHPGGLMKLRSREADLYRFI

SEQ ID NO: 14537 - protein, 688 aa, Homo sapiens
MGKKIKKEVEPPPKDVFDPLMIESKKAATVVLMLNSPEEEILAKACEAIYKFALKGEENKTTLLELGAVEPLTKLLTHEDKIVRRNATMIFGILASNNDVKKLLRELDVMNSVIAQLAPEEEVVIHEFASLCLANMSAEYTSKVQIFEHGGLEPLIRLLSSPDPDVKKNSMECIYNLVQDFQCRAKLQELNAIPPILDLLKSEYPVIQLLALKTLGVIANDKESRTMLRDNQGLDHLIKILETKELNDLHIEALAVIANCLEDMDTMVQIQQTGGLKKLLSFAENSTIPDIQKNAAKAITKAAYDPENRKLFHEQEVEKCLVALLGSENDGTKIAASQAISAMCENSGSKDFFNNQGIPQLIQLLKSDNEEVREAAALALANLTTCNPANANAAAEADGIDPLINLLSSKRDGAIANAATVLTNMAMQEPLRLNIQNHDIMHAIISPLRSANTVVQSKAALAVTATACDVEARTELRNSGGLEPLVELLRSKNDEVRKHASWAVMVCAGDELTANELCRLGALDILEEVNVSGTRKNKFSEAAYNKLLNNNLSLKYSQTGYLSSSNIINDGFYDYGRINPGTKLLPLKELCLQEPSDLRAVLLINSKSYVSPPSSMEDKSDVGYGRSISSSSSLRRSSKEKNKKNSYHFSAGFGSPIEDKSEPASGRNTVLSKSATKEKGWSSLPTSR

SEQ ID NO: 14538 - protein, 865 aa, Homo sapiens
MGKKIKKEVEPPPKDVFDPLMIESKKAATVVLMLNSPEEEILAKACEAIYKFALKGEENKTTLLELGAVEPLTKLLTHEDKIVRRNATMIFGILASNNDVKKLLRELDVMNSVIAQLAPEEEVVIHEFASLCLANMSAEYTSKVQIFEHGGLEPLIRLLSSPDPDVKKNSMECIYNLVQDFQCRAKLQELNAIPPILDLLKSEYPVIQLLALKTLGVIANDKESRTMLRDNQGLDHLIKILETKELNDLHIEALAVIANCLEDMDTMVQIQQTGGLKKLLSFAENSTIPDIQKNAAKAITKAAYDPENRKLFHEQEVEKCLVALLGSENDGTKIAASQAISAMCENSGSKDFFNNQGIPQLIQLLKSDNEEVREAAALALANLTTCNPANANAAAEADGIDPLINLLSSKRDGAIANAATVLTNMAMQEPLRLNIQNHDIMHAIISPLRSANTVVQSKAALAVTATACDVEARTELRNSGGLEPLVELLRSKNDEVRKHASWAVMVCAGDELTANELCRLGALDILEEVNVSGTRKNKFSEAAYNKLLNNNLSLKYSQTGYLSSSNIINDGFYDYGRINPGTKLLPLKELCLQEPSDLRAVLLINSKSYVSPPSSMEDKSDVGYGRSISSSSSLRRSSKEKNNAGFGSPIEDKSEPASGRNTVLSKSATKEKGWRKSKGKKEEEKVKEEEEVMVVPKFVGEGSSDKEWCPPSDPDFSMYVYEVTKSILPITNIKEQIEDLAKYVAEKMGGKIPKEKLPDFSWELHISELKFQLKSNVIPIGHVKKGIFYHRALLFKALADRIGIGCSLVRGEYGRAWNEVMLQNDSRKGVIGGLPAPEMYVIDLMFHPGGLMKLRSREADLYRFI

SEQ ID NO: 14539 - protein, 397 aa, Homo sapiens
MGKKIKKEVEPPPKDVFDPLMIESKKAATVVLMLNSPEEEILAKACEAIYKFALKGEENKTTLLELGAVEPLTKLLTHEDKIVRRNATMIFGILASNNDVKKLLRELDVMNSVIAQLAPEEEVVIHEFASLCLANMSAEYTSKVQIFEHGGLEPLIRLLSSPDPDVKKNSMECIYNLVQDFQCRAKLQELNAIPPILDLLKSEYPVIQLLALKTLGVIANDKESRTMLRDNQGLDHLIKILETKELNDLHIEALAVIANCLEDMDTMVQIQQTGGLKKLLSFAENSTIPDIQKNAAKAITKAAYDPENRKLFHEQEVEKCLVALLGSENDGTKIAASQAISAMCENSGSKDFFNNQGIPQLIQLLKSDNEEVREAAALALANLTTCNPANAKEMEHE

SEQ ID NO: 14540 - protein, 638 aa, Homo sapiens
MPVLSARRRELADHAGSGRRSGPSPTARSGPHLSALRAQPARAAHLSGRGTYVRRDTAGGGPGQARPLGPPGTSLLGRGARRSGEGWCPGAFESGARAARPPSRVEPRLATAASREGAGLPRAEVAAGSGRGARSGEWGLAAAGAWETMHHCKRYRSPEPDPYLSYRWKRRRSYSREHEGRLRYPSRREPPPRRSRSRSHDRLPYQRRYRERRDSDTYRCEERSPSFGEDYYGPSRSRHRRRSRERGPYRTRKHAHHCHKRRTRSCSSASSRSQQSSKRSSRSVEDDKEGHLVCRIGDWLQERYEIVGNLGEGTFGKVVECLDHARGKSQVALKIIRNVGKYREAARLEINVLKKIKEKDKENKFLCVLMSDWFNFHGHMCIAFELLGKNTFEFLKENNFQPYPLPHVRHMAYQLCHALRFLHENQLTHTDLKPENILFVNSEFETLYNEHKSCEEKSVKNTSIRVADFGSATFDHEHHTTIVATRHYRPPEVILELGWAQPCDVWSIGCILFEYYRGFTLFQTHENREHLVMMEKILGPIPSHMIHRTRKQKYFYKGGLVWDENSSDGRYVKENCKPLKSYMLQDSLEHVQLFDLMRRMLEFDPAQRITLAEALLHPFFAGLTPEERSFHTSRNPSR

SEQ ID NO: 14541 - protein, 490 aa, Homo sapiens
MHHCKRYRSPEPDPYLSYRWKRRRSYSREHEGRLRYPSRREPPPRRSRSRSHDRLPYQRRYRERRDSDTYRCEERSPSFGEDYYGPSRSRHRRRSRERGPYRTRKHAHHCHKRRTRSCSSASSRSQQSSKRSSRSVEDDKEGHLVCRIGDWLQERYEIVGNLGEGTFGKVVECLDHARGKSQVALKIIRNVGKYREAARLEINVLKKIKEKDKENKFLCVLMSDWFNFHGHMCIAFELLGKNTFEFLKENNFQPYPLPHVRHMAYQLCHALRFLHENQLTHTDLKPENILFVNSEFETLYNEHKSCEEKSVKNTSIRVADFGSATFDHEHHTTIVATRHYRPPEVILELGWAQPCDVWSIGCILFEYYRGFTLFQTHENREHLVMMEKILGPIPSHMIHRTRKQKYFYKGGLVWDENSSDGRYVKENCKPLKSYMLQDSLEHVQLFDLMRRMLEFDPAQRITLAEALLHPFFAGLTPEERSFHTSRNPSR

SEQ ID NO: 14542 - protein, 152 aa, Homo sapiens
MHHCKRYRSPEPDPYLSYRWKRRRSYSREHEGRLRYPSRREPPPRRSRSRSHDRLPYQRRYRERRDSDTYRCEERSPSFGEDYYGPSRSRHRRRSRERGPYRTRKHAHHCHKRRTRSCSSASSMRLWGTWVKAPLARWWSAWTMPEGSLRLP

SEQ ID NO: 14543 - protein, 467 aa, Homo sapiens
MHHCKRYRSPEPDPYLSYRWKRRRSYSREHEGRLRYPSRREPPPRRSRSRSHDRLPYQRRYRERRDSDTYRCEERSPSFGEDYYGPSRSRHRRRSRERGPYRTRKHAHHCHKRRTRSCSSASSRSQQSSKRSSRSVEDDKEGHLVCRIGDWLQERYESQVALKIIRNVGKYREAARLEINVLKKIKEKDKENKFLCVLMSDWFNFHGHMCIAFELLGKNTFEFLKENNFQPYPLPHVRHMAYQLCHALRFLHENQLTHTDLKPENILFVNSEFETLYNEHKSCEEKSVKNTSIRVADFGSATFDHEHHTTIVATRHYRPPEVILELGWAQPCDVWSIGCILFEYYRGFTLFQTHENREHLVMMEKILGPIPSHMIHRTRKQKYFYKGGLVWDENSSDGRYVKENCKPLKSYMLQDSLEHVQLFDLMRRMLEFDPAQRITLAEALLHPFFAGLTPEERSFHTSRNPSR

SEQ ID NO: 14544 - protein, 2290 aa, Homo sapiens
MGRIQEVGWVTAGLVIWAGTCYYIYKFTKGRAQSVRTLARNGSTVKMETVVGVQSQTLAINEAEIKTKPQVEIGAETGARSGPRAEVETKATAIAIHRANSQAKAMVGAEPETQSESKVVAGTLVMTEAVTLTEVKAKAREVAMKEAVTQTDAEAGKIVKKEAVTQTKAKAWALVAKTEAKREAMTQTKAETHILAEKETEINRVMVTQSETLAVPREVAKMGATNKTGIVDETKTRALEETVSVAKTQSEARPGATVDARGNPNGMSREVAGVDMKSCAQSQAVTKIQGDDMPGTGVEDMGNCKTMSRAESGADTRASAQPQIFAKTQTEAIPGAKIDAGGNTNAMCKVGAGADVRACIQPQTVAKKQAEVTSGARVDGRGNTNVISKAITGADMRAAAQPQAVASTHAEAMSDAKVKNRGNPNAMTKAGAKANLRANSQVEALPDARDKSRGNPNVMAKVGDGTDMLSCTQPQLVASVQADTLSDGKIKVRGNVNTMPKEGAGVDMKAQGMAQSQGEALPNTRGKARGKAKAKCKTGPGMDMKTCTQPQAGVKTPAEALLDSRVDGRGNPNATSKAGTKADQRVCGQPLVVANPQGEALPGAKNKVKGNPHTVLKVGAGEGTTDSAQPEAVVSFQGEALLGTKNKVKGNPNVVLKAEVGEGAMGTAQLQIMASSKGEALLDSKNKVKGNSNAVSKAGAGTDTTGSVQPQIVANSQGEVLPGAKNKIRGNPTTVPNSGVGPYTTDSARLQAVANSQGEVLPGAKNKVKANLNAVSKAEAGMGATGSVQPQAVANSHCETLPGAKNKVRGNWNAVSKAGAGMDTRGSAQPQAVANSQGEVLPGAKNKVKGNPNVVSKAGAREDTVGSTQPQVLASSQRETLPGARNKVKGNSNVVSKAGAREDTMGSAQPQVVANSQRETLPGARNKVKGNSNAISKAEAGAGIMGSVQVQVVASFQGEVLPGAKNKVRGNSNAVPKAEAGADTVGSAQPQAVANSQSETLLGARNKVKGNTIAVPKAGTGAGTRHSAQPQIVAGSQGETLPGARDKSMSTSEAEATAEDEAYAKPEAEAMPTSESEGGSGTQACRKTQPNIHDYYWNGIGVEDWIAAERWIKFRFQTMDGDWENSVSWADDENEASIGSWSGASDKAGIIRSWAVACDETSVKSWAGARAENVVGIGTWARAGEQASGGLWAGGQTSEGTWAGDKASGGAWTGAENQASGGSWALAGNQAIGELWAAGQASDGSWPGGQASGVSWVGEEAIGGSWTGAENQASEGSWAGAGAGNMSSVSYWAGVVDQAGGGSWAGTSDQSGGGSKPRFEDQASGEGSWAGAGGQASGGSMLGPEDQSSGRSWADTADQASGGSRLGHVDQSSGGAWAGTLDQSGGGSKPRFENQTTEEGSWAGAGGQAGGGSKVGPEDQSSGRSWANSGDQISGGFLVGIVDQANGGSWTGAGHPASVGPKPIFEDQVSGRGSWADAREQVVGDSRLGLRDQSSGDSWAGTGDQASGWFCVCPGSQTNGGSWGGASGQDVGGSRPGPTNQSSAGSWDSPGSQVSGSCWTGAGAVDQAGGCSKPGFEDQAIGGGFWPGAGDQTGGGSRPGSEDQSSGIGSWGVAGGQVLGGARPGPADQSSGGSWAGTGNQSSGRSWIGPGDQAVDCSKPEFEDQACGGGSWAGAGSQASGESWAGSRPGNEAIGGSRMGSEDQATGGSWARSEDQASGRFQVSFEVEANEGFWFGPGAEAVIGSWCWTEEKADIVSRPDDKDEATTASRSGAGEEAMICSRIEAENKASSGSWIRSEEVAYMGSCVGAEAGAGAEAGAGAEAGAGAGAEAGAEAGAGAGAGPGTESGAGIWSWDGDATTVESRLGAGEEAGVESWTLARNVGEDELSRESSPDIEEISLRSLFWAESENSNTFRSKSGKDASFESGAGDNTSIKDKFEAAGGVDIGSWFCAGNENTSEDKSAPKAKAKKSSESRGIYPYMVPGAGMGSWDGAMIWSETKFAHQSEASFPVEDESRKQTRTGEKTRPWSCRCKHEANMDPRDLEKLICMIEMTEDPSVHEIANNALYNSADYSYSHEVVRNVGGISVIESLLNNPYPSVRQKALNALNNISVAAENHRKVKTYLNQVCEDTVTYPLNSNVQLAGLRLIRHLTITSEYQHMVTNYISEFLRLLTVGSGETKDHVLGMLLNFSKNPSMTKDLLIANAPTSLINIFSKKETKENILNALSLFENINYHFKRRAKAFTQDKFSKNSLYFLFQRPKACAKKLRALAAECNDPEVKERVELLISKL

SEQ ID NO: 14545 - protein, 348 aa, Homo sapiens
MSAAGLKITGSKETKRRLLLISIDWVYCQEKQEERRELPRIITGPPPEAAVVAFEWLKTSTLTGLHPQLPLSLPQPECALPYLVRAFSRGDYMGRIQEVGWVTAGLVIWAGTCYYIYKFTKGRAQSVRTLARNGSTVKMETVVGVQSQTLAINEAEIKTKPQVEIGAETGARSGPRAEVETKATAIAIHRANSQAKAMVGAEPETQSESKVVAGTLVMTEAVTLTEVKAKAREVAMKEAVTQTDAEAGKIVKKEAVTQTKAKAWALVAKTEAKREAMTQTKAETHILAEKETEINRVMVTQSETLAVPREVAKMGATNKTGIVDETKTRALEETVLIPRAFPSKNASC

SEQ ID NO: 14546 - protein, 360 aa, Homo sapiens
MSAAGLKITGSKETKRRLLLISIDWSRDLMNLCIYFRVYCQEKQEERRELPRIITGPPPEAAVVAFEWLKTSTLTGLHPQLPLSLPQPECALPYLVRAFSRGDYMGRIQEVGWVTAGLVIWAGTCYYIYKFTKGRAQSVRTLARNGSTVKMETVVGVQSQTLAINEAEIKTKPQVEIGAETGARSGPRAEVETKATAIAIHRANSQAKAMVGAEPETQSESKVVAGTLVMTEAVTLTEVKAKAREVAMKEAVTQTDAEAGKIVKKEAVTQTKAKAWALVAKTEAKREAMTQTKAETHILAEKETEINRVMVTQSETLAVPREVAKMGATNKTGIVDETKTRALEETVLIPRAFPSKNASC

SEQ ID NO: 14547 - protein, 1464 aa, Homo sapiens
MFSFVDLRLLLLLAATALLTHGQEEGQVEGQDEDIPPITCVQNGLRYHDRDVWKPEPCRICVCDNGKVLCDDVICDETKNCPGAEVPEGECCPVCPDGSESPTDQETTGVEGPKGDTGPRGPRGPAGPPGRDGIPGQPGLPGPPGPPGPPGPPGLGGNFAPQLSYGYDEKSTGGISVPGPMGPSGPRGLPGPPGAPGPQGFQGPPGEPGEPGASGPMGPRGPPGPPGKNGDDGEAGKPGRPGERGPPGPQGARGLPGTAGLPGMKGHRGFSGLDGAKGDAGPAGPKGEPGSPGENGAPGQMGPRGLPGERGRPGAPGPAGARGNDGATGAAGPPGPTGPAGPPGFPGAVGAKGEAGPQGPRGSEGPQGVRGEPGPPGPAGAAGPAGNPGADGQPGAKGANGAPGIAGAPGFPGARGPSGPQGPGGPPGPKGNSGEPGAPGSKGDTGAKGEPGPVGVQGPPGPAGEEGKRGARGEPGPTGLPGPPGERGGPGSRGFPGADGVAGPKGPAGERGSPGPAGPKGSPGEAGRPGEAGLPGAKGLTGSPGSPGPDGKTGPPGPAGQDGRPGPPGPPGARGQAGVMGFPGPKGAAGEPGKAGERGVPGPPGAVGPAGKDGEAGAQGPPGPAGPAGERGEQGPAGSPGFQGLPGPAGPPGEAGKPGEQGVPGDLGAPGPSGARGERGFPGERGVQGPPGPAGPRGANGAPGNDGAKGDAGAPGAPGSQGAPGLQGMPGERGAAGLPGPKGDRGDAGPKGADGSPGKDGVRGLTGPIGPPGPAGAPGDKGESGPSGPAGPTGARGAPGDRGEPGPPGPAGFAGPPGADGQPGAKGEPGDAGAKGDAGPPGPAGPAGPPGPIGNVGAPGAKGARGSAGPPGATGFPGAAGRVGPPGPSGNAGPPGPPGPAGKEGGKGPRGETGPAGRPGEVGPPGPPGPAGEKGSPGADGPAGAPGTPGPQGIAGQRGVVGLPGQRGERGFPGLPGPSGEPGKQGPSGASGERGPPGPMGPPGLAGPPGESGREGAPGAEGSPGRDGSPGAKGDRGETGPAGPPGAPGAPGAPGPVGPAGKSGDRGETGPAGPTGPVGPVGARGPAGPQGPRGDKGETGEQGDRGIKGHRGFSGLQGPPGPPGSPGEQGPSGASGPAGPRGPPGSAGAPGKDGLNGLPGPIGPPGPRGRTGDAGPVGPPGPPGPPGPPGPPSAGFDFSFLPQPPQEKAHDGGRYYRADDANVVRDRDLEVDTTLKSLSQQIENIRSPEGSRKNPARTCRDLKMCHSDWKSGEYWIDPNQGCNLDAIKVFCNMETGETCVYPTQPSVAQKNWYISKNPKDKRHVWFGESMTDGFQFEYGGQGSDPADVAIQLTFLRLMSTEASQNITYHCKNSVAYMDQQTGNLKKALLLQGSNEIEIRAEGNSRFTYSVTVDGCTSHTGAWGKTVIEYKTTKTSRLPIIDVAPLDVGAPDQEFGFDVGPVCFL

SEQ ID NO: 14548 - protein, 1500 aa, Homo sapiens
MDPSMGVNSVTISVEGMTCNSCVWTIEQQIGKVNGVHHIKVSLEEKNATIIYDPKLQTPKTLQEAIDDMGFDAVIHNPDPLPVLTDTLFLTVTASLTLPWDHIQSTLLKTKGVTDIKIYPQKRTVAVTIIPSIVNANQIKELVPELSLDTGTLEKKSGACEDHSMAQAGEVVLKMKVEGMTCHSCTSTIEGKIGKLQGVQRIKVSLDNQEATIVYQPHLISVEEMKKQIEAMGFPAFVKKQPKYLKLGAIDVERLKNTPVKSSEGSQQRSPSYTNDSTATFIIDGMHCKSCVSNIESTLSALQYVSSIVVSLENRSAIVKYNASSVTPESLRKAIEAVSPGLYRVSITSEVESTSNSPSSSSLQKIPLNVVSQPLTQETVINIDGMTCNSCVQSIEGVISKKPGVKSIRVSLANSNGTVEYDPLLTSPETLRGAIEDMGFDATLSDTNEPLVVIAQPSSEMPLLTSTNEFYTKGMTPVQDKEEGKNSSKCYIQVTGMTCASCVANIERNLRREEGIYSILVALMAGKAEVRYNPAVIQPPMIAEFIRELGFGATVIENADEGDGVLELVVRGMTCASCVHKIESSLTKHRGILYCSVALATNKAHIKYDPEIIGPRDIIHTIESLGFEASLVKKDRSASHLDHKREIRQWRRSFLVSLFFCIPVMGLMIYMMVMDHHFATLHHNQNMSKEEMINLHSSMFLERQILPGLSVMNLLSFLLCVPVQFFGGWYFYIQAYKALKHKTANMDVLIVLATTIAFAYSLIILLVAMYERAKVNPITFFDTPPMLFVFIALGRWLEHIAKGKTSEALAKLISLQATEATIVTLDSDNILLSEEQVDVELVQRGDIIKVVPGGKFPVDGRVIEGHSMVDESLITGEAMPVAKKPGSTVIAGSINQNGSLLICATHVGADTTLSQIVKLVEEAQTSKAPIQQFADKLSGYFVPFIVFVSIATLLVWIVIGFLNFEIVETYFPGYNRSISRTETIIRFAFQASITVLCIACPCSLGLATPTAVMVGTGVGAQNGILIKGGEPLEMAHKVKVVVFDKTGTITHGTPVVNQVKVLTESNRISHHKILAIVGTAESNSEHPLGTAITKYCKQELDTETLGTCIDFQVVPGCGISCKVTNIEGLLHKNNWNIEDNNIKNASLVQIDASNEQSSTSSSMIIDAQISNALNAQQYKVLIGNREWMIRNGLVINNDVNDFMTEHERKGRTAVLVAVDDELCGLIAIADTVKPEAELAIHILKSMGLEVVLMTGDNSKTARSIASQVGITKVFAEVLPSHKVAKVKQLQEEGKRVAMVGDGINDSPALAMANVGIAIGTGTDVAIEAADVVLIRNDLLDVVASIDLSRKTVKRIRINFVFALIYNLVGIPIAAGVFMPIGLVLQPWMGSAAMAASSVSVVLSSLFLKLYRKPTYESYELPARSQIGQKSPSEISVHVGIDDTSRNSPKLGLLDRIVNYSRASINSLLSDKRSLNSVVTSEPDKHSLLVGDFREDDDTAL

SEQ ID NO: 14549 - protein, 1514 aa, Homo sapiens
MRKLSIRKRDNNLLKDPSMGVNSVTISVEGMTCNSCVWTIEQQIGKVNGVHHIKVSLEEKNATIIYDPKLQTPKTLQEAIDDMGFDAVIHNPDPLPVLTDTLFLTVTASLTLPWDHIQSTLLKTKGVTDIKIYPQKRTVAVTIIPSIVNANQIKELVPELSLDTGTLEKKSGACEDHSMAQAGEVVLKMKVEGMTCHSCTSTIEGKIGKLQGVQRIKVSLDNQEATIVYQPHLISVEEMKKQIEAMGFPAFVKKQPKYLKLGAIDVERLKNTPVKSSEGSQQRSPSYTNDSTATFIIDGMHCKSCVSNIESTLSALQYVSSIVVSLENRSAIVKYNASSVTPESLRKAIEAVSPGLYRVSITSEVESTSNSPSSSSLQKIPLNVVSQPLTQETVINIDGMTCNSCVQSIEGVISKKPGVKSIRVSLANSNGTVEYDPLLTSPETLRGAIEDMGFDATLSDTNEPLVVIAQPSSEMPLLTSTNEFYTKGMTPVQDKEEGKNSSKCYIQVTGMTCASCVANIERNLRREEGIYSILVALMAGKAEVRYNPAVIQPPMIAEFIRELGFGATVIENADEGDGVLELVVRGMTCASCVHKIESSLTKHRGILYCSVALATNKAHIKYDPEIIGPRDIIHTIESLGFEASLVKKDRSASHLDHKREIRQWRRSFLVSLFFCIPVMGLMIYMMVMDHHFATLHHNQNMSKEEMINLHSSMFLERQILPGLSVMNLLSFLLCVPVQFFGGWYFYIQAYKALKHKTANMDVLIVLATTIAFAYSLIILLVAMYERAKVNPITFFDTPPMLFVFIALGRWLEHIAKGKTSEALAKLISLQATEATIVTLDSDNILLSEEQVDVELVQRGDIIKVVPGGKFPVDGRVIEGHSMVDESLITGEAMPVAKKPGSTVIAGSINQNGSLLICATHVGADTTLSQIVKLVEEAQTSKAPIQQFADKLSGYFVPFIVFVSIATLLVWIVIGFLNFEIVETYFPGYNRSISRTETIIRFAFQASITVLCIACPCSLGLATPTAVMVGTGVGAQNGILIKGGEPLEMAHKVKVVVFDKTGTITHGTPVVNQVKVLTESNRISHHKILAIVGTAESNSEHPLGTAITKYCKQELDTETLGTCIDFQVVPGCGISCKVTNIEGLLHKNNWNIEDNNIKNASLVQIDASNEQSSTSSSMIIDAQISNALNAQQYKVLIGNREWMIRNGLVINNDVNDFMTEHERKGRTAVLVAVDDELCGLIAIADTVKPEAELAIHILKSMGLEVVLMTGDNSKTARSIASQVGITKVFAEVLPSHKVAKVKQLQEEGKRVAMVGDGINDSPALAMANVGIAIGTGTDVAIEAADVVLIRNDLLDVVASIDLSRKTVKRIRINFVFALIYNLVGIPIAAGVFMPIGLVLQPWMGSAAMAASSVSVVLSSLFLKLYRKPTYESYELPARSQIGQKSPSEISVHVGIDDTSRNSPKLGLLDRIVNYSRASINSLLSDKRSLNSVVTSEPDKHSLLVGDFREDDDTAL

SEQ ID NO: 14550 - protein, 1581 aa, Homo sapiens
MRKLSIRKRDNNLLKPSSASSLGIAVSLGRPVLSRSSSGTVNLLEEVGLHIRDTAFSSTKLLEAISTVSAQVEELAVHNECYDPSMGVNSVTISVEGMTCNSCVWTIEQQIGKVNGVHHIKVSLEEKNATIIYDPKLQTPKTLQEAIDDMGFDAVIHNPDPLPVLTDTLFLTVTASLTLPWDHIQSTLLKTKGVTDIKIYPQKRTVAVTIIPSIVNANQIKELVPELSLDTGTLEKKSGACEDHSMAQAGEVVLKMKVEGMTCHSCTSTIEGKIGKLQGVQRIKVSLDNQEATIVYQPHLISVEEMKKQIEAMGFPAFVKKQPKYLKLGAIDVERLKNTPVKSSEGSQQRSPSYTNDSTATFIIDGMHCKSCVSNIESTLSALQYVSSIVVSLENRSAIVKYNASSVTPESLRKAIEAVSPGLYRVSITSEVESTSNSPSSSSLQKIPLNVVSQPLTQETVINIDGMTCNSCVQSIEGVISKKPGVKSIRVSLANSNGTVEYDPLLTSPETLRGAIEDMGFDATLSDTNEPLVVIAQPSSEMPLLTSTNEFYTKGMTPVQDKEEGKNSSKCYIQVTGMTCASCVANIERNLRREEGIYSILVALMAGKAEVRYNPAVIQPPMIAEFIRELGFGATVIENADEGDGVLELVVRGMTCASCVHKIESSLTKHRGILYCSVALATNKAHIKYDPEIIGPRDIIHTIESLGFEASLVKKDRSASHLDHKREIRQWRRSFLVSLFFCIPVMGLMIYMMVMDHHFATLHHNQNMSKEEMINLHSSMFLERQILPGLSVMNLLSFLLCVPVQFFGGWYFYIQAYKALKHKTANMDVLIVLATTIAFAYSLIILLVAMYERAKVNPITFFDTPPMLFVFIALGRWLEHIAKGKTSEALAKLISLQATEATIVTLDSDNILLSEEQVDVELVQRGDIIKVVPGGKFPVDGRVIEGHSMVDESLITGEAMPVAKKPGSTVIAGSINQNGSLLICATHVGADTTLSQIVKLVEEAQTSKAPIQQFADKLSGYFVPFIVFVSIATLLVWIVIGFLNFEIVETYFPGYNRSISRTETIIRFAFQASITVLCIACPCSLGLATPTAVMVGTGVGAQNGILIKGGEPLEMAHKVKVVVFDKTGTITHGTPVVNQVKVLTESNRISHHKILAIVGTAESNSEHPLGTAITKYCKQELDTETLGTCIDFQVVPGCGISCKVTNIEGLLHKNNWNIEDNNIKNASLVQIDASNEQSSTSSSMIIDAQISNALNAQQYKVLIGNREWMIRNGLVINNDVNDFMTEHERKGRTAVLVAVDDELCGLIAIADTVKPEAELAIHILKSMGLEVVLMTGDNSKTARSIASQVGITKVFAEVLPSHKVAKVKQLQEEGKRVAMVGDGINDSPALAMANVGIAIGTGTDVAIEAADVVLIRNDLLDVVASIDLSRKTVKRIRINFVFALIYNLVGIPIAAGVFMPIGLVLQPWMGSAAMAASSVSVVLSSLFLKLYRKPTYESYELPARSQIGQKSPSEISVHVGIDDTSRNSPKLGLLDRIVNYSRASINSLLSDKRSLNSVVTSEPDKHSLLVGDFREDDDTAL

SEQ ID NO: 14551 - protein, 503 aa, Homo sapiens
MDPSMGVNSVTISVEGMTCNSCVWTIEQQIGKVNGVHHIKVKVVVFDKTGTITHGTPVVNQVKVLTESNRISHHKILAIVGTAESNSEHPLGTAITKYCKQELDTETLGTCIDFQVVPGCGISCKVTNIEGLLHKNNWNIEDNNIKNASLVQIDASNEQSSTSSSMIIDAQISNALNAQQYKVLIGNREWMIRNGLVINNDVNDFMTEHERKGRTAVLVAVDDELCGLIAIADTVKPEAELAIHILKSMGLEVVLMTGDNSKTARSIASQVGITKVFAEVLPSHKVAKVKQLQEEGKRVAMVGDGINDSPALAMANVGIAIGTGTDVAIEAADVVLIRNDLLDVVASIDLSRKTVKRIRINFVFALIYNLVGIPIAAGVFMPIGLVLQPWMGSAAMAASSVSVVLSSLFLKLYRKPTYESYELPARSQIGQKSPSEISVHVGIDDTSRNSPKLGLLDRIVNYSRASINSLLSDKRSLNSVVTSEPDKHSLLVGDFREDDDTAL

SEQ ID NO: 14552 - protein, 1422 aa, Homo sapiens
MDPSMGVNSVTISVEGMTCNSCVWTIEQQIGKVNGVHHIKVSLEEKNATIIYDPKLQTPKTLQEAIDDMGFDAVIHNPDPLPVLTDTLFLTVTASLTLPWDHIQSTLLKTKGVTDIKIYPQKRTVAVTIIPSIVNANQIKELVPELSLDTGTLEKKSGACEDHSMAQAGEVVLKMKVEGMTCHSCTSTIEGKIGKLQGVQRIKVSLDNQEATIVYQPHLISVEEMKKQIEAMGFPAFVKKQPKYLKLGAIDVERLKNTPVKSSEGSQQRSPSYTNDSTATFIIDGMHCKSCVSNIESTLSALQYVSSIVVSLENRSAIVKYNASSVTPESLRKAIEAVSPGLYRVSITSEVESTSNSPSSSSLQKIPLNVVSQPLTQETVINIDGMTCNSCVQSIEGVISKKPGVKSIRVSLANSNGTVEYDPLLTSPETLRGAIEDMGFDATLSDTNEPLVVIAQPSSEMPLLTSTNEFYTKGMTPVQDKEEGKNSSKCYIQVTGMTCASCVANIERNLRREEGIYSILVALMAGKAEVRYNPAVIQPPMIAEFIRELGFGATVIENADEGDGVLELVVRGMTCASCVHKIESSLTKHRGILYCSVALATNKAHIKYDPEIIGPRDIIHTIESLGFEASLVKKDRSASHLDHKREIRQWRRSFLVSLFFCIPVMGLMIYMMVMDHHFATLHHNQNMSKEEMINLHSSMFLERQILPGLSVMNLLSFLLCVPVQGKTSEALAKLISLQATEATIVTLDSDNILLSEEQVDVELVQRGDIIKVVPGGKFPVDGRVIEGHSMVDESLITGEAMPVAKKPGSTVIAGSINQNGSLLICATHVGADTTLSQIVKLVEEAQTSKAPIQQFADKLSGYFVPFIVFVSIATLLVWIVIGFLNFEIVETYFPGYNRSISRTETIIRFAFQASITVLCIACPCSLGLATPTAVMVGTGVGAQNGILIKGGEPLEMAHKVKVVVFDKTGTITHGTPVVNQVKVLTESNRISHHKILAIVGTAESNSEHPLGTAITKYCKQELDTETLGTCIDFQVVPGCGISCKVTNIEGLLHKNNWNIEDNNIKNASLVQIDASNEQSSTSSSMIIDAQISNALNAQQYKVLIGNREWMIRNGLVINNDVNDFMTEHERKGRTAVLVAVDDELCGLIAIADTVKPEAELAIHILKSMGLEVVLMTGDNSKTARSIASQVGITKVFAEVLPSHKVAKVKQLQEEGKRVAMVGDGINDSPALAMANVGIAIGTGTDVAIEAADVVLIRNDLLDVVASIDLSRKTVKRIRINFVFALIYNLVGIPIAAGVFMPIGLVLQPWMGSAAMAASSVSVVLSSLFLKLYRKPTYESYELPARSQIGQKSPSEISVHVGIDDTSRNSPKLGLLDRIVNYSRASINSLLSDKRSLNSVVTSEPDKHSLLVGDFREDDDTAL

SEQ ID NO: 14553 - protein, 103 aa, Homo sapiens
MRKLSIRKRDNNLLKECNEEIKDPSMGVNSVTISVEGMTCNSCVWTIEQQIGKVNGVHHIKVSLEEKNATIIYAHWFGFAALDGICSNGCFICFCSTFFSSLL

SEQ ID NO: 14554 - protein, 355 aa, Homo sapiens
MDFIFHEKQEGFLCAQHCLNNLLQGEYFSPVELASIAHQLDEEERMRMAEGGVTSEEYLAFLQQPSENMDDTGFFSIQVISNALKFWGLEIIHFNNPEYQKLGIDPINERSFICNYKQHWFTIRKFGKHWFNLNSLLAGPELISDTCLANFLARLQQQAYSVFVVKGDLPDCEADQLLQIISVEEMDTPKLNGKKLVKQKEHRVYKTVLEKVSEESDESGTSDQDEEDFQRALELSRQETNREDEHLRSTIELSMQGSSGNTSQDLPKTSCVTPASEQPKKIKEDYFEKHQQEQKQQQQQSDLPGHSSYLHERPTTSSRAIESDLSDDISEGTVQAAVDTILEIMRKNLKIKGEK

SEQ ID NO: 14555 - protein, 1465 aa, Homo sapiens
MPEQERQITAREGASRKILSKLSLPTRAWEPAMKKSFAFDNVGYEGGLDGLGPSSQVATSTVRILGMTCQSCVKSIEDRISNLKGIISMKVSLEQGSATVKYVPSVVCLQQVCHQIGDMGFEASIAEGKAASWPSRSLPAQEAVVKLRVEGMTCQSCVSSIEGKVRKLQGVVRVKVSLSNQEAVITYQPYLIQPEDLRDHVNDMGFEAAIKSKVAPLSLGPIDIERLQSTNPKRPLSSANQNFNNSETLGHQGSHVVTLQLRIDGMHCKSCVLNIEENIGQLLGVQSIQVSLENKTAQVKYDPSCTSPVALQRAIEALPPGNFKVSLPDGAEGSGTDHRSSSSHSPGSPPRNQVQGTCSTTLIAIAGMTCASCVHSIEGMISQLEGVQQISVSLAEGTATVLYNPSVISPEELRAAIEDMGFEASVVSESCSTNPLGNHSAGNSMVQTTDGTPTSVQEVAPHTGRLPANHAPDILAKSPQSTRAVAPQKCFLQIKGMTCASCVSNIERNLQKEAGVLSVLVALMAGKAEIKYDPEVIQPLEIAQFIQDLGFEAAVMEDYAGSDGNIELTITGMTCASCVHNIESKLTRTNGITYASVALATSKALVKFDPEIIGPRDIIKIIEEIGFHASLAQRNPNAHHLDHKMEIKQWKKSFLCSLVFGIPVMALMIYMLIPSNEPHQSMVLDHNIIPGLSILNLIFFILCTFVQLLGGWYFYVQAYKSLRHRSANMDVLIVLATSIAYVYSLVILVVAVAEKAERSPVTFFDTPPMLFVFIALGRWLEHLAKSKTSEALAKLMSLQATEATVVTLGEDNLIIREEQVPMELVQRGDIVKVVPGGKFPVDGKVLEGNTMADESLITGEAMPVTKKPGSTVIAGSINAHGSVLIKATHVGNDTTLAQIVKLVEEAQMSKAPIQQLADRFSGYFVPFIIIMSTLTLVVWIVIGFIDFGVVQRYFPNPNKHISQTEVIIRFAFQTSITVLCIACPCSLGLATPTAVMVGTGVAAQNGILIKGGKPLEMAHKIKTVMFDKTGTITHGVPRVMRVLLLGDVATLPLRKVLAVVGTAEASSEHPLGVAVTKYCKEELGTETLGYCTDFQAVPGCGIGCKVSNVEGILAHSERPLSAPASHLNEAGSLPAEKDAVPQTFSVLIGNREWLRRNGLTISSDVSDAMTDHEMKGQTAILVAIDGVLCGMIAIADAVKQEAALAVHTLQSMGVDVVLITGDNRKTARAIATQVGINKVFAEVLPSHKVAKVQELQNKGKKVAMVGDGVNDSPALAQADMGVAIGTGTDVAIEAADVVLIRNDLLDVVASIHLSKRTVRRIRINLVLALIYNLVGIPIAAGVFMPIGIVLQPWMGSAAMAASSVSVVLSSLQLKCYKKPDLERYEAQAHGHMKPLTASQVSVHIGMDDRWRDSPRATPWDQVSYVSQVSLSSLTSDKPSRHSAAADDDGDKWSLLLNGRDEEQYI

SEQ ID NO: 14556 - protein, 1258 aa, Homo sapiens
MPEQERQITAREGASRKILSKLSLPTRAWEPAMKKSFAFDNVGYEGGLDGLGPSSQVATSTVRILGMTCQSCVKSIEDRISNLKGIISMKVSLEQGSATVKYVPSVVCLQQVCHQIGDMGFEASIAEGKAASWPSRSLPAQEAVVKLRVEGMTCQSCVSSIEGKVRKLQGVVRVKVSLSNQEAVITYQPYLIQPEDLRDHVNDMGFEAAIKSKVAPLSLGPIDIERLQSTNPKRPLSSANQNFNNSETLGHQGSHVVTLQLRIDGMHCKSCVLNIEENIGQLLGVQSIQVSLENKTAQVKYDPSCTSPVALQRAIEALPPGNFKVSLPDGAEGSGTDHRSSSSHSPGSPPRNQVQGTCSTTLIAIAGMTCASCVHSIEGMISQLEGVQQISVSLAEGTATVLYNPSVISPEELRAAIEDMGFEASVVSESCSTNPLGNHSAGNSMVQTTDGTPTSVQEVAPHTGRLPANHAPDILAKSPQSTRAVAPQKCFLQIKGMTCASCVSNIERNLQKEAGVLSVLVALMAGKAEIKYDPEVIQPLEIAQFIQDLGFEAAVMEDYAGSDGNIELTITGMTCASCVHNIESKLTRTNGITYASVALATSKALVKFDPEIIGPRDIIKIIESKTSEALAKLMSLQATEATVVTLGEDNLIIREEQVPMELVQRGDIVKVVPGGKFPVDGKVLEGNTMADESLITGEAMPVTKKPGSTVIAGSINAHGSVLIKATHVGNDTTLAQIVKLVEEAQMSKNPNKHISQTEVIIRFAFQTSITVLCIACPCSLGLATPTAVMVGTGVAAQNGILIKGGKPLEMAHKIKTVMFDKTGTITHGVPRVMRVLLLGDVATLPLRKVLAVVGTAEASSEHPLGVAVTKYCKEELGTETLGYCTDFQAVPGCGIGCKVSNVEGILAHSERPLSAPASHLNEAGSLPAEKDAVPQTFSVLIGNREWLRRNGLTISSDVSDAMTDHEMKGQTAILVAIDGVLCGMIAIADAVKQEAALAVHTLQSMGVDVVLITGDNRKTARAIATQVGINKVFAEVLPSHKVAKVQELQNKGKKVAMVGDGVNDSPALAQADMGVAIGTGTDVAIEAADVVLIRNDLLDVVASIHLSKRTVRRIRINLVLALIYNLVGIPIAAGVFMPIGIVLQPWMGSAAMAASSVSVVLSSLQLKCYKKPDLERYEAQAHGHMKPLTASQVSVHIGMDDRWRDSPRATPWDQVSYVSQVSLSSLTSDKPSRHSAAADDDGDKWSLLLNGRDEEQYI

SEQ ID NO: 14557 - protein, 1354 aa, Homo sapiens
MPEQERQITAREGASRKILSKLSLPTRAWEPAMKKSFAFDNVGYEGGLDGLGPSSQVATSTVRILGMTCQSCVKSIEDRISNLKGIISMKVSLEQGSATVKYVPSVVCLQQVCHQIGDMGFEASIAEGKAASWPSRSLPAQEAVVKLRVEGMTCQSCVSSIEGKVRKLQGVVRVKVSLSNQEAVITYQPYLIQPEDLRDHVNDMGFEAAIKSKVAPLSLGPIDIERLQSTNPKRPLSSANQNFNNSETLGHQGSHVVTLQLRIDGMHCMISQLEGVQQISVSLAEGTATVLYNPSVISPEELRAAIEDMGFEASVVSESCSTNPLGNHSAGNSMVQTTDGTPTSVQEVAPHTGRLPANHAPDILAKSPQSTRAVAPQKCFLQIKGMTCASCVSNIERNLQKEAGVLSVLVALMAGKAEIKYDPEVIQPLEIAQFIQDLGFEAAVMEDYAGSDGNIELTITGMTCASCVHNIESKLTRTNGITYASVALATSKALVKFDPEIIGPRDIIKIIEEIGFHASLAQRNPNAHHLDHKMEIKQWKKSFLCSLVFGIPVMALMIYMLIPSNEPHQSMVLDHNIIPGLSILNLIFFILCTFVQLLGGWYFYVQAYKSLRHRSANMDVLIVLATSIAYVYSLVILVVAVAEKAERSPVTFFDTPPMLFVFIALGRWLEHLAKSKTSEALAKLMSLQATEATVVTLGEDNLIIREEQVPMELVQRGDIVKVVPGGKFPVDGKVLEGNTMADESLITGEAMPVTKKPGSTVIAGSINAHGSVLIKATHVGNDTTLAQIVKLVEEAQMSKAPIQQLADRFSGYFVPFIIIMSTLTLVVWIVIGFIDFGVVQRYFPNPNKHISQTEVIIRFAFQTSITVLCIACPCSLGLATPTAVMVGTGVAAQNGILIKGGKPLEMAHKIKTVMFDKTGTITHGVPRVMRVLLLGDVATLPLRKVLAVVGTAEASSEHPLGVAVTKYCKEELGTETLGYCTDFQAVPGCGIGCKVSNVEGILAHSERPLSAPASHLNEAGSLPAEKDAVPQTFSVLIGNREWLRRNGLTISSDVSDAMTDHEMKGQTAILVAIDGVLCGMIAIADAVKQEAALAVHTLQSMGVDVVLITGDNRKTARAIATQVGINKVFAEVLPSHKVAKVQELQNKGKKVAMVGDGVNDSPALAQADMGVAIGTGTDVAIEAADVVLIRNDLLDVVASIHLSKRTVRRIRINLVLALIYNLVGIPIAAGVFMPIGIVLQPWMGSAAMAASSVSVVLSSLQLKCYKKPDLERYEAQAHGHMKPLTASQVSVHIGMDDRWRDSPRATPWDQVSYVSQVSLSSLTSDKPSRHSAAADDDGDKWSLLLNGRDEEQYI

SEQ ID NO: 14558 - protein, 1447 aa, Homo sapiens
MPEQERQITAREGASRKILSKLSLPTRAWEPAMKKSFAFDNVGYEGGLDGLGPSSQVATSTVRILGMTCQSCVKSIEDRISNLKGIISMKVSLEQGSATVKYVPSVVCLQQVCHQIGDMGFEASIAEGKAASWPSRSLPAQEAVVKLRVEGMTCQSCVSSIEGKVRKLQGVVRVKVSLSNQEAVITYQPYLIQPEDLRDHVNDMGFEAAIKSKVAPLSLGPIDIERLQSTNPKRPLSSANQNFNNSETLGHQGSHVVTLQLRIDGMHCKSCVLNIEENIGQLLGVQSIQVSLENKTAQVKYDPSCTSPVALQRAIEALPPGNFKVSLPDGAEGSGTDHRSSSSHSPGSPPRNQVQGTCSTTLIAIAGMTCASCVHSIEGMISQLEGVQQISVSLAEGTATVLYNPSVISPEELRAAIEDMGFEASVVSESCSTNPLGNHSAGNSMVQTTDGTPTSVQEVAPHTGRLPANHAPDILAKSPQSTRAVAPQKCFLQIKGMTCASCVSNIERNLQKEAGVLSVLVALMAGKAEIKYDPEVIQPLEIAQFIQDLGFEAAVMEDYAGSDGNIELTITGMTCASCVHNIESKLTRTNGITYASVALATSKALVKFDPEIIGPRDIIKIIEEIGFHASLAQRNPNAHHLDHKMEIKQWKKSFLCSLVFGIPVMALMIYMLIPSNEPHQSMVLDHNIIPGLSILNLIFFILCTFVQLLGGWYFYVQAYKSLRHRSANMDVLIVLATSIAYVYSLVILVVAVAEKAERSPVTFFDTPPMLFVFIALGRWLEHLAKSKTSEALAKLMSLQATEATVVTLGEDNLIIREEQVPMELVQRGDIVKVVPGGKFPVDGKVLEGNTMADESLITGEAMPVTKKPGSTVIAGSINAHGSVLIKATHVGNDTTLAQIVKLVEEAQMSKAPIQQLADRFSGYFVPFIIIMSTLTLVNPNKHISQTEVIIRFAFQTSITVLCIACPCSLGLATPTAVMVGTGVAAQNGILIKGGKPLEMAHKIKTVMFDKTGTITHGVPRVMRVLLLGDVATLPLRKVLAVVGTAEASSEHPLGVAVTKYCKEELGTETLGYCTDFQAVPGCGIGCKVSNVEGILAHSERPLSAPASHLNEAGSLPAEKDAVPQTFSVLIGNREWLRRNGLTISSDVSDAMTDHEMKGQTAILVAIDGVLCGMIAIADAVKQEAALAVHTLQSMGVDVVLITGDNRKTARAIATQVGINKVFAEVLPSHKVAKVQELQNKGKKVAMVGDGVNDSPALAQADMGVAIGTGTDVAIEAADVVLIRNDLLDVVASIHLSKRTVRRIRINLVLALIYNLVGIPIAAGVFMPIGIVLQPWMGSAAMAASSVSVVLSSLQLKCYKKPDLERYEAQAHGHMKPLTASQVSVHIGMDDRWRDSPRATPWDQVSYVSQVSLSSLTSDKPSRHSAAADDDGDKWSLLLNGRDEEQYI

SEQ ID NO: 14559 - protein, 239 aa, Homo sapiens
MPEQERQITAREGASRKILSKLSLPTRAWEPAMKKSFAFDNVGYEGGLDGLGPSSQVATSTVRILGMTCQSCVKSIEDRISNLKGIISMKVSLEQGSATVKYVPSVVCLQQVCHQIGDMGFEASIAEGKAASWPSRSLPAQEAVVKLRVEGMTCQSCVSSIEGKVRKLQGVVRVKVSLSNQEAVITYQPYLIQPEDLRDHVNDMGFEAAIKSKVAPLSLGPIDIERLQSTNPKETFIFC

SEQ ID NO: 14560 - protein, 79 aa, Homo sapiens
MGLKGAWCFPWCGCRRQRGTERGAGLSPAAPPDPSPAIAPTMAEGGVPSPGPGAYFSRKARLSFRHQLHDIASANDSTI

SEQ ID NO: 14561 - protein, 57 aa, Homo sapiens
MPTGKQLADIGYKTFSTSMMLLTVYGGYLCSVRVYHYFQWRRAQRQAAEEQKTSGIM

SEQ ID NO: 14562 - protein, 127 aa, Homo sapiens
MWMGLIQLVEGVKRKDQGFLEKEFYHKTNIKMRCEFLACWPAFTVLGEAWRDQVDWSRLLRDAGLVKMSRKPRASSPLSNNHPPTPKRRGSGRHPLNPGPEALSKFPRQPGREKGPIKEVPGTKGSP

SEQ ID NO: 14563 - protein, 110 aa, Homo sapiens
MWMGLIQLVEGVKRKDQGFLEKEFYHKTNIKMRCEFLACWPAFTVLGEAWRDQVDWSRLLRDAGLVKMSRKPRASSPLSNNHPPTPKRFPRQPGREKGPIKEVPGTKGSP

SEQ ID NO: 14564 - protein, 48 aa, Homo sapiens
MSRKPRASSPLSNNHPPTPKRRGSGRFPRQPGREKGPIKEVPGTKGSP

SEQ ID NO: 14565 - protein, 109 aa, Homo sapiens
MAPEVIRQDFQAGEVAFRRTGYLRGRSVLTQTKHSLAGNGRHPVALRTRLGSLALGAVPTWTKLWAQSTTWQTRNHTRTGHAYPRFTRPSFPSCNRNGKRRKLRLGLPY

SEQ ID NO: 14566 - protein, 112 aa, Homo sapiens
MINLHRLCIIHVVATLLSTLLSLISVAISATCKDEKGKQEMETGQQPSGLSATLTKVKCAKRQKTVVRVRFYMLSMKNKACRKNLSKGYNQRPEGSKEESHMVVKEKRKGDH

SEQ ID NO: 14567 - protein, 97 aa, Homo sapiens
MINLHRLCIIHAISATCKDEKGKQEMETGQQPSGLSATLTKVKCAKRQKTVVRVRFYMLSMKNKACRKNLSKGYNQRPEGSKEESHMVVKEKRKGDH

SEQ ID NO: 14568 - protein, 404 aa, Homo sapiens
MKMEEAVGKVEELIESEAPPKASEQETAKEEDGSVELESQVQKDGVADSTVISSMPCLLMELRRDSSESQLASTESDKPTTGRVYESDSSNHCMLSPSSSGHLADSDTLSSAEENEPSQAETAVEGDPSGVSGATVGRKSRRSRSESETSTMAAKKNRQSSDKQNGRVAKVKGHRSQKHKERIRLLRQKREAAARKKYNLLQDSSTSDSDLTCDSSTSSSDDDEEVSGSSKTITAEIPDGPPVVAHYDMSDTNSDPEVVNVDNLLAAAVVQEHSNSVGGQDTGATWRTSGLLEELNAEAGHLDPGFLASDKTSAGNAPLNEEINIASSDSEVEIVGVQEHARCVHPRGGVIQSVSSWKHGSGTQYVSTRQTQSWTAVTPQQTWASPAEVVDLTLDEDSRRKYLL

SEQ ID NO: 14569 - protein, 343 aa, Homo sapiens
MKMEEAVGKVEELIESEAPPKASEQETAKEEDGSVELESQVQKDGVADSTVISSMPCLLMELRRDSSESQLASTESDKPTTGRVYESDSSNHCMLSPSSSGHLADSDTLSSAEENEPSQAETAVEGDPSGVSGATVGRKSRRSRSESETSTMAAKKNRQSSDKQNGRVAKVKGHRSQKHKERIRLLRQKREAAARKKYNLLQDSSTSDSDLTCDSSTSSSDDDEEVSGSSKTITAEIPGHLDPGFLASDKTSAGNAPLNEEINIASSDSEVEIVGVQEHARCVHPRGGVIQSVSSWKHGSGTQYVSTRQTQSWTAVTPQQTWASPAEVVDLTLDEDSRRKYLL

SEQ ID NO: 14570 - protein, 102 aa, Homo sapiens
MTQEKMYPHLFSERCANQHQHRTAEEKKYVSEKQLIHWRCEEPSAHHNSIDIKRMKHFGSALRLRQTFHLDTADHPCVITMNPALPWKLEGSNSTSTLPLPA

SEQ ID NO: 14571 - protein, 832 aa, Homo sapiens
MLPFLLATLGTTALNNSNPKDYCYSARIRSTVLQGLPFGGVPTVLALDFMCFLALLFLFSILRKVAWDYGRLALVTDADRLRRQERDRVEQEYVASAMHGDSHDRYERLTSVSSSVDFDQRDNGFCSWLTAIFRIKDDEIRDKCGGDAVHYLSFQRHIIGLLVVVGVLSVGIVLPVNFSGDLLENNAYSFGRTTIANLKSGNNLLWLHTSFAFLYLLLTVYSMRRHTSKMRYKEDDLVKRTLFINGISKYAESEKIKKHFEEAYPNCTVLEARPCYNVARLMFLDAERKKAERGKLYFTNLQSKENVPTMINPKPCGHLCCCVVRGCEQVEAIEYYTKLEQKLKEDYKREKEKVNEKPLGMAFVTFHNETITAIILKDFNVCKCQGCTCRGEPRPSSCSESLHISNWTVSYAPDPQNIYWEHLSIRGFIWWLRCLVINVVLFILLFFLTTPAIIITTMDKFNVTKPVEYLNNPIITQFFPTLLLWCFSALLPTIVYYSAFFEAHWTRSGENRTTMHKCYTFLIFMVLLLPSLGLSSLDLFFRWLFDKKFLAEAAIRFECVFLPDNGAFFVNYVIASAFIGNAMDLLRIPGLLMYMIRLCLARSAAERRNVKRHQAYEFQFGAAYAWMMCVFTVVMTYSITCPIIVPFGLMYMLLKHLVDRYNLYYAYLPAKLDKKIHSGAVNQVVAAPILCLFWLLFFSTMRTGFLAPTSMFTFVVLVITIVICLCHVCFGHFKYLSAHNYKIEHTETDTVDPRSNGRPPTAAAVPKSAKYIAQVLQDSEVDGDGDGAPGSSGDEPPSSSSQDEELLMPPDALTDTDFQSCEDSLIENEIHQ

SEQ ID NO: 14572 - protein, 491 aa, Homo sapiens
MLPFLLATLGTTALNNSNPKDYCYSARIRSTVLQGLPFGGVPTVLALDFMCFLALLFLFSILRKVAWDYGRLALVTDADRLRRQERDRVEQEYVASAMHGDSHDRYERLTSVSSSVDFDQRDNGFCSWLTAIFRIKDDEIRDKCGGDAVHYLSFQRHIIGLLVVVGVLSVGIVLPVNFSGDLLENNAYSFGRTTIANLKSGNNLLWLHTSFAFLYLLLTVYSMRRHTSKMRYKEDDLVKRTLFINGISKYAESEKIKKHFEEAYPNCTVLEARPCYNVARLMFLDAERKKAERGKLYFTNLQSKENVPTMINPKPCGHLCCCVVRGCEQVEAIEYYTKLEQKLKEDYKREKEKVNEKPLGMAFVTFHNETITAIILKDFNVCKCQGCTCRGEPRPSSCSESLHISNWTVSYAPDPQNIYWEHLSIRGFIWWLRCLVINVVLFILLFFLTTPAIIITTMDKFNVTKPVEYLNVRPHAPVTFHAGSQHTDTRP

SEQ ID NO: 14573 - protein, 704 aa, Homo sapiens
MLPFLLATLGTTALNNSNPKDYCYSARIRSTVLQGLPFGGVPTVLALDFMCFLALLFLFSILRKVAWDYGRLALVTDADRLRRQERDRVEQEYVASAMHGDSHDRYERLTSVSSSVDFDQRDNGFCSWLTAIFRIKDDEIRDKCGGDAVHYLSFQRHIIGLLVVVGVLSVGIVLPVNFSGDLLENNAYSFGRTTIANLKSGNNLLWLHTSFAFLYLLLTVYSMRRHTSKMRYKEDDLVKRTLFINGISKYAESEKIKKHFEEAYPNCTVLEARPCYNVARLMFLDAERKKAERGKLYFTNLQSKENVPTMINPKPCGHLCCCVVRGCEQVEAIEYYTKLEQKLKEDYKREKEKVNEKPLGMAFVTFHNETITAIILKDFNVCKCQGCTCRGEPRPSSCSESLHISNWTVSYAPDPQNIYWEHLSIRGFIWWLRCLVINVVLFILLFFLTTPAIIITTMDKFNVTKPVEYLNNPIITQFFPTLLLWCFSALLPTIVYYSAFFEAHWTRSGENRTTMHKCYTFLIFMVLLLPSLGLSSLDLFFRWLFDKKFLAEAAIRFECVFLPDNGAFFVNYVIASAFIGNAMDLLRIPGLLMYMIRLCLARSAAERRNVKRHQAYEFQFGAAYAWMMCVFTVVMTYSITCPIIVPFGLMYMLLKHLVDRYNLYYAYLPAKLDKKIHSGAVNQVVAAPILCLFWLLFFSTMRTD

SEQ ID NO: 14574 - protein, 493 aa, Homo sapiens
MSALGVTVALLVWAAFLLLVSMWRQVHSSWNLPPGPFPLPIIGNLFQLELKNIPKSFTRLAQRFGPVFTLYVGSQRMVVMHGYKAVKEALLDYKDEFSGRGDLPAFHAHRDRGIIFNNGPTWKDIRRFSLTTLRNYGMGKQGNESRIQREAHFLLEALRKTQGQPFDPTFLIGCAPCNVIADILFRKHFDYNDEKFLRLMYLFNENFHLLSTPWLQLYNNFPSFLHYLPGSHRKVIKNVAEVKEYVSERVKEHHQSLDPNCPRDLTDCLLVEMEKEKHSAERLYTMDGITVTVADLFFAGTETTSTTLRYGLLILMKYPEIEEKLHEEIDRVIGPSRIPAIKDRQEMPYMDAVVHEIQRFITLVPSNLPHEATRDTIFRGYLIPKGTVVVPTLDSVLYDNQEFPDPEKFKPEHFLNENGKFKYSDYFKPFSTGKRVCAGEGLARMELFLLLCAILQHFNLKPLVDPKDIDLSPIHIGFGCIPPRYKLCVIPRS

SEQ ID NO: 14575 - protein, 154 aa, Homo sapiens
MHPEPLLNSTQSAPHHFPDSFQATPFCFNQSLIPGSPSNSSILSGSLDYSYSPVQLPSYAPENYNSPASLDTRTCGYPPEDHSYQHLSSHAQYSCFSSATTSICYCASCEAEDLDALQAAEYFYPSTDCVDFAPSAAATSDFYKRETNCDICYS

SEQ ID NO: 14576 - protein, 328 aa, Homo sapiens
MSDGARKRRRKGTRESGQKAKTEGSEGGSSSGLAPLLGQSAGTSPAQDGAGQTSPLAPGLASRPRARRGRSLPRSHTWPEKPKVYQGVRVKITVKELLQQRRAHQAASGGTRSGGSSVHLSDPVAPSSAGLYFEPEPISSTPNYLQRGEFSSCVSCEENSSCLDQIFDSYLQTEMHPEPLLNSTQSAPHHFPDSFQATPFCFNQSLIPGSPSNSSILSGSLDYSYSPVQLPSYAPENYNSPASLDTRTCGYPPEDHSYQHLSSHAQYSCFSSATTSICYCASCEAEDLDALQAAEYFYPSTDCVDFAPSAAATSDFYKRETNCDICYS

SEQ ID NO: 14577 - protein, 379 aa, Homo sapiens
MSEQRGTKSRHASKGRGSGEDASHAVAAPTQRLSRRAEAQRPSWPLRTSAYPRPPPALPRIHCCVLRHAVRTLRAQKLLRGELEAHSEPGTGAERTDCTEPSCGGPCADPEGRPLPAESGADRGTGWWGCEKPKVYQGVRVKITVKELLQQRRAHQAASGGTRSGGSSVHLSDPVAPSSAGLYFEPEPISSTPNYLQRGEFSSCVSCEENSSCLDQIFDSYLQTEMHPEPLLNSTQSAPHHFPDSFQATPFCFNQSLIPGSPSNSSILSGSLDYSYSPVQLPSYAPENYNSPASLDTRTCGYPPEDHSYQHLSSHAQYSCFSSATTSICYCASCEAEDLDALQAAEYFYPSTDCVDFAPSAAATSDFYKRETNCDICYS

SEQ ID NO: 14578 - protein, 286 aa, Homo sapiens
MSDGARKRRRKGTRESGQKAKTEGSEGGSSSGLAPLLEKPKVYQGVRVKITVKELLQQRRAHQAASGGTRSGGSSVHLSDPVAPSSAGLYFEPEPISSTPNYLQRGEFSSCVSCEENSSCLDQIFDSYLQTEMHPEPLLNSTQSAPHHFPDSFQATPFCFNQSLIPGSPSNSSILSGSLDYSYSPVQLPSYAPENYNSPASLDTRTCGYPPEDHSYQHLSSHAQYSCFSSATTSICYCASCEAEDLDALQAAEYFYPSTDCVDFAPSAAATSDFYKRETNCDICYS

SEQ ID NO: 14579 - protein, 251 aa, Homo sapiens
MSEKPKVYQGVRVKITVKELLQQRRAHQAASGGTRSGGSSVHLSDPVAPSSAGLYFEPEPISSTPNYLQRGEFSSCVSCEENSSCLDQIFDSYLQTEMHPEPLLNSTQSAPHHFPDSFQATPFCFNQSLIPGSPSNSSILSGSLDYSYSPVQLPSYAPENYNSPASLDTRTCGYPPEDHSYQHLSSHAQYSCFSSATTSICYCASCEAEDLDALQAAEYFYPSTDCVDFAPSAAATSDFYKRETNCDICYS

SEQ ID NO: 14580 - protein, 569 aa, Homo sapiens
MAPPVRLERPFPSRRFPGLLLAALVLLLSSFSDQCNVPEWLPFARPTNLTDDFEFPIGTYLNYECRPGYSGRPFSIICLKNSVWTSAKDKCKRKSCRNPPDPVNGMAHVIKDIQFRSQIKYSCPKGYRLIGSSSATCIISGNTVIWDNKTPVCDRIICGLPPTIANGDFTSISREYFHYGSVVTYHCNLGSRGKKVFELVGEPSIYCTSKDDQVGIWSGPAPQCIIPNKCTPPNVENGILVSDNRSLFSLNEVVEFRCQPGFGMKGPSHVKCQALNKWEPELPSCSRVCQPPPDVLHAERTQRDKDNFSPGQEVFYSCEPGYDLRGSTYLHCTPQGDWSPAAPRCEVKSCDDFLGQLPNGHVLFPLNLQLGAKVDFVCDEGFQLKGSSASYCVLAGMESLWNSSVPVCERKSCETPPVPVNGMVHVITDIHVGSRINYSCTTGHRLIGHSSAECILSGNTAHWSMKPPICQQIFCPNPPAILNGRHTGTPLGDIPYGKEVSYTCDPHPDRGMTFNLIGESTIRRTSEPHGNGVWSSPAPRCELPVGAGSHDALIVGKFYEVFAEEFCHL

SEQ ID NO: 14581 - protein, 181 aa, Homo sapiens
MKGPSHVKCQALNKWEPELPSCSRVCQPPPDVLHAERTQRDKDNFSPGQEVFYSCEPGYDLRGSTYLHCTPQGDWSPAAPRCEVKSCDDFLGQLPNGHVLFPLNLQLGAKVDFVCDEGFQLKGSSASYCVLAGMESLWNSSVPVCERKSCETPPVPVNGMVHVITDIHVGSRINYSCTTGF

SEQ ID NO: 14582 - protein, 444 aa, Homo sapiens
MAPPVRLERPFPSRRFPGLLLAALVLLLSSFSDQCNVPEWLPFARPTNLTDDFEFPIGTYLNYECRPGYSGRPFSIICLKNSVWTSAKDKCKRKSCRNPPDPVNGMAHVIKDIQFRSQIKYSCPKGYRLIGSSSATCIISGNTVIWDNKTPVCDRIICGLPPTIANGDFTSISREYFHYGSVVTYHCNLGSRGKKVFELVGEPSIYCTSKDDQVGIWSGPAPQCIIPNKCTPPNVENGILVSDNRSLFSLNEVVEFRCQPGFGMKGPSHVKCQALNKWEPELPSCSRVCQPPPDVLHAERTQRDKDNFSPGQEVFYSCEPGYDLRGSTYLHCTPQGDWSPAAPRCEVKSCDDFLGQLPNGHVLFPLNLQLGAKVDFVCDEGFQLKGSSASYCVLAGMESLWNSSVPVCERKSCETPPVPVNGMVHVITDIHVGSRINYSCTTGF

SEQ ID NO: 14583 - protein, 153 aa, Homo sapiens
MTSESTSPPVVPPLHSPKSPVWPTFPFHREGSRVWERGGVPPRDLPSPLPTKRTRTYSATARASAGPVFKGVCKQFSRSQGHGFITPENGSEDIFVHVSDIEGEYVPVEGDEVTYKMCPIPPKNQKFQAVEVVLTQLAPHTPHETWSGQVVGS

SEQ ID NO: 14584 - protein, 501 aa, Homo sapiens
MWKLWRAEEGAAALGGALFLLLFALGVRQLLKQRRPMGFPPGPPGLPFIGNIYSLAASSELPHVYMRKQSQVYGEIFSLDLGGISTVVLNGYDVVKECLVHQSEIFADRPCLPLFMKMTKMGGLLNSRYGRGWVDHRRLAVNSFRYFGYGQKSFESKILEETKFFNDAIETYKGRPFDFKQLITNAVSNITNLIIFGERFTYEDTDFQHMIELFSENVELAASASVFLYNAFPWIGILPFGKHQQLFRNAAVVYDFLSRLIEKASVNRKPQLPQHFVDAYLDEMDQGKNDPSSTFSKENLIFSVGELIIAGTETTTNVLRWAILFMALYPNIQGQVQKEIDLIMGPNGKPSWDDKCKMPYTEAVLHEVLRFCNIVPLGIFHATSEDAVVRGYSIPKGTTVITNLYSVHFDEKYWRDPEVFHPERFLDSSGYFAKKEALVPFSLGRRHCLGEHLARMEMFLFFTALLQRFHLHFPHELVPDLKPRLGMTLQPQPYLICAERR

SEQ ID NO: 14585 - protein, 2039 aa, Homo sapiens
MGASSPRSPEPVGPPAPGLPFCCGGSLLAVVVLLALPVAWGQCNAPEWLPFARPTNLTDEFEFPIGTYLNYECRPGYSGRPFSIICLKNSVWTGAKDRCRRKSCRNPPDPVNGMVHVIKGIQFGSQIKYSCTKGYRLIGSSSATCIISGDTVIWDNETPICDRIPCGLPPTITNGDFISTNRENFHYGSVVTYRCNPGSGGRKVFELVGEPSIYCTSNDDQVGIWSGPAPQCIIPNKCTPPNVENGILVSDNRSLFSLNEVVEFRCQPGFVMKGPRRVKCQALNKWEPELPSCSRVCQPPPDVLHAERTQRDKDNFSPGQEVFYSCEPGYDLRGAASMRCTPQGDWSPAAPTCEVKSCDDFMGQLLNGRVLFPVNLQLGAKVDFVCDEGFQLKGSSASYCVLAGMESLWNSSVPVCEQIFCPSPPVIPNGRHTGKPLEVFPFGKTVNYTCDPHPDRGTSFDLIGESTIRCTSDPQGNGVWSSPAPRCGILGHCQAPDHFLFAKLKTQTNASDFPIGTSLKYECRPEYYGRPFSITCLDNLVWSSPKDVCKRKSCKTPPDPVNGMVHVITDIQVGSRINYSCTTGHRLIGHSSAECILSGNAAHWSTKPPICQRIPCGLPPTIANGDFISTNRENFHYGSVVTYRCNPGSGGRKVFELVGEPSIYCTSNDDQVGIWSGPAPQCIIPNKCTPPNVENGILVSDNRSLFSLNEVVEFRCQPGFVMKGPRRVKCQALNKWEPELPSCSRVCQPPPDVLHAERTQRDKDNFSPGQEVFYSCEPGYDLRGAASMRCTPQGDWSPAAPTCEVKSCDDFMGQLLNGRVLFPVNLQLGAKVDFVCDEGFQLKGSSASYCVLAGMESLWNSSVPVCEQIFCPSPPVIPNGRHTGKPLEVFPFGKAVNYTCDPHPDRGTSFDLIGESTIRCTSDPQGNGVWSSPAPRCGILGHCQAPDHFLFAKLKTQTNASDFPIGTSLKYECRPEYYGRPFSITCLDNLVWSSPKDVCKRKSCKTPPDPVNGMVHVITDIQVGSRINYSCTTGHRLIGHSSAECILSGNTAHWSTKPPICQRIPCGLPPTIANGDFISTNRENFHYGSVVTYRCNLGSRGRKVFELVGEPSIYCTSNDDQVGIWSGPAPQCIIPNKCTPPNVENGILVSDNRSLFSLNEVVEFRCQPGFVMKGPRRVKCQALNKWEPELPSCSRVCQPPPEILHGEHTPSHQDNFSPGQEVFYSCEPGYDLRGAASLHCTPQGDWSPEAPRCAVKSCDDFLGQLPHGRVLFPLNLQLGAKVSFVCDEGFRLKGSSVSHCVLVGMRSLWNNSVPVCEHIFCPNPPAILNGRHTGTPSGDIPYGKEISYTCDPHPDRGMTFNLIGESTIRCTSDPHGNGVWSSPAPRCELSVRAGHCKTPEQFPFASPTIPINDFEFPVGTSLNYECRPGYFGKMFSISCLENLVWSSVEDNCRRKSCGPPPEPFNGMVHINTDTQFGSTVNYSCNEGFRLIGSPSTTCLVSGNNVTWDKKAPICEIISCEPPPTISNGDFYSNNRTSFHNGTVVTYQCHTGPDGEQLFELVGERSIYCTSKDDQVGVWSSPPPRCISTNKCTAPEVENAIRVPGNRSFFSLTEIIRFRCQPGFVMVGSHTVQCQTNGRWGPKLPHCSRVCQPPPEILHGEHTLSHQDNFSPGQEVFYSCEPSYDLRGAASLHCTPQGDWSPEAPRCTVKSCDDFLGQLPHGRVLLPLNLQLGAKVSFVCDEGFRLKGRSASHCVLAGMKALWNSSVPVCEQIFCPNPPAILNGRHTGTPFGDIPYGKEISYACDTHPDRGMTFNLIGESSIRCTSDPQGNGVWSSPAPRCELSVPAACPHPPKIQNGHYIGGHVSLYLPGMTISYICDPGYLLVGKGFIFCTDQGIWSQLDHYCKEVNCSFPLFMNGISKELEMKKVYHYGDYVTLKCEDGYTLEGSPWSQCQADDRWDPPLAKCTSRTHDALIVGTLSGTIFFILLIIFLSWIILKHRKGNNAHENPKEVAIHLHSQGGSSVHPRTLQTNEENSRVLP

SEQ ID NO: 14586 - protein, 504 aa, Homo sapiens
MEATGTWALLLALALLLLLTLALSGTRARGHLPPGPTPLPLLGNLLQLRPGALYSGLMRLSKKYGPVFTIYLGPWRPVVVLVGQEAVREALGGQAEEFSGRGTVAMLEGTFDGHGVFFSNGERWRQLRKFTMLALRDLGMGKREGEELIQAEARCLVETFQGTEGRPFDPSLLLAQATSNVVCSLLFGLRFSYEDKEFQAVVRAAGGTLLGVSSQGGQTYEMFSWFLRPLPGPHKQLLHHVSTLAAFTVRQVQQHQGNLDASGPARDLVDAFLLKMAQEEQNPGTEFTNKNMLMTVIYLLFAGTMTVSTTVGYTLLLLMKYPHVQKWVREELNRELGAGQAPSLGDRTRLPYTDAVLHEAQRLLALVPMGIPRTLMRTTRFRGYTLPQGTEVFPLLGSILHDPNIFKHPEEFNPDRFLDADGRFRKHEAFLPFSLGKRVCLGEGLAKAELFLFFTTILQAFSLESPCPPDTLSLKPTVSGLFNIPPAFQLQVRPTDLHSTTQTR

SEQ ID NO: 14587 - protein, 564 aa, Homo sapiens
MEATGTWALLLALALLLLLTLALSGTRARGHLPPGPTPLPLLGNLLQLRPGALYSGLMRLSKKYGPVFTIYLGPWRPVVVLVGQEAVREALGGQAEEFSGRGTVAMLEGTFDGHGVFFSNGERWRQLRKFTMLALRDLGMGKREGEELIQAEARCLVETFQGTEGRPFDPSLLLAQATSNVVCSLLFGLRFSYEDKEFQAVVRAAGGTLLGVSSQGGQTYEMFSWFLRPLPGPHKQLLHHVSTLAAFTVRQVQQHQGNLDASGPARDLVDAFLLKMAQEEQNPGTEFTNKNMLMTVIYLLFAGTMTVSTTVGYTLLLLMKYPHVQKWVREELNRELGAGQAPSLGDRTRLPYTDAVLHEAQRLLALVPMGIPRTLMRTTRFRGYTLPQGTEVFPLLGSILHDPNIFKHPEEFNPDRFLDADGRFRKHEAFLPFSLGKRVCLGEGLAKAELFLFFTTILQAFSLESPCPPDTLSLKPTVSGLFNIPPASTVGMDRVNVSRVYTAGSHIYTPAVVFRSLSHGPHAHLTHAAKMHNRTPIHNYKGHKATAGLAFHRHKYSPSAITST

SEQ ID NO: 14588 - protein, 798 aa, Homo sapiens
MSFDPNLLHNNGHNGYPNGTSAALRETGVIEKLLTSYGFIQCSERQARLFFHCSQYNGNLQDLKVGDDVEFEVSSDRRTGKPIAVKLVKIKQEILPEERMNGQVVCAVPHNLESKSPAAPGQSPTGSVCYERNGEVFYLTYTPEDVEGNVQLETGDKINFVIDNNKHTGAVSARNIMLLKKKQARCQGVVCAMKEAFGFIERGDVVKEIFFHYSEFKGDLETLQPGDDVEFTIKDRNGKEVATDVRLLPQGTVIFEDISIEHFEGTVTKVIPKVPSKNQNDPLPGRIKVDFVIPKELPFGDKDTKSKVTLLEGDHVRFNISTDRRDKLERATNIEVLSNTFQFTNEAREMGVIAAMRDGFGFIKCVDRDVRMFFHFSEILDGNQLHIADEVEFTVVPDMLSAQRNHAIRIKKLPKGTVSFHSHSDHRFLGTVEKEATFSNPKTTSPNKGKEKEAEDGIIAYDDCGVKLTIAFQAKDVEGSTSPQIGDKVEFSISDKQRPGQQVATCVRLLGRNSNSKRLLGYVATLKDNFGFIETANHDKEIFFHYSEFSGDVDSLELGDMVEYSLSKGKGNKVSAEKVNKTHSVNGITEEADPTIYSGKVIRPLRSVDPTQTEYQGMIEIVEEGDMKGEVYPFGIVGMANKGDCLQKGESVKFQLCVLGQNAQTMAYNITPLRRATVECVKDQFGFINYEVGDSKKLFFHVKEVQDGIELQAGDEVEFSVILNQRTGKCSACNVWRVCEGPKAVAAPRPDRLVNRLKNITLDDASAPRLMVLRQPRGPDNSMGFGAERKIRQAGVID

SEQ ID NO: 14589 - protein, 767 aa, Homo sapiens
MSFDPNLLHNNGHNGYPNGTSAALRETGVIEKLLTSYGFIQCSERQARLFFHCSQYNGNLQDLKVGDDVEFEVSSDRRTGKPIAVKLVKIKQEILPEERMNGQEVFYLTYTPEDVEGNVQLETGDKINFVIDNNKHTGAVSARNIMLLKKKQARCQGVVCAMKEAFGFIERGDVVKEIFFHYSEFKGDLETLQPGDDVEFTIKDRNGKEVATDVRLLPQGTVIFEDISIEHFEGTVTKVIPKVPSKNQNDPLPGRIKVDFVIPKELPFGDKDTKSKVTLLEGDHVRFNISTDRRDKLERATNIEVLSNTFQFTNEAREMGVIAAMRDGFGFIKCVDRDVRMFFHFSEILDGNQLHIADEVEFTVVPDMLSAQRNHAIRIKKLPKGTVSFHSHSDHRFLGTVEKEATFSNPKTTSPNKGKEKEAEDGIIAYDDCGVKLTIAFQAKDVEGSTSPQIGDKVEFSISDKQRPGQQVATCVRLLGRNSNSKRLLGYVATLKDNFGFIETANHDKEIFFHYSEFSGDVDSLELGDMVEYSLSKGKGNKVSAEKVNKTHSVNGITEEADPTIYSGKVIRPLRSVDPTQTEYQGMIEIVEEGDMKGEVYPFGIVGMANKGDCLQKGESVKFQLCVLGQNAQTMAYNITPLRRATVECVKDQFGFINYEVGDSKKLFFHVKEVQDGIELQAGDEVEFSVILNQRTGKCSACNVWRVCEGPKAVAAPRPDRLVNRLKNITLDDASAPRLMVLRQPRGPDNSMGFGAERKIRQAGVID

SEQ ID NO: 14590 - protein, 813 aa, Homo sapiens
MENVFTVSSDPHPSPAAPPSLSLPLSSSSTSSGTKKQKRTPTYQRSMSFDPNLLHNNGHNGYPNGTSAALRETGVIEKLLTSYGFIQCSERQARLFFHCSQYNGNLQDLKVGDDVEFEVSSDRRTGKPIAVKLVKIKQEILPEERMNGQEVFYLTYTPEDVEGNVQLETGDKINFVIDNNKHTGAVSARNIMLLKKKQARCQGVVCAMKEAFGFIERGDVVKEIFFHYSEFKGDLETLQPGDDVEFTIKDRNGKEVATDVRLLPQGTVIFEDISIEHFEGTVTKVIPKVPSKNQNDPLPGRIKVDFVIPKELPFGDKDTKSKVTLLEGDHVRFNISTDRRDKLERATNIEVLSNTFQFTNEAREMGVIAAMRDGFGFIKCVDRDVRMFFHFSEILDGNQLHIADEVEFTVVPDMLSAQRNHAIRIKKLPKGTVSFHSHSDHRFLGTVEKEATFSNPKTTSPNKGKEKEAEDGIIAYDDCGVKLTIAFQAKDVEGSTSPQIGDKVEFSISDKQRPGQQVATCVRLLGRNSNSKRLLGYVATLKDNFGFIETANHDKEIFFHYSEFSGDVDSLELGDMVEYSLSKGKGNKVSAEKVNKTHSVNGITEEADPTIYSGKVIRPLRSVDPTQTEYQGMIEIVEEGDMKGEVYPFGIVGMANKGDCLQKGESVKFQLCVLGQNAQTMAYNITPLRRATVECVKDQFGFINYEVGDSKKLFFHVKEVQDGIELQAGDEVEFSVILNQRTGKCSACNVWRVCEGPKAVAAPRPDRLVNRLKNITLDDASAPRLMVLRQPRGPDNSMGFGAERKIRQAGVID

SEQ ID NO: 14591 - protein, 844 aa, Homo sapiens
MENVFTVSSDPHPSPAAPPSLSLPLSSSSTSSGTKKQKRTPTYQRSMSFDPNLLHNNGHNGYPNGTSAALRETGVIEKLLTSYGFIQCSERQARLFFHCSQYNGNLQDLKVGDDVEFEVSSDRRTGKPIAVKLVKIKQEILPEERMNGQVVCAVPHNLESKSPAAPGQSPTGSVCYERNGEVFYLTYTPEDVEGNVQLETGDKINFVIDNNKHTGAVSARNIMLLKKKQARCQGVVCAMKEAFGFIERGDVVKEIFFHYSEFKGDLETLQPGDDVEFTIKDRNGKEVATDVRLLPQGTVIFEDISIEHFEGTVTKVIPKVPSKNQNDPLPGRIKVDFVIPKELPFGDKDTKSKVTLLEGDHVRFNISTDRRDKLERATNIEVLSNTFQFTNEAREMGVIAAMRDGFGFIKCVDRDVRMFFHFSEILDGNQLHIADEVEFTVVPDMLSAQRNHAIRIKKLPKGTVSFHSHSDHRFLGTVEKEATFSNPKTTSPNKGKEKEAEDGIIAYDDCGVKLTIAFQAKDVEGSTSPQIGDKVEFSISDKQRPGQQVATCVRLLGRNSNSKRLLGYVATLKDNFGFIETANHDKEIFFHYSEFSGDVDSLELGDMVEYSLSKGKGNKVSAEKVNKTHSVNGITEEADPTIYSGKVIRPLRSVDPTQTEYQGMIEIVEEGDMKGEVYPFGIVGMANKGDCLQKGESVKFQLCVLGQNAQTMAYNITPLRRATVECVKDQFGFINYEVGDSKKLFFHVKEVQDGIELQAGDEVEFSVILNQRTGKCSACNVWRVCEGPKAVAAPRPDRLVNRLKNITLDDASAPRLMVLRQPRGPDNSMGFGAERKIRQAGVID

SEQ ID NO: 14592 - protein, 503 aa, Homo sapiens
MDLIPNFAMETWVLVATSLVLLYIYGTHSHKLFKKLGIPGPTPLPFLGTILFYLRGLWNFDRECNEKYGEMWGLYEGQQPMLVIMDPDMIKTVLVKECYSVFTNQMPLGPMGFLKSALSFAEDEEWKRIRTLLSPAFTSVKFKEMVPIISQCGDMLVRSLRQEAENSKSINLKDFFGAYTMDVITGTLFGVNLDSLNNPQDPFLKNMKKLLKLDFLDPFLLLISLFPFLTPVFEALNIGLFPKDVTHFLKNSIERMKESRLKDKQKHRVDFFQQMIDSQNSKETKSHKALSDLELVAQSIIIIFAAYDTTSTTLPFIMYELATHPDVQQKLQEEIDAVLPNKAPVTYDALVQMEYLDMVVNETLRLFPVVSRVTRVCKKDIEINGVFIPKGLAVMVPIYALHHDPKYWTEPEKFCPERFSKKNKDSIDLYRYIPFGAGPRNCIGMRFALTNIKLAVIRALQNFSFKPCKETQIPLKLDNLPILQPEKPIVLKVHLRDGITSGP

SEQ ID NO: 14593 - protein, 504 aa, Homo sapiens
MDLIPNFAMETWVLVATSLVLLYIYGTHSHKLFKKLGIPGPTPLPFLGTILFYLRGLWNFDRECNEKYGEMWGLYEGQQPMLVIMDPDMIKTVLVKECYSVFTNQMPLGPMGFLKSALSFAEDEEWKRIRTLLSPAFTSVKFKEMVPIISQCGDMLVRSLRQEAENSKSINLKDFFGAYTMDVITGTLFGVNLDSLNNPQDPFLKNMKKLLKLDFLDPFLLLISLFPFLTPVFEALNIGLFPKDVTHFLKNSIERMKESRLKDKQKHRVDFFQQMIDSQNSKETKSHKALSDLELVAQSIIIIFAAYDTTSTTLPFIMYELATHPDVQQKLQEEIDAVLPNKAPVTYDALVQMEYLDMVVNETLRLFPVVSRVTRVCKKDIEINGVFIPKGLAVMVPIYALHHDPKYWTEPEKFCPESRFSKKNKDSIDLYRYIPFGAGPRNCIGMRFALTNIKLAVIRALQNFSFKPCKETQIPLKLDNLPILQPEKPIVLKVHLRDGITSGP

SEQ ID NO: 14594 - protein, 420 aa, Homo sapiens
MDLIPNFAMETWVLVATSLVLLYIYGTHSHKLFKKLGIPGPTPLPFLGTILFYLRGLWNFDRECNEKYGEMWGLYEGQQPMLVIMDPDMIKTVLVKECYSVFTNQMPLGPMGFLKSALSFAEDEEWKRIRTLLSPAFTSVKFKEMVPIISQCGDMLVRSLRQEAENSKSINLKDFFGAYTMDVITGTLFGVNLDSLNNPQDPFLKNMKKLLKLDFLDPFLLLISLFPFLTPVFEALNIGLFPKDVTHFLKNSIERMKESRLKDKQKHRVDFFQQMIDSQNSKETKSHKALSDLELVAQSIIIIFAAYDTTSTTLPFIMYELATHPDVQQKLQEEIDAVLPNKAPVTYDALVQMEYLDMVVNETLRLFPVVSRVTRVCKKDIEINGVFIPKGLAVMVPIYALHHDPKYWTEPEKFCPERSH

SEQ ID NO: 14595 - protein, 250 aa, Homo sapiens
MDLIPNFAMETWVLVATSLVLLYIYGTHSHKLFKKLGIPGPTPLPFLGTILFYLRGLWNFDRECNEKYGEMWGLYEGQQPMLVIMDPDMIKTVLVKECYSVFTNQMPLGPMGFLKSALSFAEDEEWKRIRTLLSPAFTSVKFKEMVPIISQCGDMLVRSLRQEAENSKSINLKDFFGAYTMDVITGTLFGVNLDSLNNPQDPFLKNMKKLLKLDFLDPFLLLIYRVSLCCLGRSAWCDLGSLKPPPPGFE

SEQ ID NO: 14596 - protein, 393 aa, Homo sapiens
MDLIPNFAMETWVLVATSLVLLYIYGTHSHKLFKKLGIPGPTPLPFLGTILFYLRRSLNKIPSWAWWLTPVIPALWEAEAGGSPKVRSSRPALPTWVFGILTENVMKNTEKCGALFPFLTPVFEALNIGLFPKDVTHFLKNSIERMKESRLKDKQKHRVDFFQQMIDSQNSKETKSHKALSDLELVAQSIIIIFAAYDTTSTTLPFIMYELATHPDVQQKLQEEIDAVLPNKAPVTYDALVQMEYLDMVVNETLRLFPVVSRVTRVCKKDIEINGVFIPKGLAVMVPIYALHHDPKYWTEPEKFCPERFSKKNKDSIDLYRYIPFGAGPRNCIGMRFALTNIKLAVIRALQNFSFKPCKETQIPLKLDNLPILQPEKPIVLKVHLRDGITSGP

SEQ ID NO: 14597 - protein, 112 aa, Homo sapiens
MEKILILLLVALSVAYAAPGPRGIIINLENGELCMNSAQCKSNCCQHSSALGLARCTSMASENSECSVKTLYGIYYKCPCERGLTCEGDKTIVGSITNTNFGICHDAGRSKQ

SEQ ID NO: 14598 - protein, 1026 aa, Homo sapiens
MVCRPVFPCRRRFCPRPFLVGLVVAICLFYQTLTLRGSRKLTAAAPGAVPHTSTETQASRCKKGFSQDKQCFLLSGNAQETRKVKESMETHFGSHGRRAILYRPPFYSKTELQLHQHILTQHGYTVVIAEERLNAGLGPGLLEQGDLGSWDLLICLSSKKAEGTPCISKEVMCQLGLHQKANRLPEIQQPLCRKEGLCQIVRRFPELQLPVSPSVCLDQGMQLKPSTSSHLLKTVKPRVWKPGDWSREQLNETTVLAPHETIFRAEDLSVILKAYVLVTSLTPLRAFIHSTGTVWNPPKKKRFTVKLQTFFETFLRASSPQQAFDIMKEAIGKLLLAAEVFSETSTLGPKTFHRCRFCFQLLTFDIGYGSFMYPVVLQVHEHLNFQDYDNMDFEDQNTEEFLLNDTFNFLFPNESSLSIFSEIFQRLYRSDVFKGENYQKELNQCLSLEEINSIMTFIKELGSLGQFQLLFPSTTPGIQSLMHEFYDVANPVGNPGSVLTQYWSLLNVFEQFQFMNKKTQPHPLEWNSFTEDKNIEKPQVPFDAIENKKAAVPQIKNENKEIHCSDDENTPCHIKQIFTHPHLELNPDFHPKIKDYYCEVPFDVVTVTIGVETPKCLCKVHLYEQAGPSFASYPLGLGMNKISIFVVDESPAHGETLITYKLTIYREDRPSLPLFEAFTACGFVQDCGLLIHPEETCGLQPISSDYIEAILQSELKRCPSGDMKGQWIVPCLSCSDNRTCDWREITWQPHNCQYGVLTKPQLQQCLGGRKILFIGDSTNRGIMYYLIERLNETLQEWQKVHGTKFYHNVNGGKTLISYSYYPQFWISPSLRPTFENALEHLLQRSRPLENTGQTVLVVGGVQWLNSNHLQIIHKVLKRENLLNILVIIKTLGIGFHLPVDGVHFLTQSEVQNLWKENLIILDTAKKHGYEVVDTFTITMGRYKEFLQGKCGCHFHEVVKSKLSKEYNFIKMKRSRNHIMGRYFSNQSKLQQGTVTNFRSPYHVRGPINQVCSEILLSRMCANKRTM

SEQ ID NO: 14599 - protein, 783 aa, Homo sapiens
MVCRPVFPCRRRFCPRPFLVGLVVAICLFYQTLTLRGSRKLTAAAPGAVPHTSTETQASRCKKGFSQDKQCFLLSGNAQETRKVKESMETHFGSHGRRAILYRPPFYSKTELQLHQHILTQHGYTVVIAEERLNAGLGPGLLEQGDLGSWDLLICLSSKKAEGTPCISKEVMCQLGLHQKANRLPEIQQPLCRKEGLCQIVRRFPELQLPVSPSVCLDQGMQLKPSTSSHLLKTVKPRVWKPGDWSREQLNETTVLAPHETIFRAEDLSVILKAYVLVTSLTPLRAFIHSTGTVWNPPKKKRFTVKLQTFFETFLRASSPQQAFDIMKEAIGKLLLAAEVFSETSTLGPKTFHRCRFCFQLLTFDIGYGSFMYPVVLQVHEHLNFQDYDNMDFEDQNTEEFLLNDTFNFLFPNESSLSIFSEIFQRLYRSDVFKGENYQKELNQCLSLEEINSIMTFIKELGSLGQFQLLFPSTTPGIQSLMHEFYDVANPVGNPGSVLTQYWSLLNVFEQFQFMNKKTQPHPLEWNSFTEDKNIEKPQVPFDAIENKKAAVPQIKNENKEIHCSDDENTPCHIKQIFTHPHLELNPDFHPKIKDYYCEVPFDVVTVTIGVETPKCLCKVHLYEQAGPSFASYPLGLGMNKISIFVVDESPAHGETLITYKLTIYREDRPSLPLFEAFTACGFVQDCGLLIHPEETCGLQPISSDYIEAILQSELKRCPSGDMKGQWIVPCLSCSDNRTCDWREITWQPHNCQYGVLTKPQLQQCLGGRKLGVDVQRVPRSRN

SEQ ID NO: 14600 - protein, 395 aa, Homo sapiens
MDLGIPDLLDAWLEPPEDIFSTGSVLELGLHCPPPEVPVTRLQEQGLQGWKSGGDRGCGLQESEPEDFLKLFIDPNEVYCSEASPGSDSGISEDPCHPDSPPAPRATSSPMLYEVVYEAGALERMQGETGPNVGLISIQLDQWSPAFMVPDSCMVSELPFDAHAHILPRAGTVAPVPCTTLLPCQTLFLTDEEKRLLGQEGVSLPSHLPLTKAEERVLKKVRRKIRNKQSAQDSRRRKKEYIDGLESRVAACSAQNQELQKKVQELERHNISLVAQLRQLQTLIAQTSNKAAQTSTCVLILLFSLALIILPSFSPFQSRPEAGSEDYQPHGVTSRNILTHKDVTENLETQVVESRLREPPGAKDANGSTRTLLEKMGGKPRPSGRIRSVLHADEM

SEQ ID NO: 14601 - protein, 375 aa, Homo sapiens
MDLGIPDLLDAWLEPPEDIFSTGSVLELGLHCPPPEVPGLQESEPEDFLKLFIDPNEVYCSEASPGSDSGISEDPCHPDSPPAPRATSSPMLYEVVYEAGALERMQGETGPNVGLISIQLDQWSPAFMVPDSCMVSELPFDAHAHILPRAGTVAPVPCTTLLPCQTLFLTDEEKRLLGQEGVSLPSHLPLTKAEERVLKKVRRKIRNKQSAQDSRRRKKEYIDGLESRVAACSAQNQELQKKVQELERHNISLVAQLRQLQTLIAQTSNKAAQTSTCVLILLFSLALIILPSFSPFQSRPEAGSEDYQPHGVTSRNILTHKDVTENLETQVVESRLREPPGAKDANGSTRTLLEKMGGKPRPSGRIRSVLHADEM

SEQ ID NO: 14602 - protein, 256 aa, Homo sapiens
MQPAKEVTKASDGSLLGDLGHTPLSKKEGIKWQRPRLSRQALMRCCLVKWILSSTAPQGSDSSDSELELSTVRHQPEGLDQLQAQTKFTKKELQSLYRGFKNECPTGLVDEDTFKLIYAQFFPQGDATTYAHFLFNAFDADGNGAIHFEDFVVGLSILLRGTVHEKLKWAFNLYDINKDGYITKEEMLAIMKSIYDMMGRHTYPILREDAPAEHVERFFEKMDRNQDGVVTIEEFLEACQKDENIMSSMQLFENVI

SEQ ID NO: 14603 - protein, 234 aa, Homo sapiens
MQPAKEVTKASDGSLLGDLGHTPLSKKEGIKWQRPRLSRQALMRCCLVKWILSSTAPQGSDSSDSELELSTVRHQPEGLDQLQAQTKFTKKELQSLYRGFKNGDATTYAHFLFNAFDADGNGAIHFEDFVVGLSILLRGTVHEKLKWAFNLYDINKDGYITKEEMLAIMKSIYDMMGRHTYPILREDAPAEHVERFFEKMDRNQDGVVTIEEFLEACQKDENIMSSMQLFENVI

SEQ ID NO: 14604 - protein, 230 aa, Homo sapiens
MGIQGMELCAMAVVVLLFIAVLKQFGILEPISMEDSSDSELELSTVRHQPEGLDQLQAQTKFTKKELQSLYRGFKNECPTGLVDEDTFKLIYAQFFPQGDATTYAHFLFNAFDADGNGAIHFEDFVVGLSILLRGTVHEKLKWAFNLYDINKDGYITKEEMLAIMKSIYDMMGRHTYPILREDAPAEHVERFFEKMDRNQDGVVTIEEFLEACQKDENIMSSMQLFENVI

SEQ ID NO: 14605 - protein, 211 aa, Homo sapiens
MAEQHGAPEQAAAGKSHGDLGGSYKVILYELENFQGKRCELSAECPSLTDSLLEKVGSIQVESGPWLAFESRAFRGEQFVLEKGDYPRWDAWSNSRDSDSLLSLRPLNIDSPHHKLHLFENPAFSGRKMEIVDDDVPSLWAHGFQDRVASVRAINGTWVGYEFPGYRGRQYVFERGEYRHWNEWDASQPQLQSVRRIRDQKWHKRGRFPSS

SEQ ID NO: 14606 - protein, 1626 aa, Homo sapiens
MAGLRGNAVAGLLWMLLLWSGGGGCQAQRAGCKSVHYDLVFLLDTSSSVGKEDFEKVRQWVANLVDTFEVGPDRTRVGVVRYSDRPTTAFELGLFGSQEEVKAAARRLAYHGGNTNTGDALRYITARSFSPHAGGRPRDRAYKQVAILLTDGRSQDLVLDAAAAAHRAGIRIFAVGVGEALKEELEEIASEPKSAHVFHVSDFNAIDKIRGKLRRRLCENVLCPSVRVEGDRFKHTNGGTKEITGFDLMDLFSVKEILGKRENGAQSSYVRMGSFPVVQSTEDVFPQGLPDEYAFVTTFRFRKTSRKEDWYIWQVIDQYSIPQVSIRLDGENKAVEYNAVGAMKDAVRVVFRGSRVNDLFDRDWHKMALSIQAQNVSLHIDCALVQTLPIEERENIDIQGKTVIGKRLYDSVPIDFDLQRIVIYCDSRHAELETCCDIPSGPCQVTVVTEPPPPPPPQRPPTPGSEQIGFLKTINCSCPAGEKGEMGVAGPMGLPGPKGDIGAIGPVGAPGPKGEKGDVGIGPFGQGEKGEKGSLGLPGPPGRDGSKGMRGEPGELGEPGLPGEVGMRGPQGPPGLPGPPGRVGAPGLQGERGEKGTRGEKGERGLDGFPGKPGDTGQQGRPGPSGVAGPQGEKGDVGPAGPPGVPGSVVQQEGLKGEQGAPGPRGHQGAPGPPGARGPIGPEGRDGPPGLQGLRGKKGDMGPPGIPGLLGLQGPPGPPGVPGPPGPGGSPGLPGEIGFPGKPGPPGPTGPPGKDGPNGPPGPPGTKGEPGERGEDGLPGKPGLRGEIGEQGLAGRPGEKGEAGLPGAPGFPGVRGEKGDQGEKGELGLPGLKGDRGEKGEAGPAGPPGLPGTTSLFTPHPRMPGEQGPKGEKGDPGLPGEPGLQGRPGELGPQGPTGPPGAKGQEGAHGAPGAAGNPGAPGHVGAPGPSGPPGSVGAPGLRGTPGKDGERGEKGAAGEEGSPGPVGPRGDPGAPGLPGPPGKGKDGEPGLRGSPGLPGPLGTKAACGKVRGSENCALGGQCVKGDRGAPGIPGSPGSRGDPGIGVAGPPGPSGPPGDKGSPGSRGLPGFPGPQGPAGRDGAPGNPGERGPPGKPGLSSLLSPGDINLLAKDVCNDCPPGPPGLPGLPGFKGDKGVPGKPGREGTEGKKGEAGPPGLPGPPGIAGPQGSQGERGADGEVGQKGDQGHPGVPGFMGPPGNPGPPGADGIAGAAGPPGIQGSPGKEGPPGPQGPSGLPGIPGEEGKEGRDGKPGPPGEPGKAGEPGLPGPEGARGPPGFKGHTGDSGAPGPRGESGAMGLPGQEGLPGKDGDTGPTGPQGPQGPRGPPGKNGSPGSPGEPGPSGTPGQKGSKGENGSPGLPGFLGPRGPPGEPGEKGVPGKEGVPGKPGEPGFKGERGDPGIKGDKGPPGGKGQPGDPGIPGHKGHTGLMGPQGLPGENGPVGPPGPPGQPGFPGLRGESPSMETLRRLIQEELGKQLETRLAYLLAQMPPAYMKSSQGRPGPPGPPGKDGLPGRAGPMGEPGRPGQGGLEGPSGPIGPKGERGAKGDPGAPGVGLRGEMGPPGIPGQPGEPGYAKDGLPGIPGPQGETGPAGHPGLPGPPGPPGQCDPSQCAYFASLAARPGNVKGP

SEQ ID NO: 14607 - protein, 1606 aa, Homo sapiens
MAGLRGNAVAGLLWMLLLWSGGGGCQAQRAGCKSVHYDLVFLLDTSSSVGKEDFEKVRQWVANLVDTFEVGPDRTRVGVVRYSDRPTTAFELGLFGSQEEVKAAARRLAYHGGNTNTGDALRYITARSFSPHAGGRPRDRAYKQVAILLTDGRSQDLVLDAAAAAHRAGIRIFAVGVGEALKEELEEIASEPKSAHVFHVSDFNAIDKIRGKLRRRLCENVLCPSVRVEGDRFKHTNGGTKEITGFDLMDLFSVKEILGKRENGAQSSYVRMGSFPVVQSTEDVFPQGLPDEYAFVTTFRFRKTSRKEDWYIWQVIDQYSIPQVSIRLDGENKAVEYNAVGAMKDAVRVVFRGSRVNDLFDRDWHKMALSIQAQNVSLHIDCALVQTLPIEERENIDIQGKTVIGKRLYDSVPIDFDLQRIVIYCDSRHAELETCCDIPSGPCQVTVVTEPPPPPPPQRPPTPGSEQIGFLKTINCSCPAGEKGEMGVAGPMGLPGPKGDIGAIGPVGAPGPKGEKGDVGIGPFGQGEKGEKGSLGLPGPPGRDGSKGMRGEPGELGEPGLPGEVGMRGPQGPPGLPGPPGRVGAPGLQGERGEKGTRGEKGERGLDGFPGKPGDTGQQGRPGPSGVAGPQGEKGDVGPAGPPGVPGSVVQQEGLKGEQGAPGPRGHQGAPGPPGARGPIGPEGRDGPPGLQGLRGKKGDMGPPGIPGLLGLQGPPGPPGVPGPPGPGGSPGLPGEIGFPGKPGPPGPTGPPGKDGPNGPPGPPGTKGEPGERGEDGLPGKPGLRGEIGEQGLAGRPGEKGEAGLPGAPGFPGVRGEKGDQGEKGELGLPGLKGDRGEKGEAGPAGPPGLPGTTSLFTPHPRMPGEQGPKGEKGDPGLPGEPGLQGRPGELGPQGPTGPPGAKGQEGAHGAPGAAGNPGAPGHVGAPGPSGPPGSVGAPGLRGTPGKDGERGEKGAAGEEGSPGPVGPRGDPGAPGLPGPPGKGKDGEPGLRGSPGLPGPLGTKGDRGAPGIPGSPGSRGDPGIGVAGPPGPSGPPGDKGSPGSRGLPGFPGPQGPAGRDGAPGNPGERGPPGKPGLSSLLSPGDINLLAKDVCNDCPPGPPGLPGLPGFKGDKGVPGKPGREGTEGKKGEAGPPGLPGPPGIAGPQGSQGERGADGEVGQKGDQGHPGVPGFMGPPGNPGPPGADGIAGAAGPPGIQGSPGKEGPPGPQGPSGLPGIPGEEGKEGRDGKPGPPGEPGKAGEPGLPGPEGARGPPGFKGHTGDSGAPGPRGESGAMGLPGQEGLPGKDGDTGPTGPQGPQGPRGPPGKNGSPGSPGEPGPSGTPGQKGSKGENGSPGLPGFLGPRGPPGEPGEKGVPGKEGVPGKPGEPGFKGERGDPGIKGDKGPPGGKGQPGDPGIPGHKGHTGLMGPQGLPGENGPVGPPGPPGQPGFPGLRGESPSMETLRRLIQEELGKQLETRLAYLLAQMPPAYMKSSQGRPGPPGPPGKDGLPGRAGPMGEPGRPGQGGLEGPSGPIGPKGERGAKGDPGAPGVGLRGEMGPPGIPGQPGEPGYAKDGLPGIPGPQGETGPAGHPGLPGPPGPPGQCDPSQCAYFASLAARPGNVKGP

SEQ ID NO: 14608 - protein, 1319 aa, Homo sapiens
MAGLRGNAVAGLLWMLLLWSGGGGCQAQRAGCKSVHYDLVFLLDTSSSVGKEDFEKVRQWVANLVDTFEVGPDRTRVGVVRYSDRPTTAFELGLFGSQEEVKAAARRLAYHGGNTNTGDALRYITARSFSPHAGGRPRDRAYKQVAILLTDGRSQDLVLDAAAAAHRAGIRIFAVGVGEALKEELEEIASEPKSAHVFHVSDFNAIDKIRGKLRRRLCENVLCPSVRVEGDRFKHTNGGTKEITGFDLMDLFSVKEILGKRENGAQSSYVRMGSFPVVQSTEDVFPQGLPDEYAFVTTFRFRKTSRKEDWYIWQVIDQYSIPQVSIRLDGENKAVEYNAVAGPQGEKGDVGPAGPPGVPGSVVQQEGLKGEQGAPGPRGHQGAPGPPGARGPIGPEGRDGPPGLQGLRGKKGDMGPPGIPGLLGLQGPPGPPGVPGPPGPGGSPGLPGEIGFPGKPGPPGPTGPPGKDGPNGPPGPPGTKGEPGERGEDGLPGKPGLRGEIGEQGLAGRPGEKGEAGLPGAPGFPGVRGEKGDQGEKGELGLPGLKGDRGEKGEAGPAGPPGLPGTTSLFTPHPRMPGEQGPKGEKGDPGLPGEPGLQGRPGELGPQGPTGPPGAKGQEGAHGAPGAAGNPGAPGHVGAPGPSGPPGSVGAPGLRGTPGKDGERGEKGAAGEEGSPGPVGPRGDPGAPGLPGPPGKGKDGEPGLRGSPGLPGPLGTKGDRGAPGIPGSPGSRGDPGIGVAGPPGPSGPPGDKGSPGSRGLPGFPGPQGPAGRDGAPGNPGERGPPGKPGLSSLLSPGDINLLAKDVCNDCPPGPPGLPGLPGFKGDKGVPGKPGREGTEGKKGEAGPPGLPGPPGIAGPQGSQGERGADGEVGQKGDQGHPGVPGFMGPPGNPGPPGADGIAGAAGPPGIQGSPGKEGPPGPQGPSGLPGIPGEEGKEGRDGKPGPPGEPGKAGEPGLPGPEGARGPPGFKGHTGDSGAPGPRGESGAMGLPGQEGLPGKDGDTGPTGPQGPQGPRGPPGKNGSPGSPGEPGPSGTPGQKGSKGENGSPGLPGFLGPRGPPGEPGEKGVPGKEGVPGKPGEPGFKGERGDPGIKGDKGPPGGKGQPGDPGIPGHKGHTGLMGPQGLPGENGPVGPPGPPGQPGFPGLRGESPSMETLRRLIQEELGKQLETRLAYLLAQMPPAYMKSSQGRPGPPGPPGKDGLPGRAGPMGEPGRPGQGGLEGPSGPIGPKGERGAKGDPGAPGVGLRGEMGPPGIPGQPGEPGYAKDGLPGIPGPQGETGPAGHPGLPGPPGPPGQCDPSQCAYFASLAARPGNVKGP

SEQ ID NO: 14609 - protein, 2970 aa, Homo sapiens
MSSGRRRGSAPWHSFSRFFAPRSPSRDKEEEEEERPGTSPPPAPGRSAASVENEPMSTSQKKENVLSSEAVKIRQSEDKRNHAEKPVTLPVQEDPKKAYDLSSSTSDTKIGESDRQPKESFFQFLGNLFNISGKSSLGEAKQSSFKDDQDKTEKDLQNPSDHHEDGIKREREIFSGSLRTQTHPTEEQDSNSSELSDAFSLDTTQDSDQETTNLLKQIDGKPEKPSVTYATYRGPRHIGKYLKQQTGLATVNTLDRENESSDSSTNRHIDPGSEIEAGVLPLLLSASTDSSMKGNLLEGPLEDSDCSKTSFNKENSLTNNPELQNIASSNNLLNKNAWGSIERNRSSPSSVTNSSYDGESDSQHHLSCEPVSQTNRNLVCSALLTGSNHRKVPCSPDFQRVTTTENTIKENSTVMSNRTLVQREELVEPQGPAISDFSCSKSDGSDTTEQESTNLPSPNKSIRHEHLQLPESECSDKQTIDSSSKQAATHTNIIALQRHAVTDTEFVNEGKRLSAQDSQKNVAVREIRRETESASAGESIASSHVKAPEDKIESLPKDTDQYFETKAKKLDFRSHDKIPHIRMNKKDLASLNYISESAVVASLGNENAPELKFELNRSHISETPLDSESPQQAEVSPDAKTSLSLDCKKLNFSISPPTFVSGVGMLSKLDIPDLMNEGSPVPIETGNVNIVGISYQPRKCKEENVKNHVEAAGRKSPPPSFCLEYTSAIFEFKEVLSNSEKCQVLPGSEASGPHLTGLELLSFDSGNLSKDCSSILSQDPNRVELVSSNTKANMSIIEKSDSLSLEAKTANIVSKAEIDGQNNVLVESHSGRGKTISLSKVSLSKVEPRNISQDKMSSFPLKITHVPEKPILSELTFLEVEQGKRFQSINHNEIGEKCSDAGLKENCQAELSPAASKYEDKPEPEVDALGSPPALLKSNISWILPPIHDEKISRQMAQNCEAHTCVFHQSLDICGTKKISGHSEMAELSLTNISPKFQETGSMKVNSPFLDSDSSLEKNSSASEDSSFLKVPSVLKLEKKSSSYRKKENIHFLNGGIDSVSSSSSYPEEVSMIVNSHKPQNNLDSIQVTKDLTHEGTSVTNLLYPTTSYLEFETSVSIGTEVTPFQEHFGIYTGKISIDFPTAAQFDNLVEAETGAVAGPAASVNSSGQQCSEASAEHIEARRRAHDQLLDLKSSLLKKADTLIGEIFNSVREELKFKHTVSTCQEHIAIEGIMNLGTLKEDISEKNPSEVTLTEIQQTEGLEEQGMENMSEVKEKPCVSPTVGEKNLLVDPNSMNVSCLLEDKARELVNEIIYVAQEKLRNDTFEDTEDTWDSELQANTSKILNSDSVKPHDVVREFLVSEQPVNQSTQISENKVLNEFFSLSNLASGTESIKGGEIVLYQKSLFSGNGSGLSDSINLQESDTVLLAEDMSHKRLDDRVKTHLFRSEDCNETMEIENVDNNKTETEDRRTLVLNFKWPPLVNDDIHAPGTSKSSLSDSLVCISEKNLPGHSKNTPLAMSDVGKVHKKDNEINIGKIELIPSMLETGKTNKKDAELNILKYEAVPPMIEMGRIHKMDAELNVTKTEPKANVFKMGEVYQMDAESCIEKTEGSAVILGMEKAYKMKDTEGDIGKIEVIPMMPEVKNIHQKDAEGDIVKTEMTPVTVDMENIYQTHAEGDIGKTGTIALSEVENIHQKGGEGISEKAEVIPVTLAMENTYQKDAEGDIGKAEVMPVRLEMENTYPKDTERDGGKTEVMPLALEVVNTYQKNAKGFTGNTEGSVLKMEATYRKTAEEVIKNTEIVPCVLKVKEAHETAPAPLEMEKACKRDVKETIGATVSTPSVIEMEKISPEDRGENIGKHKVLPAVVDIEKIHGTGLELTTKQGEAMLPAFESKTPQEYAEGSVEETKEEPTEIKEGLIAHENRLPTYFRGYESPTLSKDYEGYPAPAMPDFQPGDTTVRLDKRMSLTAIYDKRRETDYSDKGYNLAFVSQDEQENSSFTILYEEPLQEEDKYASAEARQTQSVLFHDTSADSMPVLACERSESRTDLVHHFEKGTKLGETFDSDSSEMFLSVEAKRYKIYPLALSPIYEDDSSQEDILSSEVSPGHHGPRKSRDSENQSSSVLSLLQSVSERLKMNFDEDDREAADEEEEEEEAAVLHKGDLRAGSGERVTFQLPDPSITFYPDDQESVGISKNSYVMPNEPTTSNLQVGLWPEKTSFLQKSDLTSKLHSSLKSAYHQYLQTSQSHSSEKGARFGGIFQEPVSKYFRVQDSPGRLSPFIENVDKQTLRCNPRPGKMVIYDLHESTYKQEVYCNIPDATSWSFPNGVLIKVVRGCWILYEKPHFRGQKCVLEEGEKVLNRDWILQNRRHPQRNFILGSLKRVLKDCSIPEIELFPQSDPACCPVYIQRAVPNLEELNISKSVSFTVKSGVWLAYPDINFKGQATVLEEDHGLFEISTAEMKSLHPLQMGGLKVEMPMNLKVIIYEKPHFHGQAKEFSEHIDSVPNFLKNNGDFHRIGSIRVIGGVWVAYEKEHFKGQQFLLEEGDFEDSNACGALSSPILSFRYLQANFIESSVTLFESDLESGKFIDITNQEISDLEEIGFGSKTRSIHVKSGVWVAYQQKFFCGEQYILEKGKYKCFFDWGGSNNIIMSIRPIQLEPLGINEPPHLLKAFSKPGFQGECIDFTEETSDLTSLMPCSFKVLRGCWLLYYQEDMFVNHCVLEEGLYADLTSCGCPASKVKSLKPIDYVFEEPSISLFALEHCEGRELHLEEAVNSVLNKDLHFYTQSVWVKSGLWIAYEGSNFLGRQILLRPNEIPNWTAFSRWKTIGSLRPMKQPAVYIRIKNRAQGEYLTVTGSLADTRATSVCISPYSGKNTQIWYYCRGLFKSKASDTCLDVIGGRDTPGAKVALWTEHGQFRQKWRLNKNGTISSYLSDQLVLDVKGGNYCDKTHVIVNQPLEGEETQKWDIEIL

SEQ ID NO: 14610 - protein, 1022 aa, Homo sapiens
MPDFQPGDTTVRLDKRMSLTAIYDKRRETDYSDKGYNLAFVSQDEQENSSFTILYEEPLQEEDKYASAEARQTQSVLFHDTSADSMPVLACERSESRTDLVHHFEKGTKLGETFDSDSSEMFLSVEAKRYKIYPLALSPIYEDDSSQEDILSSEVSPGHHGPRKSRDSENQSSSVLSLLQSVSERLKMNFDEDDREAADEEEEEEEAAVLHKGDLRAGSGERVTFQLPDPSITFYPDDQESVGISKNSYVMPNEPTTSNLQVGLWPEKTSFLQKSDLTSKLHSSLKSAYHQYLQTSQSHSSEKGARFGGIFQEPVSKYFRVQDSPGRLSPFIENVDKQTLRCNPRPGKMVIYDLHESTYKQEVYCNIPDATSWSFPNGVLIKVVRGCWILYEKPHFRGQKCVLEEGEKVLNRDWILQNRRHPQRNFILGSLKRVLKDCSIPEIELFPQSDPACCPVYIQRAVPNLEELNISKSVSFTVKSGVWLAYPDINFKGQATVLEEDHGLFEISTAEMKSLHPLQMGGLKVEMPMNLKVIIYEKPHFHGQAKEFSEHIDSVPNFLKNNGDFHRIGSIRVIGGVWVAYEKEHFKGQQFLLEEGDFEDSNACGALSSPILSFRYLQANFIESSVTLFESDLESGKFIDITNQEISDLEEIGFGSKTRSIHVKSGVWVAYQQKFFCGEQYILEKGKYKCFFDWGGSNNIIMSIRPIQLEPLGINEPPHLLKAFSKPGFQGECIDFTEETSDLTSLMPCSFKVLRGCWLLYYQEDMFVNHCVLEEGLYADLTSCGCPASKVKSLKPIDYVFEEPSISLFALEHCEGRELHLEEAVNSVLNKDLHFYTQSVWVKSGLWIAYEGSNFLGRQILLRPNEIPNWTAFSRWKTIGSLRPMKQPAVYIRIKNRAQGEYLTVTGSLADTRATSVCISPYSGKNTQIWYYCRGLFKSKASDTCLDVIGGRDTPGAKVALWTEHGQFRQKWRLNKNGTISSYLSDQLVLDVKGGNYCDKTHVIVNQPLEGEETQKWDIEIL

SEQ ID NO: 14611 - protein, 228 aa, Homo sapiens
MNKKKVFEEPSISLFALEHCEGRELHLEEAVNSVLNKDLHFYTQSVWVKSGLWIAYEGSNFLGRQILLRPNEIPNWTAFSRWKTIGSLRPMKQPAVYIRIKNRAQGEYLTVTGSLADTRATSVCISPYSGKNTQIWYYCRGLFKSKASDTCLDVIGGRDTPGAKVALWTEHGQFRQKWRLNKNGTISSYLSDQLVLDVKGGNYCDKTHVIVNQPLEGEETQKWDIEIL

SEQ ID NO: 14612 - protein, 503 aa, Homo sapiens
MALIPDLAMETWLLLAVSLVLLYLYGTHSHGLFKKLGIPGPTPLPFLGNILSYHKGFCMFDMECHKKYGKVWGFYDGQQPVLAITDPDMIKTVLVKECYSVFTNRRPFGPVGFMKSAISIAEDEEWKRLRSLLSPTFTSGKLKEMVPIIAQYGDVLVRNLRREAETGKPVTLKDVFGAYSMDVITSTSFGVNIDSLNNPQDPFVENTKKLLRFDFLDPFFLSITVFPFLIPILEVLNICVFPREVTNFLRKSVKRMKESRLEDTQKHRVDFLQLMIDSQNSKETESHKALSDLELVAQSIIFIFAGYETTSSVLSFIMYELATHPDVQQKLQEEIDAVLPNKAPPTYDTVLQMEYLDMVVNETLRLFPIAMRLERVCKKDVEINGMFIPKGVVVMIPSYALHRDPKYWTEPEKFLPERFSKKNKDNIDPYIYTPFGSGPRNCIGMRFALMNMKLALIRVLQNFSFKPCKETQIPLKLSLGGLLQPEKPVVLKVESRDGTVSGA

SEQ ID NO: 14613 - protein, 120 aa, Homo sapiens
MDDSKVVGGKVKKPGKRGRKPAKIDLKAKLERSRQSARECRARKKLRYQYLEELVSSRERAICALREELEMYKQWCMAMDQGKIPSEIKALLTGEEQNKSQQNSSRHTKAGKTDANSNSW

SEQ ID NO: 14614 - protein, 502 aa, Homo sapiens
MDLIPNLAVETWLLLAVSLVLLYLYGTRTHGLFKRLGIPGPTPLPLLGNVLSYRQGLWKFDTECYKKYGKMWGTYEGQLPVLAITDPDVIRTVLVKECYSVFTNRRSLGPVGFMKSAISLAEDEEWKRIRSLLSPTFTSGKLKEMFPIIAQYGDVLVRNLRREAEKGKPVTLKDIFGAYSMDVITGTSFGVNIDSLNNPQDPFVESTKKFLKFGFLDPLFLSIILFPFLTPVFEALNVSLFPKDTINFLSKSVNRMKKSRLNDKQKHRLDFLQLMIDSQNSKETESHKALSDLELAAQSIIFIFAGYETTSSVLSFTLYELATHPDVQQKLQKEIDAVLPNKAPPTYDAVVQMEYLDMVVNETLRLFPVAIRLERTCKKDVEINGVFIPKGSMVVIPTYALHHDPKYWTEPEEFRPERFSKKKDSIDPYIYTPFGTGPRNCIGMRFALMNMKLALIRVLQNFSFKPCKETQIPLKLDTQGLLQPEKPIVLKVDSRDGTLSGE

SEQ ID NO: 14615 - protein, 140 aa, Homo sapiens
MDLIPNLAVETWLLLAVSLVLLYLYGTRTHGLFKRLGIPGPTPLPLLGNVLSYRQGLWKFDTECYKKYGKMWGTYEGQLPVLAITDPDVIRTVLVKECYSVFTNRRICATTSTIKMQTHSVTMWLPPAVLQSQHGVCLFL

SEQ ID NO: 14616 - protein, 503 aa, Homo sapiens
MDLIPNLAVETWLLLAVSLILLYLYGTRTHGLFKKLGIPGPTPLPFLGNALSFRKGYWTFDMECYKKYRKVWGIYDCQQPMLAITDPDMIKTVLVKECYSVFTNRRPFGPVGFMKNAISIAEDEEWKRIRSLLSPTFTSGKLKEMVPIIAQYGDVLVRNLRREAETGKPVTLKHVFGAYSMDVITSTSFGVSIDSLNNPQDPFVENTKKLLRFNPLDPFVLSIKVFPFLTPILEALNITVFPRKVISFLTKSVKQIKEGRLKETQKHRVDFLQLMIDSQNSKDSETHKALSDLELMAQSIIFIFAGYETTSSVLSFIIYELATHPDVQQKVQKEIDTVLPNKAPPTYDTVLQLEYLDMVVNETLRLFPVAMRLERVCKKDVEINGMFIPKGVVVMIPSYVLHHDPKYWTEPEKFLPERFSKKNKDNIDPYIYTPFGSGPRNCIGMRFALVNMKLALVRVLQNFSFKPCKETQIPLKLRFGGLLLTEKPIVLKAESRDETVSGA

SEQ ID NO: 14617 - protein, 535 aa, Homo sapiens
MDLIPNLAVETWLLLAVSLILLYLYGTRTHGLFKKLGIPGPTPLPFLGNALSFRKGYWTFDMECYKKYRKVWGIYDCQQPMLAITDPDMIKTVLVKECYSVFTNRRPFGPVGFMKNAISIAEDEEWKRIRSLLSPTFTSGKLKEMVPIIAQYGDVLVRNLRREAETGKPVTLKHVFGAYSMDVITSTSFGVSIDSLNNPQDPFVENTKKLLRFNPLDPFVLSIKVFPFLTPILEALNITVFPRKVISFLTKSVKQIKEGRLKETQKHRVDFLQLMIDSQNSKDSETHKALSDLELMAQSIIFIFAGYETTSSVLSFIIYELATHPDVQQKVQKEIDTVLPNKAPPTYDTVLQLEYLDMVVNETLRLFPVAMRLERVCKKDVEINGMFIPKGVVVMIPSYVLHHDPKYWTEPEKFLPERFSKKNKDNIDPYIYTPFGSGPRNCIGMRFALVNMKLALVRVLQNFSFKPCKETQIPLKLRFGGLLLTEKPIVLKAESRDETFVDMEPIHMDFLRSLAFQGPHLCFFWELLCPTIRSR

SEQ ID NO: 14618 - protein, 553 aa, Homo sapiens
MLSVRVAAAVVRALPRRAGLVSRNALGSSFIAARNFHASNTHLQKTGTAEMSSILEERILGADTSVDLEETGRVLSIGDGIARVHGLRNVQAEEMVEFSSGLKGMSLNLEPDNVGVVVFGNDKLIKEGDIVKRTGAIVDVPVGEELLGRVVDALGNAIDGKGPIGSKTRRRVGLKAPGIIPRISVREPMQTGIKAVDSLVPIGRGQRELIIGDRQTGKTSIAIDTIINQKRFNDGSDEKKKLYCIYVAIGQKRSTVAQLVKRLTDADAMKYTIVVSATASDAAPLQYLAPYSGCSMGEYFRDNGKHALIIYDDLSKQAVAYRQMSLLLRRPPGREAYPGDVFYLHSRLLERAAKMNDAFGGGSLTALPVIETQAGDVSAYIPTNVISITDGQIFLETELFYKGIRPAINVGLSVSRVGSAAQTRAMKQVAGTMKLELAQYREVAAFAQFGSDLDAATQQLLSRGVRLTELLKQGQYSPMAIEEQVAVIYAGVRGYLDKLEPSKITKFENAFLSHVVSQHQALLGTIRADGKISEQSDAKLKEIVTNFLAGFEA

SEQ ID NO: 14619 - protein, 503 aa, Homo sapiens
MSSILEERILGADTSVDLEETGRVLSIGDGIARVHGLRNVQAEEMVEFSSGLKGMSLNLEPDNVGVVVFGNDKLIKEGDIVKRTGAIVDVPVGEELLGRVVDALGNAIDGKGPIGSKTRRRVGLKAPGIIPRISVREPMQTGIKAVDSLVPIGRGQRELIIGDRQTGKTSIAIDTIINQKRFNDGSDEKKKLYCIYVAIGQKRSTVAQLVKRLTDADAMKYTIVVSATASDAAPLQYLAPYSGCSMGEYFRDNGKHALIIYDDLSKQAVAYRQMSLLLRRPPGREAYPGDVFYLHSRLLERAAKMNDAFGGGSLTALPVIETQAGDVSAYIPTNVISITDGQIFLETELFYKGIRPAINVGLSVSRVGSAAQTRAMKQVAGTMKLELAQYREVAAFAQFGSDLDAATQQLLSRGVRLTELLKQGQYSPMAIEEQVAVIYAGVRGYLDKLEPSKITKFENAFLSHVVSQHQALLGTIRADGKISEQSDAKLKEIVTNFLAGFEA

SEQ ID NO: 14620 - protein, 531 aa, Homo sapiens
MLSVRVAAAVVRALPRRAGLVSRNALGSSFIAARNFHASNTHLQKTGTAEMSSILEERILGADTSVDLEETGRVLSIGDGIARVHGLRNVQAEEMVEFSSGLKGMSLNLEPDNVGVVVFGNDKLIKEGDIVKRTGAIVDGPIGSKTRRRVGLKAPGIIPRISVREPMQTGIKAVDSLVPIGRGQRELIIGDRQTGKTSIAIDTIINQKRFNDGSDEKKKLYCIYVAIGQKRSTVAQLVKRLTDADAMKYTIVVSATASDAAPLQYLAPYSGCSMGEYFRDNGKHALIIYDDLSKQAVAYRQMSLLLRRPPGREAYPGDVFYLHSRLLERAAKMNDAFGGGSLTALPVIETQAGDVSAYIPTNVISITDGQIFLETELFYKGIRPAINVGLSVSRVGSAAQTRAMKQVAGTMKLELAQYREVAAFAQFGSDLDAATQQLLSRGVRLTELLKQGQYSPMAIEEQVAVIYAGVRGYLDKLEPSKITKFENAFLSHVVSQHQALLGTIRADGKISEQSDAKLKEIVTNFLAGFEA

SEQ ID NO: 14621 - protein, 362 aa, Homo sapiens
MQAERGARGGRGRRPGRGRPGGDRHSERPGAAAAVARGGGGGGGGDGGGRRGRGRGRGFRGARGGRGGGGAPRGSRREPGGWGAGASAPVEDDSDAETYGEENDEQGNYSKRKIVSNWDRYQDIEKEVNNESGESQRGTDFSVLLSSAGDSFSQFRFAEEKEWDSEASCPKQNSAFYVDSELLVRALQELPLCLRLNVAAELVQGTVPLEVPQVKPKRTDDGKGLGMQLKGPLGPGGRGPIFELKSVAAGCPVLLGKDNPSPGPSRDSQKPTSPLQSAGDHLEEELDLLLNLDAPIKEGDNILPDQTSQDLKSKEDGEVVQEEEVCAKPSVTEEKNMEPEQPSTSKNVTEEELEDWLDSMIS

SEQ ID NO: 14622 - protein, 1796 aa, Homo sapiens
MKIFQRKMRYWLLPPFLAIVYFCTIVQGQVAPPTRLRYNVISHDSIQISWKAPRGKFGGYKLLVTPTSGGKTNQLNLQNTATKAIIQGLMPDQNYTVQIIAYNKDKESKPAQGQFRIKDLEKRKDPKPRVKVVDRGNGSRPSSPEEVKFVCQTPAIADIVILVDGSWSIGRFNFRLVRHFLENLVTAFDVGSEKTRIGLAQYSGDPRIEWHLNAFSTKDEVIEAVRNLPYKGGNTLTGLALNYIFENSFKPEAGSRTGVSKIGILITDGKSQDDIIPPSRNLRESGVELFAIGVKNADVNELQEIASEPDSTHVYNVAEFDLMHTVVESLTRTLCSRVEEQDREIKASAHAITGPPTELITSEVTARSFMVNWTHAPGNVEKYRVVYYPTRGGKPDEVVVDGTVSSTVLKNLMSLTEYQIAVFAIYAHTASEGLRGTETTLALPMASDLLLYDVTENSMRVKWDAVPGASGYLILYAPLTEGLAGDEKEMKIGETHTDIELSGLLPNTEYTVTVYAMFGEEASDPVTGQETTLALSPPRNLRISNVGSNSARLTWDPTSRQINGYRIVYNNADGTEINEVEVDPITTFPLKGLTPLTEYTIAIFSIYDEGQSEPLTGVFTTEEVPAQQYLEIDEVTTDSFRVTWHPLSADEGLHKLMWIPVYGGKTEEVVLKEEQDSHVIEGLEPGTEYEVSLLAVLDDGSESEVVTAVGTTLDSFWTEPATTIVPTTSVTSVFQTGIRNLVVGDETTSSLRVKWDISDSDVQQFRVTYMTAQGDPEEEVIGTVMVPGSQNNLLLKPLLPDTEYKVTVTPIYTDGEGVSVSAPGKTLPSSGPQNLRVSEEWYNRLRITWDPPSSPVKGYRIVYKPVSVPGPTLETFVGADINTILITNLLSGMDYNVKIFASQASGFSDALTGMVKTLFLGVTNLQAKHVEMTSLCAHWQVHRHATAYRVVIESLQDRQKQESTVGGGTTRHCFYGLQPDSEYKISVYTKLQEIEGPSVSIMEKTQSLPTRPPTFPPTIPPAKEVCKAAKADLVFMVDGSWSIGDENFNKIISFLYSTVGALNKIGTDGTQVAMVQFTDDPRTEFKLNAYKTKETLLDAIKHISYKGGNTKTGKAIKYVRDTLFTAESGTRRGIPKVIVVITDGRSQDDVNKISREMQLDGYSIFAIGVADADYSELVSIGSKPSARHVFFVDDFDAFKKIEDELITFVCETASATCPVVHKDGIDLAGFKMMEMFGLVEKDFSSVEGVSMEPGTFNVFPCYQLHKDALVSQPTRYLHPEGLPSDYTISFLFRILPDTPQEPFALWEILNKNSDPLVGVILDNGGKTLTYFNYDQSGDFQTVTFEGPEIRKIFYGSFHKLHIVVSETLVKVVIDCKQVGEKAMNASANITSDGVEVLGKMVRSRGPGGNSAPFQLQMFDIVCSTSWANTDKCCELPGLRDDESCPDLPHSCSCSETNEVALGPAGPPGGPGLRGPKGQQGEPGPKGPDGPRGEIGLPGPQGPPGPQGPSGLSIQGMPGMPGEKGEKGDTGLPGPQGIPGGVGSPGRDGSPGQRGLPGKDGSSGPPGPPGPIGIPGTPGVPGITGSMGPQGALGPPGVPGAKGERGERGDLQSQAMVRSVARQVCEQLIQSHMARYTAILNQIPSHSSSIRTVQGPPGEPGRPGSPGAPGEQGPPGTPGFPGNAGVPGTPGERGLTGIKGEKGNPGVGTQGPRGPPGPAGPSGESRPGSPGPPGSPGPRGPPGHLGVPGPQGPSGQPGYCDPSSCSAYGVRAPHPDQPEFTPVQDELEAMELWGPGV

SEQ ID NO: 14623 - protein, 1780 aa, Homo sapiens
MKIFQRKMRYWLLPPFLAIVYFCTIVQGQVAPPTRLRYNVISHDSIQISWKAPRGKFGGYKLLVTPTSGGKTNQLNLQNTATKAIIQGLMPDQNYTVQIIAYNKDKESKPAQGQFRIKDLEKRKDPKPRVKVVDRGNGSRPSSPEEVKFVCQTPAIADIVILVDGSWSIGRFNFRLVRHFLENLVTAFDVGSEKTRIGLAQYSGDPRIEWHLNAFSTKDEVIEAVRNLPYKGGNTLTGLALNYIFENSFKPEAGSRTGVSKIGILITDGKSQDDIIPPSRNLRESGVELFAIGVKNADVNELQEIASEPDSTHVYNVAEFDLMHTVVESLTRTLCSRVEEQDREIKASAHAITGPPTELITSEVTARSFMVNWTHAPGNVEKYRVVYYPTRGGKPDEVVVDGTVSSTVLKNLMSLTEYQIAVFAIYAHTASEGLRGTETTLALPMASDLLLYDVTENSMRVKWDAVPGASGYLILYAPLTEGLAGDEKEMKIGETHTDIELSGLLPNTEYTVTVYAMFGEEASDPVTGQETTLALSPPRNLRISNVGSNSARLTWDPTSRQINGYRIVYNNADGTEINEVEVDPITTFPLKGLTPLTEYTIAIFSIYDEGQSEPLTGVFTTEEVPAQQYLEIDEVTTDSFRVTWHPLSADEGLHKLMWIPVYGGKTEEVVLKEEQDSHVIEGLEPGTEYEVSLLAVLDDGSESEVVTAVGTTLDSFWTEPATTIVPTTSVTSVFQTGIRNLVVGDETTSSLRVKWDISDSDVQQFRVTYMTAQGDPEEEVIGTVMVPGSQNNLLLKPLLPDTEYKVTVTPIYTDGEGVSVSAPGKTLPSSGPQNLRVSEEWYNRLRITWDPPSSPVKGYRIVYKPVSVPGPTLETFVGADINTILITNLLSGMDYNVKIFASQASGFSDALTGMVKTLFLGVTNLQAKHVEMTSLCAHWQVHRHATAYRVVIESLQDRQKQESTVGGGTTRHCFYGLQPDSEYKISVYTKLQEIEGPSVSIMEKTQSLPTRPPTFPPTIPPAKEVCKAAKADLVFMVDGSWSIGDENFNKIISFLYSTVGALNKIGTDGTQVAMVQFTDDPRTEFKLNAYKTKETLLDAIKHISYKGGNTKTGKAIKYVRDTLFTAESGTRRGIPKVIVVITDGRSQDDVNKISREMQLDGYSIFAIGVADADYSELVSIGSKPSARHVFFVDDFDAFKKIEDELITFVCETASATCPVVHKDGIDLAGFKMMEMFGLVEKDFSSVEGVSMEPGTFNVFPCYQLHKDALVSQPTRYLHPEGLPSDYTISFLFRILPDTPQEPFALWEILNKNSDPLVGVILDNGGKTLTYFNYDQSGDFQTVTFEGPEIRKIFYGSFHKLHIVVSETLVKVVIDCKQVGEKAMNASANITSDGVEVLGKMVRSRGPGGNSAPFQLQMFDIVCSTSWANTDKCCELPGLRDDESCPDLPHSCSCSETNEVALGPAGPPGGPGLRGPKGQQGEPGPKGPDGPRGEIGLPGPQGPPGPQGPSGLSIQGMPGMPGEKGEKGDTGLPGPQGIPGGVGSPGRDGSPGQRGLPGKDGSSGPPGPPGPIGIPGTPGVPGITGSMGPQGALGPPGVPGAKGERGERGDLQSQAMVRSVARQVCEQLIQSHMARYTAILNQIPSHSSSIRTVQGPPGEPGRPGSPGAPGEQGPPGTPGFPGNAGVPGTPGERGLTGIKGEKGNPGVGTQGPRGPPGPAGPSGESRPGSPGPPGSPGPRGPPGHLGVPGPQGPSGQPGYCDPSSCSAYGVRDLIPYNDYQH

SEQ ID NO: 14624 - protein, 1701 aa, Homo sapiens
MKIFQRKMRYWLLPPFLAIVYFCTIVQGQVAPPTRLRYNVISHDSIQISWKAPRGKFGGYKLLVTPTSGGKTNQLNLQNTATKAIIQGLMPDQNYTVQIIAYNKDKESKPAQGQFRIKDLEKRKDPKPRVKVVDRGNGSRPSSPEEVKFVCQTPAIADIVILVDGSWSIGRFNFRLVRHFLENLVTAFDVGSEKTRIGVKNADVNELQEIASEPDSTHVYNVAEFDLMHTVVESLTRTLCSRVEEQDREIKASAHAITGPPTELITSEVTARSFMVNWTHAPGNVEKYRVVYYPTRGGKPDEVVVDGTVSSTVLKNLMSLTEYQIAVFAIYAHTASEGLRGTETTLALPMASDLLLYDVTENSMRVKWDAVPGASGYLILYAPLTEGLAGDEKEMKIGETHTDIELSGLLPNTEYTVTVYAMFGEEASDPVTGQETTLALSPPRNLRISNVGSNSARLTWDPTSRQINGYRIVYNNADGTEINEVEVDPITTFPLKGLTPLTEYTIAIFSIYDEGQSEPLTGVFTTEEVPAQQYLEIDEVTTDSFRVTWHPLSADEGLHKLMWIPVYGGKTEEVVLKEEQDSHVIEGLEPGTEYEVSLLAVLDDGSESEVVTAVGTTLDSFWTEPATTIVPTTSVTSVFQTGIRNLVVGDETTSSLRVKWDISDSDVQQFRVTYMTAQGDPEEEVIGTVMVPGSQNNLLLKPLLPDTEYKVTVTPIYTDGEGVSVSAPGKTLPSSGPQNLRVSEEWYNRLRITWDPPSSPVKGYRIVYKPVSVPGPTLETFVGADINTILITNLLSGMDYNVKIFASQASGFSDALTGMVKTLFLGVTNLQAKHVEMTSLCAHWQVHRHATAYRVVIESLQDRQKQESTVGGGTTRHCFYGLQPDSEYKISVYTKLQEIEGPSVSIMEKTQSLPTRPPTFPPTIPPAKEVCKAAKADLVFMVDGSWSIGDENFNKIISFLYSTVGALNKIGTDGTQVAMVQFTDDPRTEFKLNAYKTKETLLDAIKHISYKGGNTKTGKAIKYVRDTLFTAESGTRRGIPKVIVVITDGRSQDDVNKISREMQLDGYSIFAIGVADADYSELVSIGSKPSARHVFFVDDFDAFKKIEDELITFVCETASATCPVVHKDGIDLAGFKMMEMFGLVEKDFSSVEGVSMEPGTFNVFPCYQLHKDALVSQPTRYLHPEGLPSDYTISFLFRILPDTPQEPFALWEILNKNSDPLVGVILDNGGKTLTYFNYDQSGDFQTVTFEGPEIRKIFYGSFHKLHIVVSETLVKVVIDCKQVGEKAMNASANITSDGVEVLGKMVRSRGPGGNSAPFQLQMFDIVCSTSWANTDKCCELPGLRDDESCPDLPHSCSCSETNEVALGPAGPPGGPGLRGPKGQQGEPGPKGPDGPRGEIGLPGPQGPPGPQGPSGLSIQGMPGMPGEKGEKGDTGLPGPQGIPGGVGSPGRDGSPGQRGLPGKDGSSGPPGPPGPIGIPGTPGVPGITGSMGPQGALGPPGVPGAKGERGERGDLQSQAMVRSVARQVCEQLIQSHMARYTAILNQIPSHSSSIRTVQGPPGEPGRPGSPGAPGEQGPPGTPGFPGNAGVPGTPGERGLTGIKGEKGNPGVGTQGPRGPPGPAGPSGESRPGSPGPPGSPGPRGPPGHLGVPGPQGPSGQPGYCDPSSCSAYGVRAPHPDQPEFTPVQDELEAMELWGPGV

SEQ ID NO: 14625 - protein, 207 aa, Homo sapiens
MAGPATQSPMKLMALQLLLWHSALWTVQEATPLGPASSLPQSFLLKCLEQVRKIQGDGAALQEKLVSECATYKLCHPEELVLLGHSLGIPWAPLSSCPSQALQLAGCLSQLHSGLFLYQGLLQALEGISPELGPTLDTLQLDVADFATTIWQQMEELGMAPALQPTQGAMPAFASAFQRRAGGVLVASHLQSFLEVSYRVLRHLAQP

SEQ ID NO: 14626 - protein, 204 aa, Homo sapiens
MAGPATQSPMKLMALQLLLWHSALWTVQEATPLGPASSLPQSFLLKCLEQVRKIQGDGAALQEKLCATYKLCHPEELVLLGHSLGIPWAPLSSCPSQALQLAGCLSQLHSGLFLYQGLLQALEGISPELGPTLDTLQLDVADFATTIWQQMEELGMAPALQPTQGAMPAFASAFQRRAGGVLVASHLQSFLEVSYRVLRHLAQP

SEQ ID NO: 14627 - protein, 171 aa, Homo sapiens
MAGPATQSPMKLMALQLLLWHSALWTVQEATPLGPASSLPQSFLLKCLEQVRKIQGDGAALQEKLVSEAGCLSQLHSGLFLYQGLLQALEGISPELGPTLDTLQLDVADFATTIWQQMEELGMAPALQPTQGAMPAFASAFQRRAGGVLVASHLQSFLEVSYRVLRHLAQP

SEQ ID NO: 14628 - protein, 3197 aa, Homo sapiens
MEIRLEILTSTGIKQKKPWPRVSWLGKEKEAVFLLDDKFINEINLLSGKIKKKIPSLQPFLKDVIVLTTSSNDAWLAGVLTTGELFLWNKDQDCLKTIPITEKPKEMIKATVASSLRLYLYVSGNGKRIVLITPSGCIFLWEYLELKNILSSKSLSLAGRWSQVIPEEAVLLPSTEDKEAVVNAVFIKNELFGDCCLCSFTFYSGECLKLTFLAIRWHENVFTSVRSLPYHVHWAQQDCHLCSLIPKCESVKSRGALISAFSRDGLTLAVTLNQKDPKATQVLFINTLNFVTLCGSLKGCSNKSPVVPATLIRSYWVGDISWTHDSLFLACMLKRGSLVLLTCQGELLTLITFGCSIEFGPAEFIPLHPLITYRPQQFTFQDSNNSVDSSASDSDPMRQRFSIKAHSRLPYLVISDGYMVTTLRFLDSLSPSVHMRSLLLDSTQRLEKIYQSVILSKPKGKGLNLRSLNSLRSSLLEHQGNESSADFTVPKFLQAEETINENAADFQDFEAEETNEGRHFPDNLCPFWNKRDDVLCSSMKEGRLEFASMFDTIHAKDDSEETDRTITELHSIQKSLLAAWTIGISKTVTEKNLMLNYIVVCITHFFYILQFIKCPFPKLDLVLSKSSRHNAWILCIFQLFHQCLSIHYWDIRYKQDVGHLIKLTSNTVKLLLTQQQKGQLFSEKLLACFYLLKMVADNLNGVYILQPEVISASADGSKITAQDSLVVPIFQMFQDSGFQKNWSWNSFFKIHPQVVNPVQQPGHRLLILWRILYKKTLWYQAQLNRRVPEADSQLTEKMTHEASTVKSLLCHLQANLQSTGDCLNQTLELKSINGEECFLLGSYEKSVQLWKKALQEIEEKGGRRTYFLQIRYYLSLLYCHLYSYNLNDAQGLCDQLAREILRWSQLPVKENKDFSGAAKSHFECGMVGGVHPEAAVRVVQSMARFMAAYFTNQQLCILPPHHVNVLPPLHIKTEQSFRLIPLQHSKVASVVRDQNLSNVWTVEYALELLFIGGLVPEAVWLAYKLGDWKTSVSIGVAFQLFCKRDSNFMRSKKKSLNLPLRMTPAQIFQEKLQCVLGQPASLEAKNEMGSKYKQFTDPIEEEDANLLFGSVQEVLKASVMADADILSETFQLLIDSAKDFSKRLWGLVPFGLYLPAPPLYCPQPAILSEEDGDDLLLKAEKNNRQKVSGILQRVLLLFRAAQCSFPVAQWYILQLRWARKVMQKIRMKGSLPSLSPFPQSLLNYCKGGIAFFRPGAAGDHKLDEVSIRAIGCFRELCALCWMLHVRDKLSYSCRQYQKARENVKGEKDLEVEFDSCMIEHCLSAVEWAYRMLPFSRFFNMEELIQDIILSLIGELPPIRKVAEIFVKAFPYPEDVRVPLRDKYHSLHQRLRHCVVKGPQTEEMMSVVMHSIQKVRVKALKRVQRNIGSFEVNIWEPIEEEKPDEAPGVDRYSLGTSLSRSTLTELGDSVVHSDADTFSEALSVEEKSRINIYQRNAPNHMELTSIHKPTDKRKMCNQKENPTKKEDHEKLSQNTLPVIGVWEFERDDDEYIKFLDLFLSYILERDLPYSRDADIPFLTSFSGKLREHELNSLLFDVHTTLKRHQSKTKSQNVFRAGSCFVVAPESYESEKSSSLNDEYGMHLENQKLSSSVLVNQGIKPFLQYPSNEVNKNEGMSGLFGLKQRSIYKIQDDTREKCLIQRSSNHIFWTPKSIKTRRCIFKAIQCNDINPQEDLPLALNTFGSIGRLLEWMIRWSNRRLLCDSGITESSSEYSPVIRVKTSTAAILTSLWLLEQPYFATYKAKNAIIKMVENRDTGCQIGPNIERESKSDAGGSVAVATPGGTEERNGQNKSCQNILNRMPTEAKNPDIKEINDDIISITHNTKKEFIDIDENLLEVEAFTEEEMDMHISDYEEDIEESVGGFRSPSLAICMMTLPQQLEEEFTEEVQCQREEPLETIMEEKSTEQKGMIEAFSHPGHTTPQSMQVDTSSEISSAQISTYKEKSSSVPLLISNGVNVASQPPAPTPQKTQRNEFTAQLPDCSESVRQMLQDEMFKLVQLQQINFMSLMQIVGSSFANLPDTQQLVQQSQSVHLGESQESNLRGCGDVEDSNKNLKERFFIKPQSMGENAREPRKNSPHCHEGTIPSGQNSTGNVQNVPHGSIPLCQLNGQPRKKGPIPSSQNLPSTSFYPAPAGNTHLYLLSTPSVVQKAPRLIPHAKTFSPGDGFPLLQFKSKQEFQPLFLHTGSIPQVPFRPLPQPREAWGLSDSFQPALPQRAAQTTPASHLNVSQYNTEARKKEVEQKTWAETVITEIPNHVNLDQYVGQENLTPQQDSSVFIKPEKLFDVKPGTLEISPHHSFGLPLLYLPLKPPNMFPSTSRASITVPSTPIQPIAEERKYPRLSLLHSHLSPENRCKKTQLIPLENLIAFKQSQQKLTHNLFEQGDAGHLQLLKVKIEPPEVRQGKDSKKRQRRRAEKELQEKRCEKLRRKPNVTFRPENSIINNDDSEIIKKPKEQQEHCGSHPLDDFDVPFEMLQDDNTSAGLHFMASVKKKAIGSQDASTNTDPEHEPLTAPQLLVPDVYLNLKLSSEMSEKPWSPSIPHTVTNLELPVREEPSNDNVIKQQSDHLAVPSSAELHYMAASVTNAVPPHNFKSQGLPKPEFRFKGQSTKSDSAEDYLLWKRLQGVSAACPAPSSAAHQLEHLSAKLQKIDEQLLAIQNIAENIEQDFPKPEMLDLHCDKIGPVDHIEFSSGPEFKKTLASKTISISEEVRFLTHMDEEDQSDKKETSEPEFSITENYSGQKTCVFPTADSAVSLSSSSDQNTTSPGMNSSDELCESVSVHPLQMTGLTDIADIIDDLIIKDGVSSEELGLTEQAMGTSRIQHYSGRHSQRTDKERREIQAWMKRKRKERMAKYLNELAEKRGQEHDPFCPRSNPLYMTSREIRLRQKMKHEKDRLLLSEHYSRRISQAYGLMNELLSESVQLPTLPQKPLPNKPSPTQSSSCQHCPSPRGENQHGHSFLINRPGKVKYMSKPSYIHKRKSFGQPQGSPWPHGTATFTIQKKAGGAKAAVRKATQSPVTFQKGSNAPCHSLQHTKKHGSAGLAPQTKQVCVEYEREETVVSPWTIPSEIHKILHESHNSLLQDLSPTEEEEPEHPFGVGGVDSVSESTGSILSKLDWNAIEDMVASVEDQGLSVHWALDL

SEQ ID NO: 14629 - protein, 2933 aa, Homo sapiens
MEIRLEILTSTGIKQKKPWPRVSWLGKEKEAVFLLDDKFINEINLLSGKIKKKIPSLQPFLKDVIVLTTSSNDAWLAGVLTTGELFLWNKDQDCLKTIPITEKPKEMIKATVASSLRLYLYVSGNGKRIVLITPSGCIFLWEYLELKNILSSKSLSLAGRWSQVIPEEAVLLPSTEDKEAVVNAVFIKNELFGDCCLCSFTFYSGECLKLTFLAIRWHENVFTSVRSLPYHVHWAQQDCHLCSLIPKCESVKSRGALISAFSRDGLTLAVTLNQKDPKATQVLFINTLNFVTLCGSLKGCSNKSPVVPATLIRSYWVGDISWTHDSLFLACMLKRGSLVLLTCQGELLTLITFGCSIEFGPAEFIPLHPLITYRPQQFTFQDSNNSVDSSASDSDPMRQRFSIKAHSRLPYLVISDGYMVTTLRFLDSLSPSVHMRSLLLDSTQRLEKIYQSVILSKPKGKGLNLRSLNSLRSSLLEHQGNESSADFTVPKFLQAEETINENAADFQDFEAEETNEGRHFPDNLCPFWNKRDDVLCSSMKEGRLEFASMFDTIHAKDDSEETDRTITELHSIQKSLLAAWTIGISKTVTEKNLMLNYIVVCITHFFYILQFIKCPFPKLDLVLSKSSRHNAWILCIFQLFHQCLSIHYWDIRYKQDVGHLIKLTSNTVKLLLTQQQKGQLFSEKLLACFYLLKMVADNLNGVYILQPEVISASADGSKITAQDSLVVPIFQMFQDSGFQKNWSWNSFFKIHPQVVNPVQQPGHRLLILWRILYKKTLWYQAQLNRRVPEADSQLTEKMTHEASTVKSLLCHLQANLQSTGDCLNQTLELKSINGEECFLLGSYEKSVQLWKKALQEIEEKGGRRTYFLQIRYYLSLLYCHLYSYNLNDAQGLCDQLAREILRWSQLPVKENKDFSGAAKSHFECGMVGGVHPEAAVRVVQSMARFMAAYFTNQQLCILPPHHVNVLPPLHIKTEQSFRLIPLQHSKVASVVRDQNLSNVWTVEYALELLFIGGLVPEAVWLAYKLGDWKTSVSIGVAFQLFCKRDSNFMRSKKKSLNLPLRMTPAQIFQEKLQCVLGQPASLEAKNEMGSKYKQFTDPIEEEDANLLFGSVQEVLKASVMADADILSETFQLLIDSAKDFSKRLWGLVPFGLYLPAPPLYCPQPAILSEEDGDDLLLKAEKNNRQKVSGILQRVLLLFRAAQCSFPVAQWYILQLRWARKVMQKIRMKGSLPSLSPFPQSLLNYCKGGIAFFRPGAAGDHKLDEVSIRAIGCFRELCALCWMLHVRDKLSYSCRQYQKARENVKGEKDLEVEFDSCMIEHCLSAVEWAYRMLPFSRFFNMEELIQDIILSLIGELPPIRKVAEIFVKAFPYPEDVRVPLRDKYHSLHQRLRHCVVKGPQTEEMMSVVMHSIQKVRVKALKRVQRNIGSFEVNIWEPIEEEKPDEAPGVDRYSLGTSLSRSTLTELGDSVVHSDADTFSEALSVEEKSRINIYQRNAPNHMELTSIHKPTDKRKMCNQKENPTKKEDHEKLSQNTLPVIGVWEFERDDDEYIKFLDLFLSYILERDLPYSRDADIPFLTSFSGKLREHELNSLLFDVHTTLKRHQSKTKSQNVFRAGSCFVVAPESYESEKSSSLNDEYGMHLENQKLSSSVLVNQGIKPFLQYPSNEVNKNEGMSGLFGLKQRSIYKIQDDTREKCLIQRSSNHIFWTPKSIKTRRCIFKAIQCNDINPQEDLPLALNTFGSIGRLLEWMIRWSNRRLLCDSGITESSSEYSPVIRVKTSTAAILTSLWLLEQPYFATYKAKNAIIKMVENRDTGCQIGPNIERESKSDAGGSVAVATPGGTEERNGQNKSCQNILNRMPTEAKNPDIKEINDDIISITHNTKKEFIDIDENLLEVEAFTEEEMDMHISDYEEDIEESVGGFRSPSLAICMMTLPQQLEEEFTEEVQCQREEPLETIMEEKSTEQKGMIEAFSHPGHTTPQSMQVDTSSEISSAQISTYKEKSSSVPLLISNGVNVASQPPAPTPQKTQRNEFTAQLPDCSESVRQMLQDEMFKLVQLQQINFMSLMQIVGSSFANLPDTQQLVQQSQSVHLGESQESNLRGCGDVEDSNKNLKERFFIKPQSMGENAREPRKNSPHCHEGTIPSGQNSTGNVQNVPHGSIPLCQLNGQPRKKGPIPSSQNLPSTSFYPAPAGNTHLYLLSTPSVVQKAPRLIPHAKTFSPGDGFPLLQFKSKQEFQPLFLHTGSIPQVPFRPLPQPREAWGLSDSFQPALPQRAAQTTPASHLNVSQYNTEARKKEVEQKTWAETVITEIPNHVNLDQYVGQENLTPQQDSSVFIKPEKLFDVKPGTLEISPHHSFGLPLLYLPLKPPNMFPSTSRASITVPSTPIQPIAEERKYPRLSLLHSHLSPENRCKKTQLIPLENLIAFKQSQQKLTHNLFEQGDAGHLQLLKVKIEPPEVRQGKDSKKRQRRRAEKELQEKRCEKLRRKPNVTFRPENSIINNDDSEIIKKPKEQQEHCGSHPLDDFDVPFEMLQDDNTSAGLHFMASVKKKAIGSQDASTNTDPEHEPLTAPQLLVPDVYLNLKLSSEMSEKPWSPSIPHTVTNLVGHTYINVIDIEANDLLQELPVREEPSNDNVIKQQSDHLAVPSSAELHYMAASVTNAVPPHNFKSQEVTPACLDGKSLRAGITEVKEPSVTSPTPSDIQQNKGLPKPEFRFKGQSTKSDSAEDYLLWKRLQGVSAACPAPSSAAHQLEHLSAKLQKIDEQLLAIQNIAENIEQDFPKPEMLDLHCDKIGPVDHIEFSSGPEFKKTLASKTISISEEVRFLTHMDEEDQSDKKETSEPEFSITENYSGQKTCVFPTADSAVSLSSSSDQNTTSPGMNSSDELCESVSVHPLQMTGLTDIADIIDDLIIKDGVSSEELGLTEQAMGTSSFT

SEQ ID NO: 14630 - protein, 648 aa, Homo sapiens
MEKARRGGDGVPRGPVLHIVVVGFHHKKGCQVEFSYPPLIPGDGHDSHTLPEEWKYLPFLALPDGAHNYQEDTVFFHLPPRNGNGATVFGISCYRQIEAKALKVRQADITRETVQKSVCVLSKLPLYGLLQAKLQLITHAYFEEKDFSQISILKELYEHMNSSLGGASLEGSQVYLGLSPRDLVLHFRHKVLILFKLILLEKKVLFYISPVNKLVGALMTVLSLFPGMIEHGLSDCSQYRPRKSMSEDGGLQESNPCADDFVSASTADVSHTNLGTIRKVMAGNHGEDAAMKTEEPLFQVEDSSKGQEPNDTNQYLKPPSRPSPDSSESDWETLDPSVLEDPNLKEREQLGSDQTNLFPKDSVPSESLPITVQPQANTGQVVLIPGLISGLEEDQYGMPLAIFTKGYLCLPYMALQQHHLLSDVTVRGFVAGATNILFRQQKHLSDAIVEVEEALIQIHDPELRKLLNPTTADLRFADYLVRHVTENRDDVFLDGTGWEGGDEWIRAQFAVYIHALLAATLQLDNEKILSDYGTTFVTAWKNTHNYRVWNSNKHPALAEINPNHPFQGQYSVSDMKLRFSHSVQNSERGKKIGNVMVTTSRNVVQTGKAVGQSVGGAFSSAKTAMSSWLSTFTTSTSQSLTEPPDEKP

SEQ ID NO: 14631 - protein, 591 aa, Homo sapiens
MEKARRGGDGVPRGPVLHIVVVGFHHKKGCQVEFSYPPLIPGDGHDSHTLPEEWKYLPFLALPDGAHNYQEDTVFFHLPPRNGNGATVFGISCYRQIEAKALKVRQADITRETVQKSVCVLSKLPLYGLLQAKLQLITHAYFEEKDFSQISILKELYEHMNSSLGGASLEGSQVYLGLSPRDLVLHFRHKVLILFKLILLEKKVLFYISPVNKLVGALMTVLSLFPGMIEHGLSDCSQYRPRKSMSEDGGLQESNPCADDFVSASTADVSHTNLGTIRKVMAGNHGEDAAMKTEEPLFQVEDSSKGQEPNDTNQYLKPPSRPSPDSSESDWETLDPSVLEDPNLKEREQLGSDQTNLFPKDSVPSESLPITVQPQANTGQVVLIPGLISGLEEDQYGMPLAIFTKGYLCLPYMALQQHHLLSDVTVRGFVAGATNILFRQQKHLSDAIVEVEEALIQIHDPELRKLLNPTTADLRFADYLVRHVTENRDDVFLDGTGWEGGDEWIRAQFAVYIHALLAATLQLVLFRIVNVAKKIGNVMVTTSRNVVQTGKAVGQSVGGAFSSAKTAMSSWLSTFTTSTSQSLTEPPDEKP

SEQ ID NO: 14632 - protein, 58 aa, Homo sapiens
MAGPESDAQYQFTGIKKYFNSYTLTGRMNCVLATYGSIALIVLYFKLRSKKTPAVKAT

SEQ ID NO: 14633 - protein, 301 aa, Homo sapiens
MLALRVARGSWGALRGAAWAPGTRPSKRRACWALLPPVPCCLGCLAERWRLRPAALGLRLPGIGQRNHCSGAGKAAPRPAAGAGAAAEAPGGQWGPASTPSLYENPWTIPNMLSMTRIGLAPVLGYLIIEEDFNIALGVFALAGLTDLLDGFIARNWANQRSALGSALDPLADKILISILYVSLTYADLIPVPLTYMIISRDVMLIAAVFYVRYRTLPTPRTLAKYFNPCYATARLKPTFISKVNTAVQLILVAASLAAPVFNYADSIYLQILWCFTAFTTAASAYSYYHYGRKTVQVIKD

SEQ ID NO: 14634 - protein, 202 aa, Homo sapiens
MPQYENPWTIPNMLSMTRIGLAPVLGYLIIEEDFNIALGVFALAGLTDLLDGFIARNWANQRSALGSALDPLADKILISILYVSLTYADLIPVPLTYMIISRDVMLIAAVFYVRYRTLPTPRTLAKYFNPCYATARLKPTFISKVNTAVQLILVAASLAAPVFNYADSIYLQILWCFTAFTTAASAYSYYHYGRKTVQVIKD

SEQ ID NO: 14635 - protein, 828 aa, Homo sapiens
MAEAALLLLPEAAAERDAREKLALWDRRPDTTAPLTDRQTDSVLELKAAAENLPVPAELPIEDLCSLTSQSLPIELTSVVPESTEDILLKGFTSLGMEEERIETAQQFFSWFAKLQTQMDQDEGTKYRQMRDYLSGFQEQCDAILNDVNSALQHLESLQKQYLFVSNKTGTLHEACEQLLKEQSELVDLAENIQQKLSYFNELETINTKLNSPTLSVNSDGFIPMLAKLDDCITYISSHPNFKDYPIYLLKFKQCLSKALHLMKTYTVNTLQTLTSQLLKRDPSSVPNADNAFTLFYVKFRAAAPKVRTLIEQIELRSEKIPEYQQLLNDIHQCYLDQRELLLGPSIACTVAELTSQNNRDHCALVRSGCAFMVHVCQDEHQLYNEFFTKPTSKLDELLEKLCVSLYDVFRPLIIHVIHLETLSELCGILKNEVLEDHVQNNAEQLGAFAAGVKQMLEDVQERLVYRTHIYIQTDITGYKPAPGDLAYPDKLVMMEQIAQSLKDEQKKVPSEASFSDVHLEEGESNSLTKSGSTESLNPRPQTTISPADLHGMWYPTVRRTLVCLSKLYRCIDRAVFQGLSQEALSACIQSLLGASESISKNKTQIDGQLFLIKHLLILREQIAPFHTEFTIKEISLDLKKTRDAAFKILNPMTVPRFFRLNSNNALIEFLLEGTPEIREHYLDSKKDVDRHLKSACEQFIQQQTKLFVEQLEEFMTKVSALKTMASQGGPKYTLSQQPWAQPAKVNDLAATAYKTIKTKLPVTLRSMSLYLSNKDTEFILFKPVRNNIQQVFQKFHALLKEEFSPEDIQIIACPSMEQLSLLLLVSK

SEQ ID NO: 14636 - protein, 444 aa, Homo sapiens
MAEAALLLLPEAAAERDAREKLALWDRRPDTTAPLTDRQTDSVLELKAAAENLPVPAELPIEDLCSLTSQSLPIELTSVVPESTEDILLKGFTSLGMEEERIETAQQFFSWFAKLQTQMDQDEGTKYRQMRDYLSGFQEQCDAILNDVNSALQHLESLQKQYLFVSNKTGTLHEACEQLLKEQSELVDLAENIQQKLSYFNELETINTKLNSPTLSVNSDGFIPMLAKLDDCITYISSHPNFKDYPIYLLKFKQCLSKALHLMKTYTVNTLQTLTSQLLKRDPSSVPNADNAFTLFYVKFRAAAPKVRTLIEQIELRSEKIPEYQQLLNDIHQCYLDQRELLLGPSIACTVAELTSQNNRDHCALVRSGCAFMVHVCQDEHQLYNEFFTKPTSKLDELLEKLCVSLYDVFRPLIIHVIHLETLSELCGILKNEVLEDHVQNNGK

SEQ ID NO: 14637 - protein, 333 aa, Homo sapiens
MLLPSKKDLKTALDVFAVFQWSFSALLITTTVIAVNLYLVVFTPYWPVTVLILTWLAFDWKTPQRGGRRFTCVRHWRLWKHYSDYFPLKLLKTHDICPSRNYILVCHPHGLFAHGWFGHFATEASGFSKIFPGITPYILTLGAFFWMPFLREYVMSTGACSVSRSSIDFLLTHKGTGNMVIVVIGGLAECRYSLPGSSTLVLKNRSGFVRMALQHGVPLIPAYAFGETDLYDQHIFTPGGFVNRFQKWFQSMVHIYPCAFYGRGFTKNSWGLLPYSRPVTTIVGEPLPMPKIENPSQEIVAKYHTLYIDALRKLFDQHKTKFGISETQELEII

SEQ ID NO: 14638 - protein, 222 aa, Homo sapiens
MHPGVPEGPGVSEPGPRELCAFVSGAAAHMLRALQPRRTRPPKRRPNHRRFLHNQICRQFTKIEAATQRLALSILSQEAPPQRPSLQKPPPPPPSPFLGVACAVAPTEAPHASASLSLAALDTSTLDLFDNIALTPECASMPWDPSSGSDAPLPAPGLSHRDLGQLDLRQVPHFCGPLPLPQHALGEEADLVAPDWGWVDCWEVPRAWDSQGIPEGWGTSSP

SEQ ID NO: 14639 - protein, 200 aa, Homo sapiens
MGRLHCTEDPVPEAVGGDMQQLNQLGAQQFSALTEVLFHFLTEPKEVERFLAQLSEFATTNQISLGSLRSIVKSLLLVPNGALKKSLTAKQVQADFITLGLSEEKATYFSEKWKQNAPTLARWAIGQTLMINQLIDMEWKFGVTSGSSELEKVGSIFLQLKLVVKKGNQTENVYIELTLPQFYSFLHEMERVRTSMECFC

SEQ ID NO: 14640 - protein, 199 aa, Homo sapiens
MGRLHCTEDPVPEAVGGDMQQLNQLGAQFSALTEVLFHFLTEPKEVERFLAQLSEFATTNQISLGSLRSIVKSLLLVPNGALKKSLTAKQVQADFITLGLSEEKATYFSEKWKQNAPTLARWAIGQTLMINQLIDMEWKFGVTSGSSELEKVGSIFLQLKLVVKKGNQTENVYIELTLPQFYSFLHEMERVRTSMECFC

SEQ ID NO: 14641 - protein, 265 aa, Homo sapiens
MATLLRPVLRRLCGLPGLQRPAAEMPLRARSDGAGPLYSHHLPTSPLQKGLLAAGSAAMALYNPYRHDMVAVLGETTGHRTLKVLRDQMRRDPEGAQILQERPRISTSTLDLGKLQSLPEGSLGREYLRFLDVNRVSPDTRAPTRFVDDEELAYVIQRYREVHDMLHTLLGMPTNILGEIVVKWFEAVQTGLPMCILGAFFGPIRLGAQSLQVLVSELIPWAVQNGRRAPCVLNLYYERRWEQSLRALREELGITAPPMHVQGLA

SEQ ID NO: 14642 - protein, 241 aa, Homo sapiens
MPLRARSDGAGPLYSHHLPTSPLQKGLLAAGSAAMALYNPYRHDMVAVLGETTGHRTLKVLRDQMRRDPEGAQILQERPRISTSTLDLGKLQSLPEGSLGREYLRFLDVNRVSPDTRAPTRFVDDEELAYVIQRYREVHDMLHTLLGMPTNILGEIVVKWFEAVQTGLPMCILGAFFGPIRLGAQSLQVLVSELIPWAVQNGRRAPCVLNLYYERRWEQSLRALREELGITAPPMHVQGLA

SEQ ID NO: 14643 - protein, 444 aa, Homo sapiens
MGGHPQLRLVKALLLLGLNPVSASLQDQHCESLSLASNISGLQCNASVDLIGTCWPRSPAGQLVVRPCPAFFYGVRYNTTNNGYRECLANGSWAARVNYSECQEILNEEKKSKVHYHVAVIINYLGHCISLVALLVAFVLFLRLRPGCTHWGDQADGALEVGAPWSGAPFQVRRSIRCLRNIIHWNLISAFILRNATWFVVQLTMSPEVHQSNVGWCRLVTAAYNYFHVTNFFWMFGEGCYLHTAIVLTYSTDRLRKWMFICIGWGVPFPIIVAWAIGKLYYDNEKCWFGKRPGVYTDYIYQGPMILVLLINFIFLFNIVRILMTKLRASTTSETIQYRKAVKATLVLLPLLGITYMLFFVNPGEDEVSRVVFIYFNSFLESFQGFFVSVFYCFLNSEVRSAIRKRWHRWQDKHSIRARVARAMSIPTSPTRVSFHSIKQSTAV

SEQ ID NO: 14644 - protein, 415 aa, Homo sapiens
MGGHPQLRLVKALLLLGLNPVSASLQDQHCESLSLASNISGLQCNASVDLIGTCWPRSPAGQLVVRPCPAFFYGVRYNTTNNGYRECLANGSWAARVNYSECQEILNEEKKSKVHYHVAVIINYLGHCISLVALLVAFVLFLRLRSIRCLRNIIHWNLISAFILRNATWFVVQLTMSPEVHQSNVGWCRLVTAAYNYFHVTNFFWMFGEGCYLHTAIVLTYSTDRLRKWMFICIGWGVPFPIIVAWAIGKLYYDNEKCWFGKRPGVYTDYIYQGPMILVLLINFIFLFNIVRILMTKLRASTTSETIQYRKAVKATLVLLPLLGITYMLFFVNPGEDEVSRVVFIYFNSFLESFQGFFVSVFYCFLNSEVRSAIRKRWHRWQDKHSIRARVARAMSIPTSPTRVSFHSIKQSTAV

SEQ ID NO: 14645 - protein, 375 aa, Homo sapiens
MGGHPQLRLVKALLLLGLNPVSASLQDQHCESLSLASNISDNGYRECLANGSWAARVNYSECQEILNEEKKSKVHYHVAVIINYLGHCISLVALLVAFVLFLRLRSIRCLRNIIHWNLISAFILRNATWFVVQLTMSPEVHQSNVGWCRLVTAAYNYFHVTNFFWMFGEGCYLHTAIVLTYSTDRLRKWMFICIGWGVPFPIIVAWAIGKLYYDNEKCWFGKRPGVYTDYIYQGPMILVLLINFIFLFNIVRILMTKLRASTTSETIQYRKAVKATLVLLPLLGITYMLFFVNPGEDEVSRVVFIYFNSFLESFQGFFVSVFYCFLNSEVRSAIRKRWHRWQDKHSIRARVARAMSIPTSPTRVSFHSIKQSTAV

SEQ ID NO: 14646 - protein, 401 aa, Homo sapiens
MGGHPQLRLVKALLLLGLNPVSASLQDQHCESLSLASNISGLQCNASVDLIGTCWPRSPAGQLVVRPCPAFFYGVRYNTTNNGYRECLANGSWAARVNYSECQEILNEEKKSKVHYHVAVIINYLGHCISLVALLVAFVLFLRLRSIRCLRNIIHWNLISAFILRNATWFVVQLTMSPEVHQSNVGWCRLVTAAYNYFHVTNFFWMFGEGCYLHTAIVLTYSTDRLRKWMFICIGWGVPFPIIVAWAIGKLYYDNEKCWFGKRPGVYTDYIYQGPMILVLLINFIFLFNIVRILMTKLRASTTSETIQYRKAVKATLVLLPLLGITYMLFFVNPGEDEVSRVVFIYFNSFLESFQVRSAIRKRWHRWQDKHSIRARVARAMSIPTSPTRVSFHSIKQSTAV

SEQ ID NO: 14647 - protein, 240 aa, Homo sapiens
MSPEVHQSNVGWCRLVTAAYNYFHVTNFFWMFGEGCYLHTAIVLTYSTDRLRKWMFICIGWGVPFPIIVAWAIGKLYYDNEKCWFGKRPGVYTDYIYQGPMILVLLINFIFLFNIVRILMTKLRASTTSETIQYRKAVKATLVLLPLLGITYMLFFVNPGEDEVSRVVFIYFNSFLESFQGFFVSVFYCFLNSEVRSAIRKRWHRWQDKHSIRARVARAMSIPTSPTRVSFHSIKQSTAV

SEQ ID NO: 14648 - protein, 153 aa, Homo sapiens
MAPGSRGERSSFRSRRGPGVPSPQPDVTMLSRLLKEHQAKQNERKELQEKRRREAITAATCLTEALVDHLNVGVAQAYMNQRKLDHEVKTLQVQAAQFAKQTGQWIGMVENFNQALKEIGDVENWARSIELDMRTIATALEYVYKGQLQSAPS

SEQ ID NO: 14649 - protein, 125 aa, Homo sapiens
MLSRLLKEHQAKQNERKELQEKRRREAITAATCLTEALVDHLNVGVAQAYMNQRKLDHEVKTLQVQAAQFAKQTGQWIGMVENFNQALKEIGDVENWARSIELDMRTIATALEYVYKGQLQSAPS

SEQ ID NO: 14650 - protein, 120 aa, Homo sapiens
MANPGLGLLLALGLPFLLARWGRAWGQIQTTSANENSTVLPSSTSSSSDGNLRPEAITAIIVVFSLLAALLLAVGLALLVRKLREKRQTEGTYRPSSEEQVGARVPPTPNLKLPPEERLI

SEQ ID NO: 14651 - protein, 123 aa, Homo sapiens
MANPGLGLLLALGLPFLLARWGRAWGQIQTTSANENSTVLPSSTSSSSDGNLRPEAITAIIVVFSLLAALLLAVGLALLVRKLREKRQTEGTYRPSSEEQFSHAAEARAPQDSKETVQGCLPI

SEQ ID NO: 14652 - protein, 731 aa, Homo sapiens
MSGSRQAGSGSAGTSPGSSAASSVTSASSSLSSSPSPPSVAVSAAALVSGGVAQAAGSGGLGGPVRPVLVAPAVSGSGGGAVSTGLSRHSCAARPSAGVGGSSSSLGSGSRKRPLLAPLCNGLINSYEDKSNDFVCPICFDMIEEAYMTKCGHSFCYKCIHQSLEDNNRCPKCNYVVDNIDHLYPNFLVNELILKQKQRFEEKRFKLDHSVSSTNGHRWQIFQDWLGTDQDNLDLANVNLMLELLVQKKKQLEAESHAAQLQILMEFLKVARRNKREQLEQIQKELSVLEEDIKRVEEMSGLYSPVSEDSTVPQFEAPSPSHSSIIDSTEYSQPPGFSGSSQTKKQPWYNSTLASRRKRLTAHFEDLEQCYFSTRMSRISDDSRTASQLDEFQECLSKFTRYNSVRPLATLSYASDLYNGSSIVSSIEFDRDCDYFAIAGVTKKIKVYEYDTVIQDAVDIHYPENEMTCNSKISCISWSSYHKNLLASSDYEGTVILWDGFTGQRSKVYQEHEKRCWSVDFNLMDPKLLASGSDDAKVKLWSTNLDNSVASIEAKANVCCVKFSPSSRYHLAFGCADHCVHYYDLRNTKQPIMVFKGHRKAVSYAKFVSGEEIVSASTDSQLKLWNVGKPYCLRSFKGHINEKNFVGLASNGDYIACGSENNSLYLYYKGLSKTLLTFKFDTVKSVLDKDRKEDDTNEFVSAVCWRALPDGESNVLIAANSQGTIKVLELV

SEQ ID NO: 14653 - protein, 707 aa, Homo sapiens
MSGSRQAGSGSAGTSPGSSAASSVTSASSSLSSSPSPPSVAVSAAALVSGGVAQAAGSGGLGGPVRPVLVAPAVSGSGGGAVSTGLSRHSCAARPSAGVGGSSSSLGSGSRKRPLLAPLCNGLINSYEDKSNDFVCPICFDMIEEAYMTKCGHSFCYKCIHQSLEDNNRCPKCNYVVDNIDHLYPNFLVNELILKQKQRFEEKRFKLDHSNGHRWQIFQDWLGTDQDNLDLANVNLMLELLVQKKKQLEAESHAAQLQILMEFLKVARRNKREEMSGLYSPVSEDSTVPQFEAPSPSHSSIIDSTEYSQPPGFSGSSQTKKQPWYNSTLASRRKRLTAHFEDLEQCYFSTRMSRISDDSRTASQLDEFQECLSKFTRYNSVRPLATLSYASDLYNGSSIVSSIEFDRDCDYFAIAGVTKKIKVYEYDTVIQDAVDIHYPENEMTCNSKISCISWSSYHKNLLASSDYEGTVILWDGFTGQRSKVYQEHEKRCWSVDFNLMDPKLLASGSDDAKVKLWSTNLDNSVASIEAKANVCCVKFSPSSRYHLAFGCADHCVHYYDLRNTKQPIMVFKGHRKAVSYAKFVSGEEIVSASTDSQLKLWNVGKPYCLRSFKGHINEKNFVGLASNGDYIACGSENNSLYLYYKGLSKTLLTFKFDTVKSVLDKDRKEDDTNEFVSAVCWRALPDGESNVLIAANSQGTIKVLELV

SEQ ID NO: 14654 - protein, 506 aa, Homo sapiens
MEFLKVARRNKREQLEQIQKELSVLEEDIKRVEEMSGLYSPVSEDSTVPQFEAPSPSHSSIIDSTEYSQPPGFSGSSQAGVQWRYLGSLQPPPPRYKRFSCLTLPSSWDYRRLPPHLTKKQPWYNSTLASRRKRLTAHFEDLEQCYFSTRMSRISDDSRTASQLDEFQECLSKFTRYNSVRPLATLSYASDLYNGSSIVSSIEFDRDCDYFAIAGVTKKIKVYEYDTVIQDAVDIHYPENEMTCNSKISCISWSSYHKNLLASSDYEGTVILWDGFTGQRSKVYQEHEKRCWSVDFNLMDPKLLASGSDDAKVKLWSTNLDNSVASIEAKANVCCVKFSPSSRYHLAFGCADHCVHYYDLRNTKQPIMVFKGHRKAVSYAKFVSGEEIVSASTDSQLKLWNVGKPYCLRSFKGHINEKNFVGLASNGDYIACGSENNSLYLYYKGLSKTLLTFKFDTVKSVLDKDRKEDDTNEFVSAVCWRALPDGESNVLIAANSQGTIKVLELV

SEQ ID NO: 14655 - protein, 711 aa, Homo sapiens
MSGSRQAGSGSAGTSPGSSAASSVTSASSSLSSSPSPPSVAVSAAALVSGGVAQAAGSGGLGGPVRPVLVAPAVSGSGGGAVSTGLSRHSCAARPSAGVGGSSSSLGSGSRKRPLLAPLCNGLINSYEDKSNDFVCPICFDMIEEAYMTKCGHSFCYKCIHQSLEDNNRCPKCNYVVDNIDHLYPNFLVNELILKQKQRFEEKRFKLDHSVSSTNGHRWQIFQDWLGTDQDNLDLANVNLMLELLVQKKKQLEAESHAAQLQILMEFLKVARRNKREEMSGLYSPVSEDSTVPQFEAPSPSHSSIIDSTEYSQPPGFSGSSQTKKQPWYNSTLASRRKRLTAHFEDLEQCYFSTRMSRISDDSRTASQLDEFQECLSKFTRYNSVRPLATLSYASDLYNGSSIVSSIEFDRDCDYFAIAGVTKKIKVYEYDTVIQDAVDIHYPENEMTCNSKISCISWSSYHKNLLASSDYEGTVILWDGFTGQRSKVYQEHEKRCWSVDFNLMDPKLLASGSDDAKVKLWSTNLDNSVASIEAKANVCCVKFSPSSRYHLAFGCADHCVHYYDLRNTKQPIMVFKGHRKAVSYAKFVSGEEIVSASTDSQLKLWNVGKPYCLRSFKGHINEKNFVGLASNGDYIACGSENNSLYLYYKGLSKTLLTFKFDTVKSVLDKDRKEDDTNEFVSAVCWRALPDGESNVLIAANSQGTIKVLELV

SEQ ID NO: 14656 - protein, 157 aa, Homo sapiens
MSGSRQAGSGSAGTSPGSSAASSVTSASSSLSSSPSPPSVAVSAAALVSGGVAQAAGSGGLGGPVRPVLVAPAVSGSGGGAVSTGLSRHSCAARPSAGVGGSSSSLGSGSRKRPLLAPLCNGLINSYEDKSNDFVCPICFDMIEEAYMTKCGHSFCE

SEQ ID NO: 14657 - protein, 1431 aa, Homo sapiens
MGKEQELVQAVKAEDVGTAQRLLQRPRPGKAKLLGSTKKINVNFQDPDGFSALHHAALNGNTELISLLLEAQAAVDIKDNKGMRPLHYAAWQGRKEPMKLVLKAGSAVNIPSDEGHIPLHLAAQHGHYDVSEMLLQHQSNPCMVDNSGKTPLDLACEFGRVGVVQLLLSSNMCAALLEPRPGDATDPNGTSPLHLAAKNGHIDIIRLLLQAGIDINRQTKSGTALHEAALCGKTEVVRLLLDSGINAHVRNTYSQTALDIVHQFTTSQASREIKQLLREASAALQVRATKDYCNNYDLTSLNVKAGDIITVLEQHPDGRWKGCIHDNRTGNDRVGYFPSSLGEAIVKRAGSRAGTEPSLPQGSSSSGPSAPPEEIWVLRKPFAGGDRSGSISGMAGGRGSGGHALHAGSEGVKLLATVLSQKSVSESGPGDSPAKPPEGSAGVARSQPPVAHAGQVYGEQPPKKLEPASEGKSSEAVSQWLTAFQLQLYAPNFISAGYDLPTISRMTPEDLTAIGVTKPGHRKKIAAEISGLSIPDWLPEHKPANLAVWLSMIGLAQYYKVLVDNGYENIDFITDITWEDLQEIGITKLGHQKKLMLAVRKLAELQKAEYAKYEGGPLRRKAPQSLEVMAIESPPPPEPTPADCQSPKMTTFQDSELSDELQAAMTGPAEVGPTTEKPSSHLPPTPRATTRQDSSLGGRARHMSSSQELLGDGPPGPSSPMSRSQEYLLDEGPAPGTPPREARPGRHGHSIKRASVPPVPGKPRQVLPPGTSHFTPPQTPTKTRPGSPQALGGPHGPAPATAKVKPTPQLLPPTERPMSPRSLPQSPTHRGFAYVLPQPVEGEVGPAAPGPAPPPVPTAVPTLCLPPEADAEPGRPKKRAHSLNRYAASDSEPERDELLVPAAAGPYATVQRRVGRSHSVRAPAGADKNVNRSQSFAVRPRKKGPPPPPPKRSSSALASANLADEPVPDAEPEDGLLGVRAQCRRASDLAGSVDTGSAGSVKSIAAMLELSSIGGGGRAARRPPEGHPTPRPASPEPGRVATVLASVKHKEAIGPGGEVVNRRRTLSGPVTGLLATARRGPGESADPGPFVEDGTGRQRPRGPSKGEAGVEGPPLAKVEASATLKRRIRAKQNQQENVKFILTESDTVKRRPKAKEREAGPEPPPPLSVYHNGTGTVRRRPASEQAGPPELPPPPPPAEPPPTDLAHLPPLPPPEGEARKPAKPPVSPKPVLTQPVPKLQGSPTPTSKKVPLPGPGSPEVKRAHGTPPPVSPKPPPPPTAPKPVKAVAGLPSGSAGPSPAPSPARQPPAALAKPPGTPPSLGASPAKPPSPGAPALHVPAKPPRAAAAAAAAAAAPPAPPEGASPGDSARQKLEETSACLAAALQAVEEKIRQEDAQGPRDSAAEKSTGSILDDIGSMFDDLADQLDAMLE

SEQ ID NO: 14658 - protein, 429 aa, Homo sapiens
MVPEVRVLSSLLGLALLWFPLDSHARARPDMFCLFHGKRYSPGESWHPYLEPQGLMYCLRCTCSEGAHVSCYRLHCPPVHCPQPVTEPQQCCPKCVEPHTPSGLRAPPKSCQHNGTMYQHGEIFSAHELFPSRLPNQCVLCSCTEGQIYCGLTTCPEPGCPAPLPLPDSCCQACKDEASEQSDEEDSVQSLHGVRHPQDPCSSDAGRKRGPGTPAPTGLSAPLSFIPRHFRPKGAGSTTVKIVLKEKHKKACVHGGKTYSHGEVWHPAFRAFGPLPCILCTCEDGRQDCQRVTCPTEYPCRHPEKVAGKCCKICPEDKADPGHSEISSTRCPKAPGRVLVHTSVSPSPDNLRRFALEHEASDLVEIYLWKLVKGIFHLTQIKKVRKQDFQKEAQHFRLLAGPHEGHWNVFLAQTLELKVTASPDKVTKT

SEQ ID NO: 14659 - protein, 451 aa, Homo sapiens
MVPEVRVLSSLLGLALLWFPLDSHARARPDMFCLFHGKRYSPGESWHPYLEPQGLMYCLRCTCSEGAHVSCYRLHCPPVHCPQPVTEPQQCCPKCVEPHTPSGLRAPPKSCQHNGTMYQHGEIFSAHELFPSRLPNQCVLCSCTEGQIYCGLTTCPEPGCPAPLPLPDSCCQACKDEASEQSDEEDSVQSLHGVRHPQDPCSSDAGRKRGPGTPAPTGLSAPLSFIPRHFRPKGAGSTTVKIVLKEKHKKACVHGGKTYSHGEVWHPAFRAFGPLPCILCTCEDGRQDCQRVTCPTEYPCRHPEKVAGKCCKICPEDKADPGHSEISSTRCPKAPGRVLVHTSVSPSPDNLRRFALEHEASDLVEIYLWKLVKDEETEAQRGEVPGPRPHSQNLPLDSDQESQEARLPERGTALPTARWPPRRSLERLPSPDPGAEGHGQSRQSDQDITKT

SEQ ID NO: 14660 - protein, 142 aa, Homo sapiens
MALVGLPGPDMFCLFHGKRYSPGESWHPYLEPQGLMYCLRCTCSENLTLPLDSGPHQSPASTTGPCTNTERSSVPMSCSPPACPTSVSSAAAQRARSTAASQPAPNQAAQHPSRCQTPAAKPAKMRQVSNRMKRTVCSRSMG

SEQ ID NO: 14661 - protein, 142 aa, Homo sapiens
MALVGLPGPDMFCLFHGKRYSPGESWHPYLEPQGLMYCLRCTCSEGAHVSCYRLHCPPVHCPQPVTEPQQCCPKCVEPHTPSGLRAPPKSCQHNGTMYQHGEIFSAHELFPSRLPNQCVLCSCTMRQVSNRMKRTVCSRSMG

SEQ ID NO: 14662 - protein, 93 aa, Homo sapiens
MALVGLPGPDMFCLFHGKRYSPGESWHPYLEPQGLMYCLRCTCSENLTLPLDSGPHQSPASTTGPCTNTERSSVPMSCSPPACPTSVSSAAAQ

SEQ ID NO: 14663 - protein, 1241 aa, Homo sapiens
MSSAPRRPAKGADSFCTPEPESLGPGTPGFPEQEEDELHRTLGVERFEEILQEAGSRGGEEPGRSYGEEDFEYHRQSSHHIHHPLSTHLPPDARRRKTPQGPGRKPRRRPGASPTGETPTIEEGEEDEDEASEAEGARALTQPSPVSTPSSVQFFLQEDDSADRKAERTSPSSPAPLPHQEATPRASKGAQAGTQVEEAEAEAVAVASGTAGGDDGGASGRPLPKAQPGHRSYNLQERRRIGSMTGAEQALLPRVPTDEIEAQTLATADLDLMKSHRFEDVPGVRRHLVRKNAKGSTQSGREGREPGPTPRARPRAPHKPHEVFVELNELLLDKNQEPQWRETARWIKFEEDVEEETERWGKPHVASLSFRSLLELRRTLAHGAVLLDLDQQTLPGVAHQVVEQMVISDQIKAEDRANVLRALLLKHSHPSDEKDFSFPRNISAGSLGSLLGHHHGQGAESDPHVTEPLMGGVPETRLEVERERELPPPAPPAGITRSKSKHELKLLEKIPENAEATVVLVGCVEFLSRPTMAFVRLREAVELDAVLEVPVPVRFLFLLLGPSSANMDYHEIGRSISTLMSDKQFHEAAYLADEREDLLTAINAFLDCSVVLPPSEVQGEELLRSVAHFQRQMLKKREEQGRLLPTGAGLEPKSAQDKALLQMVEAAGAAEDDPLRRTGRPFGGLIRDVRRRYPHYLSDFRDALDPQCLAAVIFIYFAALSPAITFGGLLGEKTQDLIGVSELIMSTALQGVVFCLLGAQPLLVIGFSGPLLVFEEAFFSFCSSNHLEYLVGRVWIGFWLVFLALLMVALEGSFLVRFVSRFTQEIFAFLISLIFIYETFYKLVKIFQEHPLHGCSASNSSEVDGGENMTWAGARPTLGPGNRSLAGQSGQGKPRGQPNTALLSLVLMAGTFFIAFFLRKFKNSRFFPGRIRRVIGDFGVPIAILIMVLVDYSIEDTYTQKLSVPSGFSVTAPEKRGWVINPLGEKSPFPVWMMVASLLPAILVFILIFMETQITTLIISKKERMLQKGSGFHLDLLLIVAMGGICALFGLPWLAAATVRSVTHANALTVMSKAVAPGDKPKIQEVKEQRVTGLLVALLVGLSIVIGDLLRQIPLAVLFGIFLYMGVTSLNGIQFYERLHLLLMPPKHHPDVTYVKKVRTLRMHLFTALQLLCLALLWAVMSTAASLAFPFILILTVPLRMVVLTRIFTDREMKCLDANEAEPVFDEREGVDEYNEMPMPV

SEQ ID NO: 14664 - protein, 1227 aa, Homo sapiens
MTQPEPESLGPGTPGFPEQEEDELHRTLGVERFEEILQEAGSRGGEEPGRSYGEEDFEYHRQSSHHIHHPLSTHLPPDARRRKTPQGPGRKPRRRPGASPTGETPTIEEGEEDEDEASEAEGARALTQPSPVSTPSSVQFFLQEDDSADRKAERTSPSSPAPLPHQEATPRASKGAQAGTQVEEAEAEAVAVASGTAGGDDGGASGRPLPKAQPGHRSYNLQERRRIGSMTGAEQALLPRVPTDEIEAQTLATADLDLMKSHRFEDVPGVRRHLVRKNAKGSTQSGREGREPGPTPRARPRAPHKPHEVFVELNELLLDKNQEPQWRETARWIKFEEDVEEETERWGKPHVASLSFRSLLELRRTLAHGAVLLDLDQQTLPGVAHQVVEQMVISDQIKAEDRANVLRALLLKHSHPSDEKDFSFPRNISAGSLGSLLGHHHGQGAESDPHVTEPLMGGVPETRLEVERERELPPPAPPAGITRSKSKHELKLLEKIPENAEATVVLVGCVEFLSRPTMAFVRLREAVELDAVLEVPVPVRFLFLLLGPSSANMDYHEIGRSISTLMSDKQFHEAAYLADEREDLLTAINAFLDCSVVLPPSEVQGEELLRSVAHFQRQMLKKREEQGRLLPTGAGLEPKSAQDKALLQMVEAAGAAEDDPLRRTGRPFGGLIRDVRRRYPHYLSDFRDALDPQCLAAVIFIYFAALSPAITFGGLLGEKTQDLIGVSELIMSTALQGVVFCLLGAQPLLVIGFSGPLLVFEEAFFSFCSSNHLEYLVGRVWIGFWLVFLALLMVALEGSFLVRFVSRFTQEIFAFLISLIFIYETFYKLVKIFQEHPLHGCSASNSSEVDGGENMTWAGARPTLGPGNRSLAGQSGQGKPRGQPNTALLSLVLMAGTFFIAFFLRKFKNSRFFPGRIRRVIGDFGVPIAILIMVLVDYSIEDTYTQKLSVPSGFSVTAPEKRGWVINPLGEKSPFPVWMMVASLLPAILVFILIFMETQITTLIISKKERMLQKGSGFHLDLLLIVAMGGICALFGLPWLAAATVRSVTHANALTVMSKAVAPGDKPKIQEVKEQRVTGLLVALLVGLSIVIGDLLRQIPLAVLFGIFLYMGVTSLNGIQFYERLHLLLMPPKHHPDVTYVKKVRTLRMHLFTALQLLCLALLWAVMSTAASLAFPFILILTVPLRMVVLTRIFTDREMKCLDANEAEPVFDEREGVDEYNEMPMPV

SEQ ID NO: 14665 - protein, 1232 aa, Homo sapiens
MDFLLRPQPEPESLGPGTPGFPEQEEDELHRTLGVERFEEILQEAGSRGGEEPGRSYGEEDFEYHRQSSHHIHHPLSTHLPPDARRRKTPQGPGRKPRRRPGASPTGETPTIEEGEEDEDEASEAEGARALTQPSPVSTPSSVQFFLQEDDSADRKAERTSPSSPAPLPHQEATPRASKGAQAGTQVEEAEAEAVAVASGTAGGDDGGASGRPLPKAQPGHRSYNLQERRRIGSMTGAEQALLPRVPTDEIEAQTLATADLDLMKSHRFEDVPGVRRHLVRKNAKGSTQSGREGREPGPTPRARPRAPHKPHEVFVELNELLLDKNQEPQWRETARWIKFEEDVEEETERWGKPHVASLSFRSLLELRRTLAHGAVLLDLDQQTLPGVAHQVVEQMVISDQIKAEDRANVLRALLLKHSHPSDEKDFSFPRNISAGSLGSLLGHHHGQGAESDPHVTEPLMGGVPETRLEVERERELPPPAPPAGITRSKSKHELKLLEKIPENAEATVVLVGCVEFLSRPTMAFVRLREAVELDAVLEVPVPVRFLFLLLGPSSANMDYHEIGRSISTLMSDKQFHEAAYLADEREDLLTAINAFLDCSVVLPPSEVQGEELLRSVAHFQRQMLKKREEQGRLLPTGAGLEPKSAQDKALLQMVEAAGAAEDDPLRRTGRPFGGLIRDVRRRYPHYLSDFRDALDPQCLAAVIFIYFAALSPAITFGGLLGEKTQDLIGVSELIMSTALQGVVFCLLGAQPLLVIGFSGPLLVFEEAFFSFCSSNHLEYLVGRVWIGFWLVFLALLMVALEGSFLVRFVSRFTQEIFAFLISLIFIYETFYKLVKIFQEHPLHGCSASNSSEVDGGENMTWAGARPTLGPGNRSLAGQSGQGKPRGQPNTALLSLVLMAGTFFIAFFLRKFKNSRFFPGRIRRVIGDFGVPIAILIMVLVDYSIEDTYTQKLSVPSGFSVTAPEKRGWVINPLGEKSPFPVWMMVASLLPAILVFILIFMETQITTLIISKKERMLQKGSGFHLDLLLIVAMGGICALFGLPWLAAATVRSVTHANALTVMSKAVAPGDKPKIQEVKEQRVTGLLVALLVGLSIVIGDLLRQIPLAVLFGIFLYMGVTSLNGIQFYERLHLLLMPPKHHPDVTYVKKVRTLRMHLFTALQLLCLALLWAVMSTAASLAFPFILILTVPLRMVVLTRIFTDREMKCLDANEAEPVFDEREGVDEYNEMPMPV

SEQ ID NO: 14666 - protein, 227 aa, Homo sapiens
MGGKLSKKKKGYNVNDEKAKEKDKKAEGAATEEEGTPKESEPQAAAEPAEAKEGKEKPDQDAEGKAEEKEGEKDAAAAKEEAPKAEPEKTEGAAEAKAEPPKAPEQEQAAPGPAAGGEAPKAAEAAAAPAESAAPAAGEEPSKEEGEPKKTEAPAAPAAQETKSDGAPASDSKPGSSEAAPSSKETPAATEAPSSTPKAQGPAASAEEPKPVEAPAANSDQTVTVKE

SEQ ID NO: 14667 - protein, 173 aa, Homo sapiens
MGGKLSKKKKGYNVNDEKAKEKDKKAEGAATEEEGTPKESEPQAAAEPAEAKEGKEKPDQDAEGKAEEKEGEKDAAAAKEEAPKAEPSKEEGEPKKTEAPAAPAAQETKSDGAPASDSKPGSSEAAPSSKETPAATEAPSSTPKAQGPAASAEEPKPVEAPAANSDQTVTVKE

SEQ ID NO: 14668 - protein, 712 aa, Homo sapiens
MCSPASPKILYRNPRFLRLAFLQLHHQQQSDVFCDVLLQAEGEAVPAHCCILSACSPFFTERLERERPAQGGKVVLELGGLKISTLRKLVDFLYTSEMEVSQEEAQDVLSAARQLRVSELESLQLEGGKLVKAPQGRRLNRECLQPTSAAPISARVVTPSHHPHTPLPTNQTPCPLGAIRLKSLGKEEGPQENNRQNADNLSGTLLLKRKARACPTPQEKNSSPSSHSQEPRENKNDTALDPTVLSPPSLYPSVDKHLLPRKIRLSRSKPSPGICTSKPSSILSGSSSVPATPGRRLWRQRSVNKETPEDKPKPGRASPLQSTPNPSGLGKTGGSRKRSPEVRAPNSDSAEEGQVGRVKLRKIVNGTCWEVVQETPLKNTQDSPQIPDPGGDFQEPSGTQPFSSNEQEMSPTRTELCQDSPMCTKLQDILVSASHSPDHPVVKSEFESSPELVEKEPMLAIDCREPYAFDTALLEQPCEAEEYRITSAAATSELEEILDFMLCGSDIEPPIGSLESPGAEGCRTPTYHLTETGKNWIEGEEWCLPDMELWPRELTELEKEPAGENRGPTELLSPLVMPSEVSEVLSVGGRWTPDLEITSSQPLDGQEDKLLHVSSLDTPQRSYGDLSPPCSNWVETGLEVSLTTDELLYPSPKAGKEVSGHSELLGSLPASSEEEEIDVVDWTAEGRLVPTTVPSVWPDPSSESETEVDILT

SEQ ID NO: 14669 - protein, 361 aa, Homo sapiens
MSGAGVGGASEESQAMQAHVSIILPVHNAEPWLDECLRSVLQQDFEGTMELSVFNDASKDKSGAIIEKWRVKLEDSGVHVIIGGHDSPSPRGVGYAKNQAVAQSSGSYLCFLDSDDVMMPQRVRLQHEAAVQHPSSIIGCRVRRDPPNSTERYTRWINQLTPEQLLTQVFTSNGPTVIMPTWFCSRAWFSHVGPFNEGGQGVPEDLLFFYEHLRKGGGVIRVDQSLLLYRHHPQAATHCVLETTIWTHRVRFLEEQALPRWAAFTIWNAGKQGRRLYRSLTAGSQRKVVAFCDVDENKIRKGFYCHEDSQERPKPRIPILHFRAARPPFVICVKLDLTGGAFEDNLRSLHLQEGQDFLHFS

SEQ ID NO: 14670 - protein, 450 aa, Homo sapiens
MEEPQKSYVNTMDLERDEPLKSTGPQISVSEFSCHCCYDILVNPTTLNCGHSFCRHCLALWWASSKKTECPECREKWEGFPKVSILLRDAIEKLFPDAIRLRFEDIQQNNDIVQSLAAFQKYGNDQIPLAPNTGRANQQMGGGFFSGVLTALTGVAVVLLVYHWSSRESEHDLLVHKAVAKWTAEEVVLWLEQLGPWASLYRERFLSERVNGRLLLTLTEEEFSKTPYTIENSSHRRAILMELERVKALGVKPPQNLWEYKAVNPGRSLFLLYALKSSPRLSLLYLYLFDYTDTFLPFIHTICPLQEDSSGEDIVTKLLDLKEPTWKQWREFLVKYSFLPYQLIAEFAWDWLEVHYWTSRFLIINAMLLSVLELFSFWRIWSRSELKTVPQRMWSHFWKVSTQGLFVAMFWPLIPQFVCNCLFYWALYFNPIINIDLVVKELRRLETQVL

SEQ ID NO: 14671 - protein, 322 aa, Homo sapiens
MVGIFKENRMSRMQRKMGRFPQSQYSPQVVLLVYHWSSRESEHDLLVHKAVAKWTAEEVVLWLEQLGPWASLYRERFLSERVNGRLLLTLTEEEFSKTPYTIENSSHRRAILMELERVKALGVKPPQNLWEYKAVNPGRSLFLLYALKSSPRLSLLYLYLFDYTDTFLPFIHTICPLQEDSSGEDIVTKLLDLKEPTWKQWREFLVKYSFLPYQLIAEFAWDWLEVHYWTSRFLIINAMLLSVLELFSFWRIWSRSELKTVPQRMWSHFWKVSTQGLFVAMFWPLIPQFVCNCLFYWALYFNPIINIDLVVKELRRLETQVL

SEQ ID NO: 14672 - protein, 171 aa, Homo sapiens
MHPFYTRAATMIGEIAAAVSFISKFLRTKGLTSERQLQTFSQSLQELLAEHYKHHWFPEKPCKGSGYRCIRINHKMDPLIGQAAQRIGLSSQELFRLLPSELTLWVDPYEVSYRIGEDGSICVLYEASPAGGSTQNSTNVQMVDSRISCKEELLLGRTSPSKNYNMMTVSG

SEQ ID NO: 14673 - protein, 329 aa, Homo sapiens
MKLLRRAWRRRAALGLGTLALCGAALLYLARCAAEPGDPRAMSGRSPPPPAPARAAAFLAVLVASAPRAAERRSVIRSTWLARRGAPGDVWARFAVGTAGLGAEERRALEREQARHGDLLLLPALRDAYENLTAKVLAMLAWLDEHVAFEFVLKADDDSFARLDALLAELRAREPARRRRLYWGFFSGRGRVKPGGRWREAAWQLCDYYLPYALGGGYVLSADLVHYLRLSRDYLRAWHSEDVSLGAWLAPVDVQREHDPRFDTEYRSRGCSNQYLVTHKQSLEDMLEKHATLAREGRLCKREVQLRLSYVYDWSAPPSQCCQRREGIP

SEQ ID NO: 14674 - protein, 84 aa, Homo sapiens
MSGRVPLAEKALSEGYARLRYRDTSLLIWQQQQQKLESVPPGTYLSRSRSMWYSQYGNEAILVRDKNKLEVSRDTGQSKFCTIM

SEQ ID NO: 14675 - protein, 1905 aa, Homo sapiens
MEMEANDHFNFTGLPPAPAASGLKPSPSSGEGLYTNGSPMNFPQQGKSLNGDVNVNGLSTVSHTTTSGILNSAPHSSSTSHLHHPSVAYDCLWNYSQYPSANPGSNLKDPPLLSQFSGGQYPLNGILGGSRQPSSPSHNTNLRAGSQEFWANGTQSPMGLNFDSQELYDSFPDQNFEVMPNGPPSFFTSPQTSPMLGSSIQTFAPSQEVGSGIHPDEAAEKEMTSVVAENGTGLVGSLELEEEQPELKMCGYNGSVPSVESLHQEVSVLVPDPTVSCLDDPSHLPDQLEDTPILSEDSLEPFNSLAPEPVSGGLYGIDDTELMGAEDKLPLEDSPVISALDCPSLNNATAFSLLADDSQTSTSIFASPTSPPVLGESVLQDNSFDLNNGSDAEQEEMETQSSDFPPSLTQPAPDQSSTIQLHPATSPAVSPTTSPAVSLVVSPAASPEISPEVCPAASTVVSPAVFSVVSPASSAVLPAVSLEVPLTASVTSPKASPVTSPAAAFPTASPANKDVSSFLETTADVEEITGEGLTASGSGDVMRRRIATPEEVRLPLQHGWRREVRIKKGSHRWQGETWYYGPCGKRMKQFPEVIKYLSRNVVHSVRREHFSFSPRMPVGDFFEERDTPEGLQWVQLSAEEIPSRIQAITGKRGRPRNTEKAKTKEVPKVKRGRGRPPKVKITELLNKTDNRPLKKLEAQETLNEEDKAKIAKSKKKMRQKVQRGECQTTIQGQARNKRKQETKSLKQKEAKKKSKAEKEKGKTKQEKLKEKVKREKKEKVKMKEKEEVTKAKPACKADKTLATQRRLEERQRQQMILEEMKKPTEDMCLTDHQPLPDFSRVPGLTLPSGAFSDCLTIVEFLHSFGKVLGFDPAKDVPSLGVLQEGLLCQGDSLGEVQDLLVRLLKAALHDPGFPSYCQSLKILGEKVSEIPLTRDNVSEILRCFLMAYGVEPALCDRLRTQPFQAQPPQQKAAVLAFLVHELNGSTLIINEIDKTLESMSSYRKNKWIVEGRLRRLKTVLAKRTGRSEVEMEGPEECLGRRRSSRIMEETSGMEEEEEEESIAAVPGRRGRRDGEVDATASSIPELERQIEKLSKRQLFFRKKLLHSSQMLRAVSLGQDRYRRRYWVLPYLAGIFVEGTEGNLVPEEVIKKETDSLKVAAHASLNPALFSMKMELAGSNTTASSPARARGRPRKTKPGSMQPRHLKSPVRGQDSEQPQAQLQPEAQLHAPAQPQPQLQLQLQSHKGFLEQEGSPLSLGQSQHDLSQSAFLSWLSQTQSHSSLLSSSVLTPDSSPGKLDPAPSQPPEEPEPDEAESSPDPQALWFNISAQMPCNAAPTPPPAVSEDQPTPSPQQLASSKPMNRPSAANPCSPVQFSSTPLAGLAPKRRAGDPGEMPQSPTGLGQPKRRGRPPSKFFKQMEQRYLTQLTAQPVPPEMCSGWWWIRDPEMLDAMLKALHPRGIREKALHKHLNKHRDFLQEVCLRPSADPIFEPRQLPAFQEGIMSWSPKEKTYETDLAVLQWVEELEQRVIMSDLQIRGWTCPSPDSTREDLAYCEHLSDSQEDITWRGRGREGLAPQRKTTNPLDLAVMRLAALEQNVERRYLREPLWPTHEVVLEKALLSTPNGAPEGTTTEISYEITPRIRVWRQTLERCRSAAQVCLCLGQLERSIAWEKSVNKVTCLVCRKGDNDEFLLLCDGCDRGCHIYCHRPKMEAVPEGDWFCTVCLAQQVEGEFTQKPGFPKRGQKRKSGYSLNFSEGDGRRRRVLLRGRESPAAGPRYSEEGLSPSKRRRLSMRNHHSDLTFCEIILMEMESHDAAWPFLEPVNPRLVSGYRRIIKNPMDFSTMRERLLRGGYTSSEEFAADALLVFDNCQTFNEDDSEVGKAGHIMRRFFESRWEEFYQGKQANL

SEQ ID NO: 14676 - protein, 1878 aa, Homo sapiens
MEMEANEANDHFNFTGLPPAPAASGLKPSPSSGEGLYTNGSPMNFPQQGKSLNGDVNVNGLSTVSHTTTSGILNSAPHSSSTSHLHHPSVAYDCLWNYSQYPSANPGSNLKDPPLLSQFSGGQYPLNGILGGSRQPSSPSHNTNLRAGSQEFWANGTQSPMGLNFDSQELYDSFPDQNFEEVGSGIHPDEAAEKEMTSVVAENGTGLVGSLELEEEQPELKMCGYNGSVPSVESLHQEVSVLVPDPTVSCLDDPSHLPDQLEDTPILSEDSLEPFNSLAPEPVSGGLYGIDDTELMGAEDKLPLEDSPVISALDCPSLNNATAFSLLADDSQTSTSIFASPTSPPVLGESVLQDNSFDLNNGSDAEQEEMETQSSDFPPSLTQPAPDQSSTIQLHPATSPAVSPTTSPAVSLVVSPAASPEISPEVCPAASTVVSPAVFSVVSPASSAVLPAVSLEVPLTASVTSPKASPVTSPAAAFPTASPANKDVSSFLETTADVEEITGEGLTASGSGDVMRRRIATPEEVRLPLQHGWRREVRIKKGSHRWQGETWYYGPCGKRMKQFPEVIKYLSRNVVHSVRREHFSFSPRMPVGDFFEERDTPEGLQWVQLSAEEIPSRIQAITGKRGRPRNTEKAKTKEVPKVKRGRGRPPKVKITELLNKTDNRPLKKLEAQETLNEEDKAKIAKSKKKMRQKVQRGECQTTIQGQARNKRKQETKSLKQKEAKKKSKAEKEKGKTKQEKLKEKVKREKKEKVKMKEKEEVTKAKPACKADKTLATQRRLEERQRQQMILEEMKKPTEDMCLTDHQPLPDFSRVPGLTLPSGAFSDCLTIVEFLHSFGKVLGFDPAKDVPSLGVLQEGLLCQGDSLGEVQDLLVRLLKAALHDPGFPSYCQSLKILGEKVSEIPLTRDNVSEILRCFLMAYGVEPALCDRLRTQPFQAQPPQQKAAVLAFLVHELNGSTLIINEIDKTLESMSSYRKNKWIVEGRLRRLKTVLAKRTGRSEVEMEGPEECLGRRRSSRIMEETSGMEEEEEEESIAAVPGRRGRRDGEVDATASSIPELERQIEKLSKRQLFFRKKLLHSSQMLRAVSLGQDRYRRRYWVLPYLAGIFVEGTEGNLVPEEVIKKETDSLKVAAHASLNPALFSMKMELAGSNTTASSPARARGRPRKTKPGSMQPRHLKSPVRGQDSEQPQAQLQPEAQLHAPAQPQPQLQLQLQSHKGFLEQEGSPLSLGQSQHDLSQSAFLSWLSQTQSHSSLLSSSVLTPDSSPGKLDPAPSQPPEEPEPDEAESSPDPQALWFNISAQMPCNAAPTPPPAVSEDQPTPSPQQLASSKPMNRPSAANPCSPVQFSSTPLAGLAPKRRAGDPGEMPQSPTGLGQPKRRGRPPSKFFKQMEQRYLTQLTAQPVPPEMCSGWWWIRDPEMLDAMLKALHPRGIREKALHKHLNKHRDFLQEVCLRPSADPIFEPRQLPAFQEGIMSWSPKEKTYETDLAVLQWVEELEQRVIMSDLQIRGWTCPSPDSTREDLAYCEHLSDSQEDITWRGRGREGLAPQRKTTNPLDLAVMRLAALEQNVERRYLREPLWPTHEVVLEKALLSTPNGAPEGTTTEISYEITPRIRVWRQTLERCRSAAQVCLCLGQLERSIAWEKSVNKVTCLVCRKGDNDEFLLLCDGCDRGCHIYCHRPKMEAVPEGDWFCTVCLAQQVEGEFTQKPGFPKRGQKRKSGYSLNFSEGDGRRRRVLLRGRESPAAGPRYSEEGLSPSKRRRLSMRNHHSDLTFCEIILMEMESHDAAWPFLEPVNPRLVSGYRRIIKNPMDFSTMRERLLRGGYTSSEEFAADALLVFDNCQTFNEDDSEVGKAGHIMRRFFESRWEEFYQGKQANL

SEQ ID NO: 14677 - protein, 1901 aa, Homo sapiens
MEMEANDHFNFTGLPPAPAASGLKPSPSSGEGLYTNGSPMNFPQQGKSLNGDVNVNGLSTVSHTTTSGILNSAPHSSSTSHLHHPSVAYDCLWNYSQYPSANPGSNLKDPPLLSQFSGGQYPLNGILGGSRQPSSPSHNTNLRAGSQEFWANGTQSPMGLNFDSQELYDSFPDQNFEVMPNGPPSFFTSPQTSPMLGSSIQTFAPSQEVGSGIHPDEAAEKEMTSVVAENGTGLVGSLELEEEQPELKMCGYNGSVPSVESLHQEVSVLVPDPTVSCLDDPSHLPDQLEDTPILSEDSLEPFNSLAPEPVSGGLYGIDDTELMGAEDKLPLEDSPVISALDCPSLNNATAFSLLADDSQTSTSIFASPTSPPVLGESVLQDNSFDLNNGSDAEQEEMETQSSDFPPSLTQPAPDQSSTIQLHPATSPAVSPTTSPAVSLVVSPAASPEISPEVCPAASTVVSPAVFSVVSPASSAVLPAVSLEVPLTASVTSPKASPVTSPAAAFPTASPANKDVSSFLETTADVEEITGEGLTASGSGDVMRRRIATPEEVRLPLQHGWRREVRIKKGSHRWQGETWYYGPCGKRMKQFPEVIKYLSRNVVHSVRREHFSFSPRMPVGDFFEERDTPEGLQWVQLSAEEIPSRIQAITGKRGRPRNTEKAKTKEVPKVKRGRGRPPKVKITELLNKTDNRPLKKLEAQETLNEEDKAKIAKSKKKMRQKVQRGECQTTIQGQARNKRKQETKSLKQKEAKKKSKAEKEKGKTKQEKLKEKVKREKKEKVKMKEKEEVTKAKPACKADKTLATQRRLEERQRQQMILEEMKKPTEDMCLTDHQPLPDFSRVPGLTLPSGAFSDCLTIVEFLHSFGKVLGFDPAKDVPSLGVLQEGLLCQGDSLGEVQDLLVRLLKAALHDPGFPSYCQSLKILGEKVSEIPLTRDNVSEILRCFLMAYGVEPALCDRLRTQPFQAQPPQQKAAVLAFLVHELNGSTLIINEIDKTLESMSSYRKNKWIVEGRLRRLKTVLAKRTGRSEVEMEGPEECLGRRRSSRIMEETSGMEEEEEEESIAAVPGRRGRRDGEVDATASSIPELERQIEKLSKRQLFFRKKLLHSSQMLRAVSLGQDRYRRRYWVLPYLAGIFVEGTEGNLVPEEVIKKETDSLKVAAHASLNPALFSMKMELAGSNTTASSPARARGRPRKTKPGSMQPRHLKSPVRGQDSEQPQAQLQPEAQLHAPAQPQPQLQLQLQSHKGFLEQEGSPLSLGQSQHDLSQSAFLSWLSQTQSHSSLLSSSVLTPDSSPGKLDPAPSQPPEEPEPDEAESSPDPQALWFNISAQMPCNAAPTPPPAVSEDQPTPSPQQLASSKPMNRPSAANPCSPVQFSSTPLAGLAPKRRAGDPGEMPQSPTGLGQPKRRGRPPSKFFKQMEQRYLTQLTAQPVPPGWWWIRDPEMLDAMLKALHPRGIREKALHKHLNKHRDFLQEVCLRPSADPIFEPRQLPAFQEGIMSWSPKEKTYETDLAVLQWVEELEQRVIMSDLQIRGWTCPSPDSTREDLAYCEHLSDSQEDITWRGRGREGLAPQRKTTNPLDLAVMRLAALEQNVERRYLREPLWPTHEVVLEKALLSTPNGAPEGTTTEISYEITPRIRVWRQTLERCRSAAQVCLCLGQLERSIAWEKSVNKVTCLVCRKGDNDEFLLLCDGCDRGCHIYCHRPKMEAVPEGDWFCTVCLAQQVEGEFTQKPGFPKRGQKRKSGYSLNFSEGDGRRRRVLLRGRESPAAGPRYSEEGLSPSKRRRLSMRNHHSDLTFCEIILMEMESHDAAWPFLEPVNPRLVSGYRRIIKNPMDFSTMRERLLRGGYTSSEEFAADALLVFDNCQTFNEDDSEVGKAGHIMRRFFESRWEEFYQGKQANL

SEQ ID NO: 14678 - protein, 998 aa, Homo sapiens [sequence omitted]

SEQ ID NO: 14679 - protein, 1205 aa, Homo sapiens
MRKPRRKSRQNAEGRRSPSPYSLKCSPTRETLTYAQAQRIVEVDIDGRLHRISIYDPLKIITEDELTAQDITECNSNKENSEQPQFPGKSKKPSSKGKKKESCSKHASGTSFHLPQPSFRMVDSGIQPEAPPLPAAYYRYIEKPPEDLDAEVEYDMDEEDLAWLDMVNEKRRVDGHSLVSADTFELLVDRLEKESYLESRSSGAQQSLIDEDAFCCVCLDDECHNSNVILFCDICNLAVHQECYGVPYIPEGQWLCRCCLQSPSRPVDCILCPNKGGAFKQTSDGHWAHVVCAIWIPEVCFANTVFLEPIEGIDNIPPARWKLTCYICKQKGLGAAIQCHKVNCYTAFHVTCAQRAGLFMKIEPMRETSLNGTIFTVRKTAYCEAHSPPGAATARRKGDSPRSISETGDEEGLKEGDGEEEEEEEVEEEEQEAQGGVSGSLKGVPKKSKMSLKQKIKKEPEEAGQDTPSTLPMLAVPQIPSYRLNKICSGLSFQRKNQFMQRLHNYWLLKRQARNGVPLIRRLHSHLQSQRNAEQREQDEKTSAVKEELKYWQKLRHDLERARLLIELIRKREKLKREQVKVQQAAMELELMPFNVLLRTTLDLLQEKDPAHIFAEPVNLSEVPDYLEFISKPMDFSTMRRKLESHLYRTLEEFEEDFNLIVTNCMKYNAKDTIFHRAAVRLRDLGGAILRHARRQAENIGYDPERGTHLPESPKLEDFYRFSWEDVDNILIPENRAHLSPEVQLKELLEKLDLVSAMRSSGARTRRVRLLRREINALRQKLAQPPPPQPPSLNKTVSNGELPAGPQGDAAVLEQALQEEPEDDGDRDDSKLPPPPTLEPTGPAPSLSEQESPPEPPTLKPINDSKPPSRFLKPRKVEEDELLEKSPLQLGNEPLQRLLSDNGINRLSLMAPDTPAGTPLSGVGRRTSVLFKKAKNGVKLQRSPDRVLENGEDHGVAGSPASPASIEEERHSRKRPRSRSCSESEGERSPQQEEETGMTNGFGKHTESGSDSECSLGLSGGLAFEACSGLTPPKRSRGKPALSRVPFLEGVNGDSDYNGSGRSLLLPFEDRGDLEPLELVWAKCRGYPSYPALIIDPKMPREGLLHNGVPIPVPPLDVLKLGEQKQAEAGEKLFLVLFFDNKRTWQWLPRDKVLPLGVEDTVDKLKMLEGRKTSIRKSVQVAYDRAMIHLSRVRGPHSFVTSSYL

SEQ ID NO: 14680 - protein, 935 aa, Homo sapiens
MRKPRRKSRQNAEGRRSPSPYSLKCSPTRETLTYAQAQRIVEVDIDGRLHRISIYDPLKIITEDELTAQDITECNSNKENSEQPQFPGKSKKPSSKGKKKESCSKHASGTSFHLPQPSFRMVDSGIQPEAPPLPAAYYRYIEKPPEDLDAEVEYDMDEEDLAWLDMVNEKRRVDGHSLVSADTFELLVDRLEKESYLESRSSGAQQSLIDEDAFCCVCLDDECHNSNVILFCDICNLAVHQECYGVPYIPEGQWLCRCCLQSPSRPVDCILCPNKGGAFKQTSDGHWAHVVCAIWIPEVCFANTVFLEPIEGIDNIPPARWKLTCYICKQKGLGAAIQCHKVNCYTAFHVTCAQRAGLFMKIEPMRETSLNGTIFTVRKTAYCEAHSPPGAATARRKGDSPRSISETGDEEGLKEGDGEEEEEEEVEEEEQEAQGGVSGSLKGVPKKSKMSLKQKIKKEPEEAGQDTPSTLPMLAVPQIPSYRLNKICSGLSFQRKNQFMQRLHNYWLLKRQARNGVPLIRRLHSHLQSQRNAEQREQDEKTSAVKEELKYWQKLRHDLERARLLIELIRKREKLKREQVKVQQAAMELELMPFNVLLRTTLDLLQEKDPAHIFAEPVNLSEVPDYLEFISKPMDFSTMRRKLESHLYRTLEEFEEDFNLIVTNCMKYNAKDTIFHRAAVRLRDLGGAILRHARRQAENIGYDPERGTHLPESPKLEDFYRFSWEDGMTNGFGKHTESGSDSECSLGLSGGLAFEACSGLTPPKRSRGKPALSRVPFLEGVNGDSDYNGSGRSLLLPFEDRGDLEPLELVWAKCRGYPSYPALIIDPKMPREGLLHNGVPIPVPPLDVLKLGEQKQAEAGEKLFLVLFFDNKRTWQWLPRDKVLPLGVEDTVDKLKMLEGRKTSIRKSVQVAYDRAMIHLSRVRGPHSFVTSSYL

SEQ ID NO: 14681 - protein, 871 aa, Homo sapiens
MRKPRRKSRQNAEGRRSPSPYSLKCSPTRETLTYAQAQRIVEVDIDGRLHRISIYDPLKIITEDELTAQDITECNSNKENSEQPQFPGKSKKPSSKGKKKESCSKHASGTSFHLPQPSFRMVDSGIQPEAPPLPAAYYRYIEKPPEDLDAEVEYDMDEEDLAWLDMVNEKRRVDGHSLVSADTFELLVDRLEKESYLESRSSGAQQSLIDEDAFCCVCLDDECHNSNVILFCDICNLAVHQECYGVPYIPEGQWLCRCCLQSPSRPVDCILCPNKGGAFKQTSDGHWAHVVCAIWIPEVCFANTVFLEPIEGIDNIPPARWKLTCYICKQKGLGAAIQCHKVNCYTAFHVTCAQRAGLFMKIEPMRETSLNGTIFTVRKTAYCEAHSPPGAATARRKGDSPRSISETGDEEGLKEGDGEEEEEEEVEEEEQEAQGGVSGSLKGVPKKSKMSLKQKIKKEPEEAGQDTPSTLPMLAVPQIPSYRLNKICSGLSFQRKNQFMQRLHNYWLLKRQARNGVPLIRRLHSHLQSQRNAEQREQDEKTSAVKEELKYWQKLRHDLERARLLIELIRKREKLKREQVKVQQAAMELELMPFNVLLRTTLDLLQEKDPAHIFAEPVNLSEVPDYLEFISKPMDFSTMRRKLESHLYRTLEEFEEDFNLIVTNCMKYNAKDTIFHRAAVRLRDLGGAILRHARRQAENIGYDPERGTHLPESPKLEDFYRFSWEDGRSLLLPFEDRGDLEPLELVWAKCRGYPSYPALIIDPKMPREGLLHNGVPIPVPPLDVLKLGEQKQAEAGEKLFLVLFFDNKRTWQWLPRDKVLPLGVEDTVDKLKMLEGRKTSIRKSVQVAYDRAMIHLSRVRGPHSFVTSSYL

SEQ ID NO: 14682 - protein, 1001 aa, Homo sapiens
MSGPGNKRAAGDGGSGPPEKKLSREEKTTTTLIEPIRLGGISSTEEMDLKVLQFKNKKLAERLEQRQACEDELRERIEKLEKRQATDDATLLIVNRYWAQLDETVEALLRCHESQGELSSAPEAPGTQEGPTCDGTPLPEPGTSELRDPLLMQLRPPLSEPALAFVVALGASSSEEVELELQGRMEFSKAAVSRVVEASDRLQRRVEELCQRVYSRGDSEPLSEAAQAHTRELGRENRRLQDLATQLQEKHHRISLEYSELQDKVTSAETKVLEMETTVEDLQWDIEKLRKREQKLNKHLAEALEQLNSGYYVSGSSSGFQGGQITLSMQKFEMLNAELEENQELANSRMAELEKLQAELQGAVRTNERLKVALRSLPEEVVRETGEYRMLQAQFSLLYNESLQVKTQLDEARGLLLATKNSHLRHIEHMESDELGLQKKLRTEVIQLEDTLAQVRKEYEMLRIEFEQNLAANEQAGPINREMRHLISSLQNHNHQLKGDAQRYKRKLREVQAEIGKLRAQASGSAHSTPNLGHPEDSGVSAPAPGKEEGGPGPVSTPDNRKEMAPVPGTTTTTTSVKKEELVPSEEDFQGITPGAQGPSSRGREPEARPKRELREREGPSLGPPPVASALSRADREKAKVEETKRKESELLKGLRAELKKAQESQKEMKLLLDMYKSAPKEQRDKVQLMAAERKAKAEVDELRSRIRELEERDRRESKKIADEDALRRIRQAEEQIEHLQRKLGATKQEEEALLSEMDVTGQAFEDMQEQNGRLLQQLREKDDANFKLMSERIKANQIHKLLREEKDELGEQVLGLKSQVDAQLLTVQKLEEKERALQGSLGGVEKELTLRSQALELNKRKAVEAAQLAEDLKVQLEHVQTRLREIQPCLAESRAAREKESFNLKRAQEDISRLRRKLEKQRKVEVYADADEILQEEIKEYKARLTCPCCNTRKKDAVLTKCFHVFCFECVRGRYEARQRKCPKCNAAFGAHDFHRIYIS

SEQ ID NO: 14683 - protein, 838 aa, Homo sapiens
MSGPGNKRAAGDGGSGPPEKKLSREEKTTTTLIEPIRLGGISSTEEMDLKVLQFKNKKLAERLEQRQACEDELRERIEKLEKRQATDDATLLIVNRYWAQLDETVEALLRCHESQGELSSAPEAPGTQEGPTCDGTPLPEPGTSELRDPLLMQLRPPLSEPALAFVVALGASSSEEVELELQGRMEFSKAAVSRVVEASDRLQRRVEELCQRVYSRGDSEPLSEAAQAHTRELGRENRRLQDLATQLQEKHHRISLEYSELQDKVTSAETKVLEMETTVEDLQWDIEKLRKREQKLNKHLAEALEQLNSGYYVSGSSSGFQGGQITLSMQKFEMLNAELEENQELANSRMAELEKLQAELQGAVRTNERLKVALRSLPEEVVRETGEYRMLQAQFSLLYNESLQVKTQLDEARGLLLATKNSHLRHIEHMESDELGLQKKLRTEVIQLEDTLAQVRKEYEMLRIEFEQNLAANEQAGPINREMRHLISSLQNHNHQLKGDAQRYKRKLREVQAEIGKLRAQASGSAHSTPNLGHPEDSGVSAPAPGKEEGGPGPVSTPDNRKEMAPVPGTTTTTTSVKKEELVPSEEDFQGITPGAQGPSSRGREPEARPKRELREREGPSLGPPPVASALSRADREKAKVEETKRKESELLKGLRAELKKAQESQKEMKLLLDMYKSAPKEQRDKVQLMAAERKAKAEVDELRSRIRELEERDRRESKKIADEDALRRIRQAEEQIEHLQRKLGATKQEEEALLSEMDVTGQAFEDMQEQNGRLLQQLREKDDANFKLMSERIKANQIHKLLREEKDELGEQVLGLKSQVWPPPACRLELERWGSWP

SEQ ID NO: 14684 - protein, 901 aa, Homo sapiens
MSGPGNKRAAGDGGSGPPEKKLSREEKTTTTLIEPIRLGGISSTEEMDLKVLQFKNKKLAERLEQRQACEDELRERIEKLEKRQATDDATLLIVNRYWAQLDETVEALLRCHESQGELSSAPEAPGTQEGPTCDGTPLPEPGTSELRDPLLMQLRPPLSEPALAFVVALGASSSEEVELELQGRMEFSKAAVSRVVEASDRLQRRVEELCQRVYSRGDSEPLSEAAQAHTRELGRENRRLQDLATQLQEKHHRISLEYSELQDKVTSAETKVLEMETTVEDLQWDIEKLRKREQKLNKHLAEALEQLNSGYYVSGSSSGFQGGQITLSMQKSDELGLQKKLRTEVIQLEDTLAQVRKEYEMLRIEFEQNLAANEQAGPINREMRHLISSLQNHNHQLKGDAQRYKRKLREVQAEIGKLRAQASGSAHSTPNLGHPEDSGVSAPAPGKEEGGPGPVSTPDNRKEMAPVPGTTTTTTSVKKEELVPSEEDFQGITPGAQGPSSRGREPEARPKRELREREGPSLGPPPVASALSRADREKAKVEETKRKESELLKGLRAELKKAQESQKEMKLLLDMYKSAPKEQRDKVQLMAAERKAKAEVDELRSRIRELEERDRRESKKIADEDALRRIRQAEEQIEHLQRKLGATKQEEEALLSEMDVTGQAFEDMQEQNGRLLQQLREKDDANFKLMSERIKANQIHKLLREEKDELGEQVLGLKSQVDAQLLTVQKLEEKERALQGSLGGVEKELTLRSQALELNKRKAVEAAQLAEDLKVQLEHVQTRLREIQPCLAESRAAREKESFNLKRAQEDISRLRRKLEKQRKVEVYADADEILQEEIKEYKARLTCPCCNTRKKDAVLTKCFHVFCFECVRGRYEARQRKCPKCNAAFGAHDFHRIYIS

SEQ ID NO: 14685 - protein, 2320 aa, Homo sapiens
MAEPSSARRPVPLIESELYFLIARYLSAGPCRRAAQVLVQELEQYQLLPKRLDWEGNEHNRSYEELVLSNKHVAPDHLLQICQRIGPMLDKEIPPSISRVTSLLGAGRQSLLRTAKDCRHTVWKGSAFAALHRGRPPEMPVNYGSPPNLVEIHRGKQLTGCSTFSTAFPGTMYQHIKMHRRILGHLSAVYCVAFDRTGHRIFTGSDDCLVKIWSTHNGRLLSTLRGHSAEISDMAVNYENTMIAAGSCDKIIRVWCLRTCAPVAVLQGHTGSITSLQFSPMAKGSQRYMVSTGADGTVCFWQWDLESLKFSPRPLKFTEKPRPGVQMLCSSFSVGGMFLATGSTDHVIRMYFLGFEAPEKIAELESHTDKVDSIQFCNNGDRFLSGSRDGTARIWRFEQLEWRSILLDMATRISGDLSSEEERFMKPKVTMIAWNQNDSIVVTAVNDHVLKVWNSYTGQLLHNLMGHADEVFVLETHPFDSRIMLSAGHDGSIFIWDITKGTKMKHYFNMIEGQGHGAVFDCKFSQDGQHFACTDSHGHLLIFGFGCSKPYEKIPDQMFFHTDYRPLIRDSNNYVLDEQTQQAPHLMPPPFLVDVDGNPHPTKYQRLVPGRENSADEHLIPQLGYVATSDGEVIEQIISLQTNDNDERSPESSILDGMIRQLQQQQDQRMGADQDTIPRGLSNGEETPRRGFRRLSLDIQSPPNIGLRRSGQVEGVRQMHQNAPRSQIATERDLQAWKRRVVVPEVPLGIFRKLEDFRLEKGEEERNLYIIGRKRKTLQLSHKSDSVVLVSQSRQRTCRRKYPNYGRRNRSWRELSSGNESSSSVRHETSCDQSEGSGSSEEDEWRSDRKSESYSESSSDSSSRYSDWTADAGINLQPPLRTSCRRRITRFCSSSEDEISTENLSPPKRRRKRKKENKPKKENLRRMTPAELANMEHLYEFHPPVWITDTTLRKSPFVPQMGDEVIYFRQGHEAYIEAVRRNNIYELNPNKEPWRKMDLRDQELVKIVGIRYEVGPPTLCCLKLAFIDPATGKLMDKSFSIRYHDMPDVIDFLVLRQFYDEARQRNWQSCDRFRSIIDDAWWFGTVLSQEPYQPQYPDSHFQCYIVRWDNTEIEKLSPWDMEPIPDNVDPPEELGASISVTTDELEKLLYKPQAGEWGQKSRDEECDRIISGIDQLLNLDIAAAFAGPVDLCTYPKYCTVVAYPTDLYTIRMRLVNRFYRRLSALVWEVRYIEHNARTFNEPESVIARSAKKITDQLLKFIKNQHCTNISELSNTSENDEQNAEDLDDSDLPKTSSGRRRVHDGKKSIRATNYVESNWKKQCKELVNLIFQCEDSEPFRQPVDLVEYPDYRDIIDTPMDFGTVRETLDAGNYDSPLEFCKDIRLIFSNAKAYTPNKRSKIYSMTLRLSALFEEKMKKISSDFKIGQKFNEKLRRSQRFKQRQNCKGDSQPNKSIRNLKPKRLKSQTKIIPELVGSPTQSTSSRTAYLGTHKTSAGISSGVTSGDSSDSAESSERRKRNRPITNGSTLSESEVEDSLATSLSSSASSSSEESKESSRARESSSRSGLSRSSNLRVTRTRAAQRKTGPVSLANGCGRKATRKRVYLSDSDNNSLETGEILKARAGNNRKVLRKCAAVAANKIKLMSDVEENSSSESVCSGRKLPHRNASAVARKKLLHNSEDEQSLKSEIEEEELKDENQLLPVSSSHTAQSNVDESENRDSESESDLRVARKNWHANGYKSHTPAPSKTKFLKIESSEEDSKSHDSDHACNRTAGPSTSVQKLKAESISEEADSEPGRSGGRKYNTFHKNASFFKKTKILSDSEDSESEEQDREDGKCHKMEMNPISGNLNCDPIAMSQCSSDHGCETDLDSDDDKIEKPNNFMKDSASQDNGLSRKISRKRVCSSDSDSSLQVVKKSSKARTGLLRITRRCAATAANKIKLMSDVEDVSLENVHTRSKNGRKKPLHLACTTAKKKLSDCEGSVHCEVPSEQYACEGKPPDPDSEGSTKVLSQALNGDSDSEDMLNSEHKHRHTNIHKIDAPSKRKSSSVTSSGEDSKSHIPGSETDRTFSSESTLAQKATAENNFEVELNYGLRRWNGRRLRTYGKAPFSKTKVIHDSQETAEKEVKRKRSHPELENVKISETTGNSKFRPDTSSKSSDLGSVTESDIDCTDNTKTKRRKTKGKAKVVRKEFVPRDREPNTKVRTCMHNQKDAVQMPSETLKAKMVPEKVPRRCATVAANKIKIMSNLKETISGPENVWIRKSSRKLPHRNASAAAKKKLLNVYKEDDTTINSESEKELEDINRKMLFLRGFRSWKENAQ

SEQ ID NO: 14686 - protein, 2269 aa, Homo sapiens
MAEPSSARRPVPLIESELYFLIARYLSAGPCRRAAQVLVQELEQYQLLPKRLDWEGNEHNRSYEELVLSNKHVAPDHLLQICQRIGPMLDKEIPPSISRVTSLLGAGRQSLLRTAKDCRHTVWKGSAFAALHRGRPPEMPVNYGSPPNLVEIHRGKQLTGCSTFSTAFPGTMYQHIKMHRRILGHLSAVYCVAFDRTGHRIFTGSDDCLVKIWSTHNGRLLSTLRGHSAEISDMAVNYENTMIAAGSCDKIIRVWCLRTCAPVAVLQGHTGSITSLQFSPMAKGSQRYMVSTGADGTVCFWQWDLESLKFSPRPLKFTEKPRPGVQMLCSSFSVGGMFLATGSTDHVIRMYFLGFEAPEKIAELESHTDKVDSIQFCNNGDRFLSGSRDGTARIWRFEQLEWRSILLDMATRISGDLSSEEERFMKPKVTMIAWNQNDSIVVTAVNDHVLKVWNSYTGQLLHNLMGHADEVFVLETHPFDSRIMLSAGHDGSIFIWDITKGTKMKHYFNMIEGQGHGAVFDCKFSQDGQHFACTDSHGHLLIFGFGCSKPYEKIPDQMFFHTDYRPLIRDSNNYVLDEQTQQAPHLMPPPFLVDVDGNPHPTKYQRLVPGRENSADEHLIPQLGYVATSDGEVIEQIISLQTNDNDERSPESSILDGMIRQLQQQQDQRMGADQDTIPRGLSNGEETPRRGFRRLSLDIQSPPNIGLRRSGQVEGVRQMHQNAPRSQIATERDLQAWKRRVVVPEVPLGIFRKLEDFRLEKGEEERNLYIIGRKRKTLQLSHKSDSVVLVSQSRQRTCRRKYPNYGRRNRSWRELSSGNESSSSVRHETSCDQSEGSGSSEEDEWRSDRKSESYSESSSDSSSRYSDWTADAGINLQPPLRTSCRRRITRFCSSSEDEISTENLSPPKRRRKRKKENKPKKENLRRMTPAELANMEHLYEFHPPVWITDTTLRKSPFVPQMGDEVIYFRQGHEAYIEAVRRNNIYELNPNKEPWRKMDLRDQELVKIVGIRYEVGPPTLCCLKLAFIDPATGKLMDKSFSIRYHDMPDVIDFLVLRQFYDEARQRNWQSCDRFRSIIDDAWWFGTVLSQEPYQPQYPDSHFQCYIVRWDNTEIEKLSPWDMEPIPDNVDPPEELGASISVTTDELEKLLYKPQAGEWGQKSRDEECDRIISGIDQLLNLDIAAAFAGPVDLCTYPKYCTVVAYPTDLYTIRMRLVNRFYRRLSALVWEVRYIEHNARTFNEPESVIARSAKKITDQLLKFIKNQHCTNISELSNTSENDEQNAEDLDDSDLPKTSSGRRRVHDGKKSIRATNYVESNWKKQCKELVNLIFQCEDSEPFRQPVDLVEYPDYRDIIDTPMDFGTVRETLDAGNYDSPLEFCKDIRLIFSNAKAYTPNKRSKIYSMTLRLSALFEEKMKKISSDFKIGQKFNEKLRRSQRFKQRQNCKGDSQPNKSIRNLKPKRLKSQTKIIPELVGSPTQSTSSRTAYLGTHKTSAGISSGVTSGDSSDSAESSERRKRNRPITNGSTLSESEVEDSLATSLSSSASSSSEESKESSRARESSSRSGLSRSSNLRVTRTRAAQRKTGPVSLANGCGRKATRKRVYLSDSDNNSLETGEILKARAGNNRKVLRKCAAVAANKIKLMSDVEENSSSESVCSGRKLPHRNASAVARKKLLHNSEDEQSLKSEIEEEELKDENQLLPVSSSHTAQSNVDESENRDSESESDLRVARKNWHANGYKSHTPAPSKTKFLKIESSEEDSKSHDSDHACNRTAGPSTSVQKLKAESISEEADSEPGRSGGRKYNTFHKNASFFKKTKILSDSEDSESEEQDREDGKCHKMEMNPISGNLNCDPIAMSQCSSDHGCETDLDSDDDKIEKPNNFMKDSASQDNGLSRKISRKRVCSSDSDSSLQVVKKSSKARTGLLRITRRCAATAANKIKLMSDVEDVSLENVHTRSKNGRKKPLHLACTTAKKKLSDCEGSVHCEVPSEQYACEGKPPDPDSEGSTKVLSQALNGDSDSEDMLNSEHKHRHTNIHKIDAPSKRKSSSVTSSGEDSKSHIPGSETDRTFSSESTLAQKATAENNFEVELNYGLRRWNGRRLRTYGKAPFSKTKVIHDSQETAEKEVKRKRSHPELENVKISETTGNSKFRPDTSSKSSDLGSVTESDIDCTDNTKTKRRKTKGKAKVVRKGKTFTANISKTVRRQRQSKRPRLSVDDNDWEDLDYAKSKRVLRRSKIKTRNQGRRTVRYHDGDDDRSLENVLDFNGCTL

SEQ ID NO: 14687 - protein, 2199 aa, Homo sapiens
MAEPSSARRPVPLIESELYFLIARYLSAGPCRRAAQVLVQELEQYQLLPKRLDWEGNEHNRSYEELVLSNKHVAPDHLLQICQRIGPMLDKEIPPSISRVTSLLGAGRQSLLRTAKDCRHTVWKGSAFAALHRGRPPEMPVNYGSPPNLVEIHRGKQLTGCSTFSTAFPGTMYQHIKMHRRILGHLSAVYCVAFDRTGHRIFTGSDDCLVKIWSTHNGRLLSTLRGHSAEISDMAVNYENTMIAAGSCDKIIRVWCLRTCAPVAVLQGHTGSITSLQFSPMAKGSQRYMVSTGADGTVCFWQWDLESLKFSPRPLKFTEKPRPGVQMLCSSFSVGGMFLATGSTDHVIRMYFLGFEAPEKIAELESHTDKVDSIQFCNNGDRFLSGSRDGTARIWRFEQLEWRSILLDMATRISGDLSSEEERFMKPKVTMIAWNQNDSIVVTAVNDHVLKVWNSYTGQLLHNLMGHADEVFVLETHPFDSRIMLSAGHDGSIFIWDITKGTKMKHYFNMIEGQGHGAVFDCKFSQDGQHFACTDSHGHLLIFGFGCSKPYEKIPDQMFFHTDYRPLIRDSNNYVLDEQTQQAPHLMPPPFLVDVDGNPHPTKYQRLVPGRENSADEHLIPQLGYVATSDGEVIEQIISLQTNDNDERSPESSILDGMIRQLQQQQDQRMGADQDTIPRGLSNGEETPRRGFRRLSLDIQSPPNIGLRRSGQVEGVRQMHQNAPRSQIATERDLQAWKRRVVVPEVPLGIFRKLEDFRLEKGEEERNLYIIGRKRKTLQLSHKSDSVVLVSQSRQRTCRRKYPNYGRRNRSWRELSSGNESSSSVRHETSCDQSEGSGSSEEDEWRSDRKSESYSESSSDSSSRYSDWTADAGINLQPPLRTSCRRRITRFCSSSEDEISTENLSPPKRRRKRKKENKPKKENLRRMTPAELANMEHLYEFHPPVWITDTTLRKSPFVPQMGDEVIYFRQGHEAYIEAVRRNNIYELNPNKEPWRKMDLRDQELVKIVGIRYEVGPPTLCCLKLAFIDPATGKLMDKSFSIRYHDMPDVIDFLVLRQFYDEARQRNWQSCDRFRSIIDDAWWFGTVLSQEPYQPQYPDSHFQCYIVRWDNTEIEKLSPWDMEPIPDNVDPPEELGASISVTTDELEKLLYKPQAGEWGQKSRDEECDRIISGIDQLLNLDIAAAFAGPVDLCTYPKYCTVVAYPTDLYTIRMRLVNRFYRRLSALVWEVRYIEHNARTFNEPESVIARSAKKITDQLLKFIKNQHCTNISELSNTSENDEQNAEDLDDSDLPKTSSGRRRVHDGKKSIRATNYVESNWKKQCKELVNLIFQCEDSEPFRQPVDLVEYPDYRDIIDTPMDFGTVRETLDAGNYDSPLEFCKDIRLIFSNAKAYTPNKRSKIYSMTLRLSALFEEKMKKISSDFKIGQKFNEKLRRSQRFKQRQNCKGDSQPNKSIRNLKPKRLKSQTKIIPELVGSPTQSTSSRTAYLGTHKTSAGISSGVTSGDSSDSAESSERRKRNRPITNGSTLSESEVEDSLATSLSSSASSSSEESKESSRARESSSRSGLSRSSNLRVTRTRAAQRKTGPVSLANGCGRKATRKRVYLSDSDNNSLETGEILKARAGNNRKVLRKCAAVAANKIKLMSDVEENSSSESVCSGRKLPHRNASAVARKKLLHNSEDEQSLKSEIEEEELKDENQLLPVSSSHTAQSNVDESENRDSESESDLRVARKNWHANGYKSHTPAPSKTKFLKIESSEEDSKSHDSDHACNRTAGPSTSVQKLKAESISEEADSEPGRSGGRKYNTFHKNASFFKKTKILSDSEDSESEEQDREDGKCHKMEMNPISGNLNCDPIAMSQCSSDHGCETDLDSDDDKIEKPNNFMKDSASQDNGLSRKISRKRVCSSDSDSSLQVVKKSSKARTGLLRITRRCAATAANKIKLMSDVEDVSLENVHTRSKNGRKKPLHLACTTAKKKLSDCEGSVHCEVPSEQYACEGKPPDPDSEGSTKVLSQALNGDSDSEDMLNSEHKHRHTNIHKIDAPSKRKSSSVTSSGEDSKSHIPGSETDRTFSSESTLAQKATAENNFEVELNYGLRRWNGRRLRTYGKAPFSKTKVIHDSQETAEKEVKRKRSHPELENVKISETTGNSKFRPDTSSKSSDLGSVTESDIDCTDNTKTKRRKTKGKAKVVRKDKTFSPVYL

SEQ ID NO: 14688 - protein, 120 aa, Homo sapiens
MAEPSSARRPVPLIESELYFLIARYLSAGPCRRAAQVLVQELEQYQLLPKRLDWEGNEHNRSYEELVLSNKHVAPDHLLQICQRIGPMLDKEIPPSISRVTSLLGAGRQSLLRTAKGTLI

SEQ ID NO: 14689 - protein, 237 aa, Homo sapiens
MNIFDRKINFDALLKFSHITPSTQQHLKKVYASFALCMFVAAAGAYVHMVTHFIQAGLLSALGSLILMIWLMATPHSHETEQKRLGLLAGFAFLTGVGLGPALEFCIAVNPSILPTAFMGTAMIFTCFTLSALYARRRSYLFLGGILMSALSLLLLSSLGNVFFGSIWLFQANLYVGLVVMCGFVLFDTQLIIEKAEHGDQDYIWHCIDLFLDFITVFRKLMMILAMNEKDKKKEKK

SEQ ID NO: 14690 - protein, 295 aa, Homo sapiens
MSHSSVTREAPQLLSQRQRREVRGVWGWGCLPGPRGGPALFGLVTFGQSGDCCTDSGTMNIFDRKINFDALLKFSHITPSTQQHLKKVYASFALCMFVAAAGAYVHMVTHFIQAGLLSALGSLILMIWLMATPHSHETEQKRLGLLAGFAFLTGVGLGPALEFCIAVNPSILPTAFMGTAMIFTCFTLSALYARRRSYLFLGGILMSALSLLLLSSLGNVFFGSIWLFQANLYVGLVVMCGFVLFDTQLIIEKAEHGDQDYIWHCIDLFLDFITVFRKLMMILAMNEKDKKKEKK

SEQ ID NO: 14691 - protein, 75 aa, Homo sapiens
MAGQEDPVQREIHQDWANREYIEIITSSIKKIADFLNSFDMSCRSRLATLNEKLTALERRIEYIEARVTKGETLT

SEQ ID NO: 14692 - protein, 106 aa, Homo sapiens
MAGQEDPVQREIHQDWANREYIEIITSSIKKIADFLNSFDMSCRSRLATLNEKLTALERRIEYIEARVTKGETLTRTVPCCCWEVALHNTGHMGKAPAAFSSFLSP

SEQ ID NO: 14693 - protein, 144 aa, Homo sapiens
MPKVKRSRKAPPDGWELIEPTLDELDQKMREAETEPHEGKRKVESLWPIFRIHHQKTRYIFDLFYKRKAISRELYEYCIKEGYADKNLIAKWKKQGYENLCCLRCIQTRDTNFGTNCICRVPKSKLEVGRIIECTHCGCRGCSG

SEQ ID NO: 14694 - protein, 145 aa, Homo sapiens
MPKVKRSRKAPPDGWELIEPTLDELDQKMREAETEPHEGKRKVESLWPIFRIHHQKTRYIFDLFYKRKAISRELYEYCIKEGYADKNLIAKWKKQGYENLCCLRCIQTRDTNFGTNCICRVPKSKLEVVMSDTQAWCCFQLKILP

SEQ ID NO: 14695 - protein, 286 aa, Homo sapiens
MAMEGYWRFLALLGSALLVGFLSVIFALVWVLHYREGLGWDGSALEFNWHPVLMVTGFVFIQGIAIIVYRLPWTWKCSKLLMKSIHAGLNAVAAILAIISVVAVFENHNVNNIANMYSLHSWVGLIAVICYLLQLLSGFSVFLLPWAPLSLRAFLMPIHVYSGIVIFGTVIATALMGLTEKLIFSLRDPAYSTFPPEGVFVNTLGLLILVFGALIFWIVTRPQWKRPKEPNSTILHPNGGTEQGARGSMPAYSGNNMDKSDSELNSEVAARKRNLALDEAGQRSTM

SEQ ID NO: 14696 - protein, 157 aa, Homo sapiens
MAMEGYWRFLALLGSALLVGFLSVIFALVWVLHYREGLGWDGSALEFNWHPVLMVTGFVFIQGIASFRFFSLSASMGSAFSPSISHAHTCLFWNCHLWNSDCNSTYGIDRETDFFPERSCIQYIPARRCFRKYAWPSDPGVRGPHFLDSHQTAMETS

SEQ ID NO: 14697 - protein, 228 aa, Homo sapiens
MLDEGEAIIVYRLPWTWKCSKLLMKSIHAGLNAVAAILAIISVVAVFENHNVNNIANMYSLHSWVGLIAVICYLLQLLSGFSVFLLPWAPLSLRAFLMPIHVYSGIVIFGTVIATALMGLTEKLIFSLRDPAYSTFPPEGVFVNTLGLLILVFGALIFWIVTRPQWKRPKEPNSTILHPNGGTEQGARGSMPAYSGNNMDKSDSELNSEVAARKRNLALDEAGQRSTM

SEQ ID NO: 14698 - protein, 384 aa, Homo sapiens
MAGAEWKSLEECLEKHLPLPDLQEVKRVLYGKELRKLDLPREAFEAASREDFELQGYAFEAAEEQLRRPRIVHVGLVQNRIPLPANAPVAEQVSALHRRIKAIVEVAAMCGVNIICFQEAWTMPFAFCTREKLPWTEFAESAEDGPTTRFCQKLAKNHDMVVVSPILERDSEHGDVLWNTAVVISNSGAVLGKTRKNHIPRVGDFNESTYYMEGNLGHPVFQTQFGRIAVNICYGRHHPLNWLMYSINGAEIIFNPSATIGALSESLWPIEARNAAIANHCFTCAINRVGTEHFPNEFTSGDGKKAHQDFGYFYGSSYVAAPDSSRTPGLSRSRDGLLVAKLDLNLCQQVNDVWNFKMTGRYEMYARELAEAVKSNYSPTIVKE

SEQ ID NO: 14699 - protein, 391 aa, Homo sapiens
MPGPQGGRGAATMSLGKLSPVGWVSSSQGKRRLTADMISHPLGDFRHTMHVGRGGDVFGDTSFLSNHGGSSGSTHRSPRSFLAKKLQLVRRVGAPPRRMASPPAPSPAPPAISPIIKNAISLPQLNQAAYDSLVVGKLSFDSSPTSSTDGHSSYGLDSGFCTISRLPRSEKPHDRDRDGSFPSEPGLRRSDSLLSFRLDLDLGPSLLSELLGVMSLPEAPAAETPAPAANPPAPTANPTGPAANPPATTANPPAPAANPSAPAATPTGPAANPPAPAASSTPHGHCPNGVTAGLGPVAEVKSSPVGGGPRGPAGPALGRHWGAGWDGGHHYPEMDARQERVEVLPQARASWESLDEEWRAPQAGSRTPVPSTVQANTFEFADAEEDDEVKV

SEQ ID NO: 14700 - protein, 384 aa, Homo sapiens
MPGPQGGRGAATMSLGKLSPVGWVSSSQGKRRLTADMISHPLGDFRHTMHVGRGGDVFGDTSFLSNHGGSSGSTHRSPRSFLAKKLQLVRRVGAPPRRMASPPAPSPAPPAISPIIKNAISLPQLNQAAYDSLVVGKLSFDSSPTSSTDGHSSYGLDSGFCTISRLPRSEKPHDRDRDGSFPSEPGLRRSDSLLSFRLDLDLGPSLLSELLGVMSLPEAPAAETPAPAANPPAPTANPTGPAANPPATTANPPAPAATPTGPAANPPAPAASSTPHGHCPNGVTAGLGPVAEVKSSPVGGGPRGPAGPALGRHWGAGWDGGHHYPEMDARQERVEVLPQARASWESLDEEWRAPQAGSRTPVPSTVQANTFEFADAEEDDEVKV

SEQ ID NO: 14701 - protein, 145 aa, Homo sapiens
MKEKLSKKRAEVKGNRSWLEEFLKPSDNEEGPPPKNKVLSNNASSQKPTHSSCIPLLRLPDKQQKVNESIKTDMLCTDKEEECPAASLLQKYTNNSEKPSGKRQCKTKHLISQDLRQGFLLTGKCYVENADGKIPLGTCFLLGLI

SEQ ID NO: 14702 - protein, 485 aa, Homo sapiens
MASSSTVPLGFHYETKYVVLSYLGLLSQEKLQEQHLSSPQGVQLDIASQSLDQEILLKVKTEIEEELKSLDKEISEAFTSTGFDRHTSPVFSPANPESSMEDCLAHLGEKVSQELKEPLHKALQMLLSQPVTYQAFRECTLETTVHASGWNKILVPLVLLRQMLLELTRRGQEPLSALLQFGVTYLEDYSAEYIIQQGGWGTVFSLESEEEEYPGITAEDSNDIYILPSDNSGQVSPPESPTVTTSWQSESLPVSLSASQSWHTESLPVSLGPESWQQIAMDPEEVKSLDSNGAGEKSENNSSNSDIVHVEKEEVPEGMEEAAVASVVLPARELQEALPEAPAPLLPHITATSLLGTREPDTEVITVEKSSPATSLFVELDEEEVKAATTEPTEVEEVVPALEPTETLLSEKEINAREESLVEELSPASEKKPVPPSEGKSRLSPAGEMKPMPLSEGKSILLFGGAAAVAILAVAIGVALALRKK

SEQ ID NO: 14703 - protein, 201 aa, Homo sapiens
MASSSTVPLGFHYETKYVVLSYLGLLSQEKLQEQHLSSPQGVQLDIASQSLDQEILLKVKTEIEEELKSLDKEISEAFTSTGFDRHTSPVFSPANPESSMEDCLAHLGEKVSQELKEPLHKALQMLLSQPVTYQAFRECTLETTVHASGWNKILVPLVLLRQMLLELTRRGQEPLSALLQFGVTYLEDYSAEYIIQQGGWV

SEQ ID NO: 14704 - protein, 323 aa, Homo sapiens
MLLELTRRGQEPLSALLQFGVTYLEDYSAEYIIQQGGWGTVFSLESEEEEYPGITAEDSNDIYILPSDNSGQVSPPESPTVTTSWQSESLPVSLSASQSWHTESLPVSLGPESWQQIAMDPEEVKSLDSNGAGEKSENNSSNSDIVHVEKEEVPEGMEEAAVASVVLPARELQEALPEAPAPLLPHITATSLLGTREPDTEVITVEKSSPATSLFVELDEEEVKAATTEPTEVEEVVPALEPTETLLSEKEINAREESLVEELSPASEKKPVPPSEGKSRLSPAGEMKPMPLSEGKSILLFGGAAAVAILAVAIGVALALRKK

SEQ ID NO: 14705 - protein, 1711 aa, Homo sapiens
MISTAPLYSGVHNWTSSDRIRMCGINEERRAPLSDEESTTGDCQHFGSQEFCVSSSFSKVELTAVGSGSNARGADPDGSATEKLGHKSEDKPDDPQPKMDYAGNVAEAEGFLVPLSSPGDGLKLPASDSAEASNSRADCSWTPLNTQMSKQVDCSPAGVKALDSRQGVGEKNTFILATLGTGVPVEGTLPLVTTNFSPLPAPICPPAPGSASVPHSVPDAFQVPLSVPAPVPHSGLVPVQVATSVPAPSPPLAPVPALAPAPPSVPTLISDSNPLSVSASVLVPVPASAPPSGPVPLSAPAPAPLSVPVSAPPLALIQAPVPPSAPTLVLAPVPTPVLAPMPASTPPAAPAPPSVPMPTPTPSSGPPSTPTLIPAFAPTPVPAPTPAPIFTPAPTPMPAATPAAIPTSAPIPASFSLSRVCFPAAQAPAMQKVPLSFQPGTVLTPSQPLVYIPPPSCGQPLSVATLPTTLGVSSTLTLPVLPSYLQDRCLPGVLASPELRSYPYAFSVARPLTSDSKLVSLEVNRLPCTSPSGSTTTQPAPDGVPGPLADTSLVTASAKVLPTPQPLLPAPSGSSAPPHPAKMPSGTEQQTEGTSVTFSPLKSPPQLEREMASPPECSEMPLDLSSKSNRQKLPLPNQRKTPPMPVLTPVHTSSKALLSTVLSRSQRTTQAAGGNVTSCLGSTSSPFVIFPEIVRNGDPSTWVKNSTALISTIPGTYVGVANPVPASLLLNKDPNLGLNRDPRHLPKQEPISIIDQGEPKGTGATCGKKGSQAGAEGQPSTVKRYTPARIAPGLPGCQTKELSLWKPTGPANIYPRCSVNGKPTSTQVLPVGWSPYHQASLLSIGISSAGQLTPSQGAPIRPTSVVSEFSGVPSLSSSEAVHGLPEGQPRPGGSFVPEQDPVTKNKTCRIAAKPYEEQVNPVLLTLSPQTGTLALSVQPSGGDIRMNQGPEESESHLCSDSTPKMEGPQGACGLKLAGDTKPKNQVLATYMSHELVLATPQNLPKMPELPLLPHDSHPKELILDVVPSSRRGSSTERPQLGSQVDLGRVKMEKVDGDVVFNLATCFRADGLPVAPQRGQAEVRAKAGQARVKQESVGVFACKNKWQPDDVTESLPPKKMKCGKEKDSEEQQLQPQAKAVVRSSHRPKCRKLPSDPQESTKKSPRGASDSGKEHNGVRGKHKHRKPTKPESQSPGKRADSHEEGSLEKKAKSSFRDFIPVVLSTRTRSQSGSICSSFAGMADSDMGSQEVFPTEEEEEVTPTPAKRRKVRKTQRDTQYRSHHAQDKSLLSQGRRHLWRAREMPWRTEAARQMWDTNEEEEEEEEEGLLKRKKRRRQKSRKYQTGEYLTEQEDEQRRKGRADLKARKQKTSSSQSLEHRLRNRNLLLPNKVQGISDSPNGFLPNNLEEPACLENSEKPSGKRKCKTKHMATVSEEAKDVVLYCLQKDSEDVNHRDNAGYTALHEACSRGWTDILNILLEHGANVNCSAQDGTRPVHDAVVNDNLETIWLLLSYGADPTLATYSGQTAMKLASSDTMKRFLSDHLSDLQGRAEGDPGVSWDFYSSSVLEEKDGFACDLLHNPPGSSDQEGDDPMEEDDFMFELSDKPLLPCYNLQVSVSRGPCNWFLFSDVLKRLKLSSRIFQARFPHFEITTMPKAEFYRQVASSQLLTPAERPGGLDDRSPPGSSETVELVRYEPDLLRLLGSEVEFQSCNS

SEQ ID NO: 14706 - protein, 1581 aa, Homo sapiens
MISTAPLYSGVHNWTSSDRIRMCGINEERRAPLSDEESTTGDCQHFGSQEFCVSSSFSKVELTAVGSGSNARGADPDGSATEKLGHKSEDKPDDPQPKMDYAGNVAEAEGFLVPLSSPGDGLKLPASDSAEASNSRADCSWTPLNTQMSKQVDCSPAGVKALDSRQGVGEKNTFILATLGTGVPVEGTLPLVTTNFSPLPAPICPPAPGSASVPHSVPDAFQVPLSVPAPVPHSGLVPVQVATSVPAPSPPLAPVPALAPAPPSVPTLISDSNPLSVSASVLVPVPASAPPSGPVPLSAPAPAPLSVPVSAPPLALIQAPVPPSAPTLVLAPVPTPVLAPMPASTPPAAPAPPSVPMPTPTPSSGPPSTPTLIPAFAPTPVPAPTPAPIFTPAPTPMPAATPAAIPTSAPIPASFSLSRVCFPAAQAPAMQKVPLSFQPGTVLTPSQPLVYIPPPSCGQPLSVATLPTTLGVSSTLTLPVLPSYLQDRCLPGVLASPELRSYPYAFSVARPLTSDSKLVSLEVNRLPCTSPSGSTTTQPAPDGVPGPLADTSLVTASAKVLPTPQPLLPAPSGSSAPPHPAKMPSGTEQQTEGTSVTFSPLKSPPQLEREMASPPECSEMPLDLSSKSNRQKLPLPNQRKTPPMPVLTPVHTSSKALLSTVLSRSQRTTQAAGGNVTSCLGSTSSPFVIFPEIVRNGDPSTWVKNSTALISTIPGTYVGVANPVPASLLLNKDPNLGLNRDPRHLPKQEPISIIDQGEPKGTGATCGKKGSQAGAEGQPSTVKRYTPARIAPGLPGCQTKELSLWKPTGPANIYPRCSVNGKPTSTQVLPVGWSPYHQASLLSIGISSAGQLTPSQGAPIRPTSVVSEFSGVPSLSSSEAVHGLPEGQPRPGGSFVPEQDPVTKNKTCRIAAKPYEEQVNPVLLTLSPQTGTLALSVQPSGGDIRMNQGPEESESHLCSDSTPKMEGPQGACGLKLAGDTKPKNQVLATYMSHELVLATPQNLPKMPELPLLPHDSHPKELILDVVPSSRRGSSTERPQLGSQVDLGRVKMEKVDGDVVFNLATCFRADGLPVAPQRGQAEVRAKAGQARVKQESVGVFACKNKWQPDDVTESLPPKKMKCGKEKDSEEQQLQPQAKAVVRSSHRPKCRKLPSDPQESTKKSPRGASDSGKEHNGVRGKHKHRKPTKPESQSPGKRADSHEEGSLEKKAKSSFRDFIPVVLSTRTRSQSDLKARKQKTSSSQSLEHRLRNRNLLLPNKVQGISDSPNGFLPNNLEEPACLENSEKPSGKRKCKTKHMATVSEEAKDVVLYCLQKDSEDVNHRDNAGYTALHEACSRGWTDILNILLEHGANVNCSAQDGTRPVHDAVVNDNLETIWLLLSYGADPTLATYSGQTAMKLASSDTMKRFLSDHLSDLQGRAEGDPGVSWDFYSSSVLEEKDGFACDLLHNPPGSSDQEGDDPMEEDDFMFELSDKPLLPCYNLQVSVSRGPCNWFLFSDVLKRLKLSSRIFQARFPHFEITTMPKAEFYRQVASSQLLTPAERPGGLDDRSPPGSSETVELVRYEPDLLRLLGSEVEFQSCNS

SEQ ID NO: 14707 - protein, 1785 aa, Homo sapiens
MISTAPLYSGVHNWTSSDRIRMCGINEERRAPLSDEESTTGDCQHFGSQEFCVSSSFSKVELTAVGSGSNARGADPDGSATEKLGHKSEDKPDDPQPKMDYAGNVAEAEGFLVPLSSPGDGLKLPASDSAEASNSRADCSWTPLNTQMSKQVDCSPAGVKALDSRQGVGEKNTFILATLGTGVPVEGTLPLVTTNFSPLPAPICPPAPGSASVPHSVPDAFQVPLSVPAPVPHSGLVPVQVATSVPAPSPPLAPVPALAPAPPSVPTLISDSNPLSVSASVLVPVPASAPPSGPVPLSAPAPAPLSVPVSAPPLALIQAPVPPSAPTLVLAPVPTPVLAPMPASTPPAAPAPPSVPMPTPTPSSGPPSTPTLIPAFAPTPVPAPTPAPIFTPAPTPMPAATPAAIPTSAPIPASFSLSRVCFPAAQAPAMQKVPLSFQPGTVLTPSQPLVYIPPPSCGQPLSVATLPTTLGVSSTLTLPVLPSYLQDRCLPGVLASPELRSYPYAFSVARPLTSDSKLVSLEVNRLPCTSPSGSTTTQPAPDGVPGPLADTSLVTASAKVLPTPQPLLPAPSGSSAPPHPAKMPSGTEQQTEGTSVTFSPLKSPPQLEREMASPPECSEMPLDLSSKSNRQKLPLPNQRKTPPMPVLTPVHTSSKALLSTVLSRSQRTTQAAGGNVTSCLGSTSSPFVIFPEIVRNGDPSTWVKNSTALISTIPGTYVGVANPVPASLLLNKDPNLGLNRDPRHLPKQEPISIIDQGEPKGTGATCGKKGSQAGAEGQPSTVKRYTPARIAPGLPGCQTKELSLWKPTGPANIYPRCSVNGKPTSTQVLPVGWSPYHQASLLSIGISSAGQLTPSQGAPIRPTSVVSEFSGVPSLSSSEAVHGLPEGQPRPGGSFVPEQDPVTKNKTCRIAAKPYEEQVNPVLLTLSPQTGTLALSVQPSGGDIRMNQGPEESESHLCSDSTPKMEGPQGACGLKLAGDTKPKNQVLATYMSHELVLATPQNLPKMPELPLLPHDSHPKELILDVVPSSRRGSSTERPQLGSQVDLGRVKMEKVDGDVVFNLATCFRADGLPVAPQRGQAEVRAKAGQARVKQESVGVFACKNKWQPDDVTESLPPKKMKCGKEKDSEEQQLQPQAKAVVRSSHRPKCRKLPSDPQESTKKSPRGASDSGKEHNGVRGKHKHRKPTKPESQSPGKRADSHEEGSLEKKAKSSFRDFIPVVLSTRTRSQSGSICSSFAGMADSDMGSQEVFPTEEEEEVTPTPAKRRKVRKTQRDTQYRSHHAQDKSLLSQGRRHLWRAREMPWRTEAARQMWDTNEEEEEEEEEGLLKRKKRRRQKSRKYQTGEYLTEQEDEQRRKGRADLKARKQKTSSSQSLEHRLRNRNLLLPNKVQGISDSPNGFLPNNLEEPACLENSEKPSGKRKCKTKHMATVSEEAKGKGRWSQQKTRSPKSPTPVKPTEPCTPSKSRSASSEEASESPTARQIPPEARRLIVNKNAGETLLQRAARLGYKDVVLYCLQKDSEDVNHRDNAGYTALHEACSRGWTDILNILLEHGANVNCSAQDGTRPVHDAVVNDNLETIWLLLSYGADPTLATYSGQTAMKLASSDTMKRFLSDHLSDLQGRAEGDPGVSWDFYSSSVLEEKDGFACDLLHNPPGSSDQEGDDPMEEDDFMFELSDKPLLPCYNLQVSVSRGPCNWFLFSDVLKRLKLSSRIFQARFPHFEITTMPKAEFYRQVASSQLLTPAERPGGLDDRSPPGSSETVELVRYEPDLLRLLGSEVEFQSCNS

SEQ ID NO: 14708 - protein, 107 aa, Homo sapiens
MANEVQDLLSPRKGGHPPAVKAGGMRISKKQEIGTLERHTKKTGFEKTSAIANVAKIQTLDALNDALEKLNYKFPATVHMAHQKPTPALEKVVPLKRIYIIQQPRKC

SEQ ID NO: 14709 - protein, 793 aa, Homo sapiens
MDDFERRRELRRQKREEMRLEAERIAYQRNDDDEEEAARERRRRARQERLRQKQEEESLGQVTDQVEVNAQNSVPDEEAKTTTTNTQVEGDDEAAFLERLARREERRQKRLQEALERQKEFDPTITDASLSLPSRRMQNDTAENETTEKEEKSESRQERYEIEETETVTKSYQKNDWRDAEENKKEDKEKEEEEEEKPKRGSIGENQVEVMVEEKTTESQEETVVMSLKNGQISSEEPKQEEEREQGSDEISHHEKMEEEDKERAEAERARLEAEERERIKAEQDKKIADERARIEAEEKAAAQERERREAEERERMREEEKRAAEERQRIKEEEKRAAEERQRIKEEEKRAAEERQRIKEEEKRAAEERQRARAEEEEKAKVEEQKRNKQLEEKKHAMQETKIKGEKVEQKIEGKWVNEKKAQEDKLQTAVLKKQGEEKGTKVQAKREKLQEDKPTFKKEEIKDEKIKKDKEPKEEVKSFMDRKKGFTEVKSQNGEFMTHKLKHTENTFSRPGGRASVDTKEAEGAPQVEAGKRLEELRRRRGETESEEFEKLKQKQQEAALELEELKKKREERRKVLEEEEQRRKQEEADRKLREEEEKRRLKEEIERRRAEAAEKRQKMPEDGLSDDKKPFKCFTPKGSSLKIEERAEFLNKSVQKSSGVKSTHQAAIVSKIDSRLEQYTSAIEGTKSAKPTKPAASDLPVPAEGVRNIKSMWEKGNVFSSPTAAGTPNKETAGLKVGVSSRINEWLTKTPDGNKSPAPKPSDLRPGDVSSKRNLWEKQSVDKVTSPTKV

SEQ ID NO: 14710 - protein, 564 aa, Homo sapiens
MDDFERRRELRRQKREEMRLEAERIAYQRNDDDEEEAARERRRRARQERLRQKQEEESLGQVTDQVEVNAQNSVPDEEAKTTTTNTQVEGDDEAAFLERLARREERRQKRLQEALERQKEFDPTITDASLSLPSRRMQNDTAENETTEKEEKSESRQERYEIEETETVTKSYQKNDWRDAEENKKEDKEKEEEEEEKPKRGSIGENQGEEKGTKVQAKREKLQEDKPTFKKEEIKDEKIKKDKEPKEEVKSFMDRKKGFTEVKSQNGEFMTHKLKHTENTFSRPGGRASVDTKEAEGAPQVEAGKRLEELRRRRGETESEEFEKLKQKQQEAALELEELKKKREERRKVLEEEEQRRKQEEADRKLREEEEKRRLKEEIERRRAEAAEKRQKMPEDGLSDDKKPFKCFTPKGSSLKIEERAEFLNKSVQKSSGVKSTHQAAIVSKIDSRLEQYTSAIEGTKSAKPTKPAASDLPVPAEGVRNIKSMWEKGNVFSSPTAAGTPNKETAGLKVGVSSRINEWLTKTPDGNKSPAPKPSDLRPGDVSSKRNLWEKQSVDKVTSPTKV

SEQ ID NO: 14711 - protein, 558 aa, Homo sapiens
MLGGSGSHGRRSLAALSQIAYQRNDDDEEEAARERRRRARQERLRQKQEEESLGQVTDQVEVNAQNSVPDEEAKTTTTNTQVEGDDEAAFLERLARREERRQKRLQEALERQKEFDPTITDASLSLPSRRMQNDTAENETTEKEEKSESRQERYEIEETETVTKSYQKNDWRDAEENKKEDKEKEEEEEEKPKRGSIGENQGEEKGTKVQAKREKLQEDKPTFKKEEIKDEKIKKDKEPKEEVKSFMDRKKGFTEVKSQNGEFMTHKLKHTENTFSRPGGRASVDTKEAEGAPQVEAGKRLEELRRRRGETESEEFEKLKQKQQEAALELEELKKKREERRKVLEEEEQRRKQEEADRKLREEEEKRRLKEEIERRRAEAAEKRQKMPEDGLSDDKKPFKCFTPKGSSLKIEERAEFLNKSVQKSSGVKSTHQAAIVSKIDSRLEQYTSAIEGTKSAKPTKPAASDLPVPAEGVRNIKSMWEKGNVFSSPTAAGTPNKETAGLKVGVSSRINEWLTKTPDGNKSPAPKPSDLRPGDVSSKRNLWEKQSVDKVTSPTKV

SEQ ID NO: 14712 - protein, 538 aa, Homo sapiens
MDDFERRRELRRQKREEMRLEAERIAYQRNDDDEEEAARERRRRARQERLRQKQEEESLGQVTDQVEVNAQNSVPDEEAKTTTTNTQVEGDDEAAFLERLARREERRQKRLQEALERQKEFDPTITDASLSLPSRRMQNDTAENETTEKEEKSESRQERYEIEETETVTKSYQKNDWRDAEENKKEDKEKEEEEEEKPKRGSIGENQIKDEKIKKDKEPKEEVKSFMDRKKGFTEVKSQNGEFMTHKLKHTENTFSRPGGRASVDTKEAEGAPQVEAGKRLEELRRRRGETESEEFEKLKQKQQEAALELEELKKKREERRKVLEEEEQRRKQEEADRKLREEEEKRRLKEEIERRRAEAAEKRQKMPEDGLSDDKKPFKCFTPKGSSLKIEERAEFLNKSVQKSSGVKSTHQAAIVSKIDSRLEQYTSAIEGTKSAKPTKPAASDLPVPAEGVRNIKSMWEKGNVFSSPTAAGTPNKETAGLKVGVSSRINEWLTKTPDGNKSPAPKPSDLRPGDVSSKRNLWEKQSVDKVTSPTKV

SEQ ID NO: 14713 - protein, 532 aa, Homo sapiens
MLGGSGSHGRRSLAALSQIAYQRNDDDEEEAARERRRRARQERLRQKQEEESLGQVTDQVEVNAQNSVPDEEAKTTTTNTQVEGDDEAAFLERLARREERRQKRLQEALERQKEFDPTITDASLSLPSRRMQNDTAENETTEKEEKSESRQERYEIEETETVTKSYQKNDWRDAEENKKEDKEKEEEEEEKPKRGSIGENQIKDEKIKKDKEPKEEVKSFMDRKKGFTEVKSQNGEFMTHKLKHTENTFSRPGGRASVDTKEAEGAPQVEAGKRLEELRRRRGETESEEFEKLKQKQQEAALELEELKKKREERRKVLEEEEQRRKQEEADRKLREEEEKRRLKEEIERRRAEAAEKRQKMPEDGLSDDKKPFKCFTPKGSSLKIEERAEFLNKSVQKSSGVKSTHQAAIVSKIDSRLEQYTSAIEGTKSAKPTKPAASDLPVPAEGVRNIKSMWEKGNVFSSPTAAGTPNKETAGLKVGVSSRINEWLTKTPDGNKSPAPKPSDLRPGDVSSKRNLWEKQSVDKVTSPTKV

SEQ ID NO: 14714 - protein, 563 aa, Homo sapiens
MDDFERRRELRRQKREEMRLEAERIAYQRNDDDEEEAARERRRRARQERLRQKQEEESLGQVTDQVEVNAQNSVPDEEAKTTTTNTQVEGDDEAAFLERLARREERRQKRLQEALERQKEFDPTITDASLSLPSRRMQNDTAENETTEKEEKSESRQERYEIEETETVTKSYQKNDWRDAEENKKEDKEKEEEEEEKPKRGSIGENQGEEKGTKVQAKREKLQEDKPTFKKEEIKDEKIKKDKEPKEEVKSFMDRKKGFTEVKSQNGEFMTHKLKHTENTFSRPGGRASVDTKEAEGAPQVEAGKRLEELRRRRGETESEEFEKLKQKQQEAALELEELKKKREERRKVLEEEEQRRKQEEADRKLREEEEKRRLKEEIERRRAEAAEKRQKMPEDGLSDDKKPFKCFTPKGSSLKIEERAEFLNKSVQKSGVKSTHQAAIVSKIDSRLEQYTSAIEGTKSAKPTKPAASDLPVPAEGVRNIKSMWEKGNVFSSPTAAGTPNKETAGLKVGVSSRINEWLTKTPDGNKSPAPKPSDLRPGDVSSKRNLWEKQSVDKVTSPTKV

SEQ ID NO: 14715 - protein, 327 aa, Homo sapiens
MASMAAAIAASRSAVMSGNRPLDDRERKRFTYFSSLSPMARKIMQDKEKIREKYGPEWARLPPAQQDEIIDRCLVGPRAPAPRDPGDSEELTRFPGLRGPTGQKVVRFGDEDLTWQDEHSAPFSWETKSQMEFSISALSIQEPSNGTAASEPRPLSKASQGSQALKSSQGSRSSSLDALGPTRKEEEASFWKINAERSRGEGPEAEFQSLTPSQIKSMEKGEKVLPPCYRQEPAPKDREAKVERPSTLRQEQRPLPNVSTERERPQPVQAFSSALHEAAPSQLEGKLPSPDVRQDDGEDTLFSEPKFAQVSSSNVVLKTGFDFLDNW

SEQ ID NO: 14716 - protein, 197 aa, Homo sapiens
MEFSISALSIQEPSNGTAASEPRPLSKASQGSQALKSSQGSRSSSLDALGPTRKEEEASFWKINAERSRGEGPEAEFQSLTPSQIKSMEKGEKVLPPCYRQEPAPKDREAKVERPSTLRQEQRPLPNVSTERERPQPVQAFSSALHEAAPSQLEGKLPSPDVRQDDGEDTLFSEPKFAQVSSSNVVLKTGFDFLDNW

SEQ ID NO: 14717 - protein, 289 aa, Homo sapiens
MARKIMQDKEKIREKYGPEWARLPPAQQDEIIDRCLVGPRAPAPRDPGDSEELTRFPGLRGPTGQKVVRFGDEDLTWQDEHSAPFSWETKSQMEFSISALSIQEPSNGTAASEPRPLSKASQGSQALKSSQGSRSSSLDALGPTRKEEEASFWKINAERSRGEGPEAEFQSLTPSQIKSMEKGEKVLPPCYRQEPAPKDREAKVERPSTLRQEQRPLPNVSTERERPQPVQAFSSALHEAAPSQLEGKLPSPDVRQDDGEDTLFSEPKFAQVSSSNVVLKTGFDFLDNW

SEQ ID NO: 14718 - protein, 321 aa, Homo sapiens
MDVRALPWLPWLLWLLCRGGGDADSRAPFTPTWPRSREREAAAFRESLNRHRYLNSLFPSENSTAFYGINQFSYLFPEEFKAIYLRSKPSKFPRYSAEVHMSIPNVSLPLRFDWRDKQVVTQVRNQQMCGGCWAFSVVGAVESAYAIKGKPLEDLSVQQVIDCSYNNYGCNGGSTLNALNWLNKMQVKLVKDSEYPFKAQNGLCHYFSGSHSGFSIKGYSAYDFSDQEDEMAKALLTFGPLVVIVDAVSWQDYLGGIIQHHCSSGEANHAVLITGFDKTGSTPYWIVRNSWGSSWGVDGYAHVKMGSNVCGIADSVSSIFV

SEQ ID NO: 14719 - protein, 777 aa, Homo sapiens
MNKDYQKFWSSPSDPVHFEVDTSHEKVESMSESDTMNVSNLSQGVMLSHSPICMETTGTTCDLPQNEIKNFERENEYESTLCEDAYGTLDNLLNDNNIENYSTNALIQPVDTISISSLRQFETVCKFHWVEAFDDEMTEKPEFQSQVYNYAKDNNIKQDSFKEENPMETSVSANTDQLGNEYFRQPPPRSPPLIHCSGEMLKFTEKSLAKSIAKESALNPSQPPSFLCKTAVPSKEIQNYGEIPEMSVSYEKEVTAEGVERPEIVSTWSSAGISWRSEACRENCEMPDWEQSAESLQPVQEDMALNEVLQKLKHTNRKQEVRIQELQCSNLYLEKRVKELQMKITKQQVFIDVINKLKENVEELIEDKYKIILEKNDTKKTLQNLEEVLANTQKHLQESRNDKEMLQLQFKKIKANYVCLQERYMTEMQQKNKSVSQYLEMDKTLSKKEEEVERLQQLKKELEKATASALDLLKREKEAQEQEFLSLQEEFQKLEKENLEERQKLKSRLEKLLTQVRNLQFMSENERTKNIKLQQQINEVKNENAKLKQQVARSEEQNYVPKFETAQLKDQLEEVLKSDITKDTKTTHSNLLPDCSPCEERLNPADIKRASQLASKMHSLLALMVGLLTCQDIINSDAEHFKESEKVSDIMLQKLKSLHLKKKTLDKEVIDCDSDEAKSIRDVPTLLGAKLDKYHSLNEELDFLVTSYEEIIECADQRLAISHSQIAHLEERNKHLEDLIRKPREKARKPRSKSLENHPKSMTMMPALFKENRNDLD

SEQ ID NO: 14720 - protein, 641 aa, Homo sapiens
MTEKPEFQSQVYNYAKDNNIKQDSFKEENPMETSVSANTDQLGNEYFRQPPPRSPPLIHCSGEMLKFTEKSLAKSIAKESALNPSQPPSFLCKTAVPSKEIQNYGEIPEMSVSYEKEVTAEGVERPEIVSTWSSAGISWRSEACRENCEMPDWEQSAESLQPVQEDMALNEVLQKLKHTNRKQEVRIQELQCSNLYLEKRVKELQMKITKQQVFIDVINKLKENVEELIEDKYKIILEKNDTKKTLQNLEEVLANTQKHLQESRNDKEMLQLQFKKIKANYVCLQERYMTEMQQKNKSVSQYLEMDKTLSKKEEEVERLQQLKKELEKATASALDLLKREKEAQEQEFLSLQEEFQKLEKENLEERQKLKSRLEKLLTQVRNLQFMSENERTKNIKLQQQINEVKNENAKLKQQVARSEEQNYVPKFETAQLKDQLEEVLKSDITKDTKTTHSNLLPDCSPCEERLNPADIKRASQLASKMHSLLALMVGLLTCQDIINSDAEHFKESEKVSDIMLQKLKSLHLKKKTLDKEVIDCDSDEAKSIRDVPTLLGAKLDKYHSLNEELDFLVTSYEEIIECADQRLAISHSQIAHLEERNKHLEDLIRKPREKARKPRSKSLENHPKSMTMMPALFKENRNDLD

SEQ ID NO: 14721 - protein, 824 aa, Homo sapiens
MNKDYQKFWSSPSDPVHFEVDTSHEKVESMSESDTMNVSNLSQGVMLSHSPICMETTGTTCDLPQNEIKNFERENEYESTLCEDAYGTLDNLLNDNNIENYSTNALIQPVDTISISSLRQFETVCKFHWVEAFDDEMTEKPEFQSQVYNYAKDNNIKQDSFKEENPMETSVSANTDQLGNEYFRQPPPRSPPLIHCSGEMLKFTEKSLAKSIAKESALNPSQPPSFLCKTAVPSKEIQNYGEIPEMSVSYEKEVTAEGVERPEIVSTWSSAGISWRSEACRENCEMPDWEQSAESLQPVQEDMALNEVLQKLKHTNRKQEVRIQELQCSNLYLEKRVKELQMKITKQQVFIDVINKLKENVEELIEDKYKIILEKNDTKKTLQNLEEVLANTQKHLQESRNDKEMLQLQFKKIKANYVCLQERYMTEMQQKNKSVSQYLEMDKTLSKKEEEVERLQQLKKELEKATASALDLLKREKEAQEQEFLSLQEEFQKLEKENLEERQKLKSRLEKLLTQVRNLQFMSENERTKNIKLQQQINEVKNENAKLKQQVARSEEQNYVPKFETAQLKDQLEEVLKSDITKDTKTTHSNLLPDCSPCEERLNPADIKRASQLASKMHSLLALMVGLLTCQDIINSDAEHFKESEKVSDIMLQKLKSLHLKKKTLDKELLKHKDRITTFRELIAKEKAFQDHAIKVIDCDSDEAKSIRDVPTLLGAKLDKYHSLNEELDFLVTSYEEIIECADQRLAISHSQIAHLEERNKHLEDLIRKPREKARKPRSKSLENHPKSMTMLAYNLYIFIGYRLGAVADACNPSTLGGRGGWIT

SEQ ID NO: 14722 - protein, 700 aa, Homo sapiens
MNKDYQKFWSSPSDPVHFEVDTSHEKVESMSESDTMNVSNLSQGVMLSHSPICMETTGTTCDLPQNEIKNFERENEYESTLCEDAYGTLDNLLNDNNIENYSTNALIQPVDTISISSLRQFETVCKFHWVEAFDDEMTEKPEFQSQVYNYAKDNNIKQDSFKEENPMETSVSANTDQLGNEYFRQPPPRSPPLIHCSGEMLKFTEKSLAKSIAKESALNPSQPPSFLCKTAVPSKEIQNYGEIPEMSVSYEKEVTAEGVERPEIVSTWSSAGISWRSEACRENCEMPDWEQSAESLQPVQEDMALNEVLQKLKHTNRKQEVRIQELQCSNLYLEKRVKELQMKITKQQVFIDVINKLKENVEELIEDKYKIILEKNDTKKTLQNLEEVLANTQKHLQESRNDKEMLQLQFKKIKANYVCLQERYMTEMQQKNKSVSQYLEMDKTLSKKEEEVERLQQLKKELEKATASALDLLKREKEAQEQEFLSLQEEFQKLEKENLEERQKLKSRLEKLLTQVRNLQFMSENERTKNIKLQQQINEVKNENAKLKQQVARSEEQNYVPKFETAQLKDQLEEVLKSDITKDTKTTHSNLLPDCSPCEERLNPADIKRASQLASKMHSLLALMVGLLTCQDIINSDAEHFKESEKVSDIMLQKLKSLHLKKKTLDKELLKHKDRITTFRELIAKEKAFQDHAIKVFQGV

SEQ ID NO: 14723 - protein, 839 aa, Homo sapiens
MNKDYQKFWSSPSDPVHFEVDTSHEKVESMSESDTMNVSNLSQGVMLSHSPICMETTGTTCDLPQNEIKNFERENEYESTLCEDAYGTLDNLLNDNNIENYSTNALIQPVDTISISSLRQFETVCKFHWVEAFDDEMTEKPEFQSQVYNYAKDNNIKQDSFKEENPMETSVSANTDQLGNEYFRQPPPRSPPLIHCSGEMLKFTEKSLAKSIAKESALNPSQPPSFLCKTAVPSKEIQNYGEIPEMSVSYEKEVTAEGVERPEIVSTWSSAGISWRSEACRENCEMPDWEQSAESLQPVQEDMALNEVLQKLKHTNRKQEVRIQELQCSNLYLEKRVKELQMKITKQQVFIDVINKLKENVEELIEDKYKIILEKNDTKKTLQNLEEVLANTQKHLQESRNDKEMLQLQFKKIKANYVCLQERYMTEMQQKNKSVSQYLEMDKTLSKKEEEVERLQQLKKELEKATASALDLLKREKEAQEQEFLSLQEEFQKLEKENLEERQKLKSRLEKLLTQVRNLQFMSENERTKNIKLQQQINEVKNENAKLKQQVARSEEQNYVPKFETAQLKDQLEEVLKSDITKDTKTTHSNLLPDCSPCEERLNPADIKRASQLASKMHSLLALMVGLLTCQDIINSDAEHFKESEKVSDIMLQKLKSLHLKKKTLDKELLKHKDRITTFRELIAKEKAFQDHAIKVIDCDSDEAKSIRDVPTLLGAKLDKYHSLNEELDFLITKLGHLLESKENHCNRLIEENDKYQRHLGNLIKKVTSYEEIIECADQRLAISHSQIAHLEERNKHLEDLIRKPREKARKPRSKSLENHPKSMTMMPALFKENRNDLD

SEQ ID NO: 14724 - protein, 337 aa, Homo sapiens
MLFSALLLEVIWILAADGGQHWTYEGPHGQDHWPASYPECGNNAQSPIDIQTDSVTFDPDLPALQPHGYDQPGTEPLDLHNNGHTVQLSLPSTLYLGGLPRKYVAAQLHLHWGQKGSPGGSEHQINSEATFAELHIVHYDSDSYDSLSEAAERPQGLAVLGILIEVGETKNIAYEHILSHLHEVRHKDQKTSVPPFNLRELLPKQLGQYFRYNGSLTTPPCYQSVLWTVFYRRSQISMEQLEKLQGTLFSTEEEPSKLLVQNYRALQPLNQRMVFASFIQAGSSYTTGEMLSLGVGILVGCLCLLLAVYFIARKIRKKRLENRKSVVFTSAQATTEA

SEQ ID NO: 14725 - protein, 867 aa, Homo sapiens
MTENKTVSSSSTRDDQTNIGLTCQEVKALREKAWSRTNEGNAMSQSLVLYGASKENSEGFHESKMTNTEGVNKGIYFSYPCRRHSCAVVNIPAPCVNKMISHIQDVESKIQEHLKRFETSFEEWSRTSSTKDLKEDWSVTTPVKEVKPGEKRDEKCPELKQEMETLLSEAIRLIKSLETDRADAEEALKQQRSRKNMINMKIDSWSVWKLQELPLAVQKEHEAYLSDVIELQWHLEDKANQLQHFEKQKTELEEANAKIQADIDYMNEHGPLLDSKQNQELQDLKNHYKKKMEVMDLHRKVNEELEEALEACENARLKAQQIKEEIDKDIYQDEKTIEAYKREIYQLNSLFDHYSSSVINVNTNIEEKEEEVTEAIRETKSSKNELHSLSKMLEDLRRVYDQLTWKQKSHENQYLEAVNDFYAAKKTWDIELSDVAKDFSAISLACTKLTEDNKKLEIDINKITVKTNESIRKKSKYESEIKYLTIMKLKNDKHLKNIYKEAYRIGTLFHLTKHKTDEMEDKIAEVRRKFKGREEFLKKLTQGEVAAGMVLQKKLYSIYEVQALERKELIKNRAICAMSLAELQEPLLQLEDEAERIRSLDKEHSVMLNNIIDQKDLIRRKVGKVKKKLRKKGKKTLDALIETESKRSAIFKDLEATKSKTMIFYAKINELNEELKAKEEEKKSFDQTLEILKNKFITMRFKREHAQTVFDHYMQEKKDCEERIFEEDQRFRVLLAVRQKTLQDTQKIIADSLEENLRLAQEYQQLQITFLKEKDNYFNIYDKQLSLDTSIRDKKQLCQLQRRMHTLWQEHFKLVVLFSQMRLANFQTDSQESIQKILAVQEESSNLMQHILGFFQTLTDGTCENDG

SEQ ID NO: 14726 - protein, 829 aa, Homo sapiens
MTENKTVSSSSTRDDQTNIGLTCQEVKALREKAWSRTNEGNAMSQSLVLYGASKENSEGFHESKMTNTEGVNKGIYFSYPCRRHSCAVVNIPAPCVNKMISHIQDVESKIQEHLKRFETSFEEWSRTSSTKDLKEDWSVTTPVKEVKPGEKRDEKCPELKQEMETLLSEAIRLIKSLETDRADAEEALKQQRSRKNMINMKIDSWSVWKLQELPLAVQKEHEAYLSDVIELQWHLEDKANQLQHFEKQKTELEEANAKIQADIDYMNEHGPLLDSKQNQELQDLKNHYKKKMEVMDLHRKVNEELEEALEACENARLKAQQIKEEIDKDIYQDEKTIEAYKREIYQLNSLFDHYSSSVINVNTNIEEKEEEVTEAIRETKSSKNELHSLSKMLEDLRRVYDQLTWKQKSHENQYLEAVNDFYAAKKTWDIELSDVAKDFSAISLACTKLTEDNKKLEIDINKITVKTNESIRKKSKYESEIKYLTIMKLKNDKHLKNIYKEAYRIGTLFHLTKHKTDEMEDKIAEVRRKFKGREEFLKKLTQGEVAAGMVLQKKLYSIYEVQALERKELIKNRAICAMSLAELQEPLLQLEDEAERIRSLDKEHSVSKRSAIFKDLEATKSKTMIFYAKINELNEELKAKEEEKKSFDQTLEILKNKFITMRFKREHAQTVFDHYMQEKKDCEERIFEEDQRFRVLLAVRQKTLQDTQKIIADSLEENLRLAQEYQQLQITFLKEKDNYFNIYDKQLSLDTSIRDKKQLCQLQRRMHTLWQEHFKLVVLFSQMRLANFQTDSQESIQKILAVQEESSNLMQHILGFFQTLTDGTCENDG

SEQ ID NO: 14727 - protein, 817 aa, Homo sapiens
MTENKTVSSSSTRDDQTNIGLTCQEVKALREKAWSRTNEGNAMSQSLVLYGASKENSEGFHESKMTNTEGVNKGIYFSYPCRRHSCAVVNIPAPCVNKMISHIQDVESKIQEHLKRFETSFEEWSRTSSTKDLKEDWSVTTPVKEVKPGEKRDEKCPELKQEMETLLSEAIRLIKSLETDRADAEEALKQQRSRKNMINMKIDSWSVWKLQELPLAVQKEHEAYLSDVIELQWHLEDKANQLQHFEKQKTELEEANAKIQADIDYMNEHGPLLDSKQNQELQDLKNHYKKKMEVMDLHRKVNEELEEALEACENARLKAQQIKEEIDKDIYQDEKTIEAYKREIYQLNSLFDHYSSSVINVNTNIEEKEEEVTEAIRETKSSKNELHSLSKMLEDLRRVYDQLTWKQKSHENQYLEAVNDFYAAKKTWDIELSDVAKDFSAISLACTKLTEDNKKLEIDINKITVKTNESIRKKSKYESEIKYLTIMKLKNDKHLKNIYKEAYRIGTLFHLTKHKTDEMEDKIAEVRRKFKGREEFLKKLTQGEVAAGMVLQKKLYSIYEVQALERKELIKNRAICAMSLAELQEPLLQLEDEAERIRSLDKEHSVMLNNIIDQKDLIRRKVGKVKKKLRKKGKKTLDALIETESKRSAIFKDLEATKSKTMIFYAKINELNEELKAKEEEKKSFDQTLEILKNKFITMRFKREHAQTVFDHYMQEKKDCEERIFEEDQRFRVLLAVRQKTLQDTQLCQLQRRMHTLWQEHFKLVVLFSQMRLANFQTDSQESIQKILAVQEESSNLMQHILGFFQTLTDGTCENDG

SEQ ID NO: 14728 - protein, 849 aa, Homo sapiens
MTENKTVSSSSTRDDQTNIGLTCQEVKALREKAWSRTNEGNAMSQSLVLYGASKENSEGFHESKMTNTEGVNKGIYFSYPCRRHSCAVVNIPAPCVNKMISHIQDVESKIQEHLKRFETSFEEWSRTSSTKDLKEDWSVTTPVKEVKPGEKRDEKCPELKQEMETLLSEAIRLIKSLETDRADAEEALKQQRSRKNMINMKIDSWSVWKLQELPLAVQKEHEAYLSDVIELQWHLEDKANQLQHFEKQKTELEEANAKIQADIDYMNEHGPLLDSKQNQELQDLKNHYKKKMEVMDLHRKVNEELEEALEACENARLKAQQIKEEIDKDIYQDEKTIEAYKREIYQLNSLFDHYSSSVINVNTNIEEKEEEVTEAIRETKSSKNELHSLSKMLEDLRRVYDQLTWKQKSHENQYLEAVNDFYAAKKTWDIELSDVAKDFSAISLACTKLTEDNKKLEIDINKITVKTNESIRKKSKYESEIKYLTIMKLKNDKHLKNIYKEAYRIGTLFHLTKHKTDEMEDKIAEVRRKFKGREEFLKKLTQGEVAAGMVLQKKLYSIYEVQALERKELIKNRAICAMSLAELQEPLLQLEDEAERIRSLDKEHSVMLNNIIDQKDLIRRKVGKVKKKLRKKGKKTLDALIETESKRSAIFKDLEATKSKTMIFYAKINELNEELKAKEEEKKSFDQTLEILKNKFITMRFKREHAQTVFDHYMQEKKDCEERIFEEDQRFRVLLAVRQKTLQDTQKIIADSLEENLRLAQEYQQLQITFLKEKDNYFNIYDKQLSLDTSIRDKKQLCQLQRRMHTLWQEHFKLVVLFSQMRLANFQTDSQESIQKILAVQNQYDLEKE

SEQ ID NO: 14729 - protein, 315 aa, Homo sapiens
MDLRQFLMCLSLCTAFALSKPTEKKDRVHHEPQLSDKVHNDAQSFDYDHDAFLGAEEAKTFDQLTPEESKERLGKIVSKIDGDKDGFVTVDELKDWIKFAQKRWIYEDVERQWKGHDLNEDGLVSWEEYKNATYGYVLDDPDPDDGFNYKQMMVRDERRFKMADKDGDLIATKEEFTAFLHPEEYDYMKDIVVQETMEDIDKNADGFIDLEEYIGDMYSHDGNTDEPEWVKTEREQFVEFRDKNRDGKMDKEETKDWILPSDYDHAEAEARHLVYESDQNKDGKLTKEEIVDKYDLFVGSQATDFGEALVRHDEF

SEQ ID NO: 14730 - protein, 315 aa, Homo sapiens
MDLRQFLMCLSLCTAFALSKPTEKKDRVHHEPQLSDKVHNDAQSFDYDHDAFLGAEEAKTFDQLTPEESKERLGMIVDKIDADKDGFVTEGELKSWIKHAQKKYIYDNVENQWQEFDMNQDGLISWDEYRNVTYGTYLDDPDPDDGFNYKQMMVRDERRFKMADKDGDLIATKEEFTAFLHPEEYDYMKDIVVQETMEDIDKNADGFIDLEEYIGDMYSHDGNTDEPEWVKTEREQFVEFRDKNRDGKMDKEETKDWILPSDYDHAEAEARHLVYESDQNKDGKLTKEEIVDKYDLFVGSQATDFGEALVRHDEF

SEQ ID NO: 14731 - protein, 323 aa, Homo sapiens
MKETDLIIMDLRQFLMCLSLCTAFALSKPTEKKDRVHHEPQLSDKVHNDAQSFDYDHDAFLGAEEAKTFDQLTPEESKERLGKIVSKIDGDKDGFVTVDELKDWIKFAQKRWIYEDVERQWKGHDLNEDGLVSWEEYKNATYGYVLDDPDPDDGFNYKQMMVRDERRFKMADKDGDLIATKEEFTAFLHPEEYDYMKDIVVQETMEDIDKNADGFIDLEEYIGDMYSHDGNTDEPEWVKTEREQFVEFRDKNRDGKMDKEETKDWILPSDYDHAEAEARHLVYESDQNKDGKLTKEEIVDKYDLFVGSQATDFGEALVRHDEF

SEQ ID NO: 14732 - protein, 323 aa, Homo sapiens
MKETDLIIMDLRQFLMCLSLCTAFALSKPTEKKDRVHHEPQLSDKVHNDAQSFDYDHDAFLGAEEAKTFDQLTPEESKERLGMIVDKIDADKDGFVTEGELKSWIKHAQKKYIYDNVENQWQEFDMNQDGLISWDEYRNVTYGTYLDDPDPDDGFNYKQMMVRDERRFKMADKDGDLIATKEEFTAFLHPEEYDYMKDIVVQETMEDIDKNADGFIDLEEYIGDMYSHDGNTDEPEWVKTEREQFVEFRDKNRDGKMDKEETKDWILPSDYDHAEAEARHLVYESDQNKDGKLTKEEIVDKYDLFVGSQATDFGEALVRHDEF

SEQ ID NO: 14733 - protein, 229 aa, Homo sapiens
MDLRQFLMCLSLCTAFALSKPTEKKDRVHHEPQLSDKVHNDAQSFDYDHDAFLGAEEAKTFDQLTPEESKERLGKIVSKIDGDKDGFVTVDELKDWIKFAQKRWIYEDVERQWKGHDLNEDGLVSWEEYKNATYGYVLDDPDPDDGFNYKQMMVRDERRFKMADKEETKDWILPSDYDHAEAEARHLVYESDQNKDGKLTKEEIVDKYDLFVGSQATDFGEALVRHDEF

SEQ ID NO: 14734 - protein, 265 aa, Homo sapiens
MDLRQFLMCLSLCTAFALSKPTEKKDRVHHEPQLSDKVHNDAQSFDYDHDAFLGAEEAKTFDQLTPEESKERLGKIVSKIDGDKDGFVTVDELKDWIKFAQKRWIYEDVERQWKGHDLNEDGLVSWEEYKNATYGYVLDDPDPDDGFNYKQMMVRDERRFKMADKDGDLIATKEEFTAFLHPEEYDYMKDIVVQETMEDIDKNADGFIDLEEYIGDMYSHDGNTDESDQNKDGKLTKEEIVDKYDLFVGSQATDFGEALVRHDEF

SEQ ID NO: 14735 - protein, 161 aa, Homo sapiens
MDLRQFLMCLSLCTAFALSKPTEKKDRVHHEPQLSDKVHNDAQSFDYDHDAFLGAEEAKTFDQLTPEESKERLGMIVDKIDADKDGFVTEGELKSWIKHAQKKYIYDNVENQWQEFDMNQDGLISWDEYRNVTYGTYLDDPDPDDGFNYKQMMGILMSRNG

SEQ ID NO: 14736 - protein, 201 aa, Homo sapiens
MDLRQFLMCLSLCTAFALSKPTEKKDRVHHEPQLSDKVHNDAQSFDYDHDAFLGAEEAKTFDQLTPEESKERLGMIVDKIDADKDGFVTEGELKSWIKHAQKKYIYDNVENQWQEFDMNQDGLISWDEYRNVTYGTYLDDPDPDDGFNYKQMMVRDERRFKMADKDGDLIATKEEIVDKYDLFVGSQATDFGEALVRHDEF

SEQ ID NO: 14737 - protein, 154 aa, Homo sapiens
MDLRQFLMCLSLCTAFALSKPTEKKDRVHHEPQLSDKVHNDAQSFDYDHDAFLGAEEAKTFDQLTPEESKERLGKIVSKIDGDKDGFVTVDELKDWILPSDYDHAEAEARHLVYESDQNKDGKLTKEEIVDKYDLFVGSQATDFGEALVRHDEF

SEQ ID NO: 14738 - protein, 224 aa, Homo sapiens
MDLRQFLMCLSLCTAFALSKPTEKKDRVHHEPQLSDKVHNDAQSFDYDHDAFLGAEEAKTFDQLTPEESKERLGKIVSKIDGDKDGFVTVDELKDWIKFAQKRWIYEDVERQWKGHDLNEDGLVSWEEYKNATYGYVLDDPDPDDGFNYKQMMVRDERRFKMADKDGDLIATKEEFTAFLHPEEYDYMKDIVVQETMEDIDKNADGFIDLEEYIGWQAYQGGDR

SEQ ID NO: 14739 - protein, 170 aa, Homo sapiens
MDLRQFLMCLSLCTAFALSKPTEKKDRVHHEPQLSDKVHNDAQSFDYDHDAFLGAEEAKTFDQLTPEESKERLGKIVSKIDGDKDGFVTVDELKDWIKFAQKRWIYEDVERQWKGHDLNEDGLVSWEEYKNATYGYVLDDPDPDDGFNYKQMMVRDERRFKMADRARAVC

SEQ ID NO: 14740 - protein, 74 aa, Homo sapiens
MDLRQFLMCLSLCTAFALSKPTEKKDRVHHEPQLSDKVHNDAQSFDYDHDAFLGAEEAKTFDQLTPEESKERLG

SEQ ID NO: 14741 - protein, 139 aa, Homo sapiens
MDLRQFLMCLSLCTAFALSKPTEKKDRVHHEPQLSDKVHNDAQSFDYDHDAFLGAEEAKTFDQLTPEESKERLGKIVSKIDGDKDGFVTVDELKDWIKFAQKRWIYEDVERQWKGHDLNEDGLVSWEEYKNATYGYVLE

SEQ ID NO: 14742 - protein, 147 aa, Homo sapiens
MKETDLIIMDLRQFLMCLSLCTAFALSKPTEKKDRVHHEPQLSDKVHNDAQSFDYDHDAFLGAEEAKTFDQLTPEESKERLGKIVSKIDGDKDGFVTVDELKDWIKFAQKRWIYEDVERQWKGHDLNEDGLVSWEEYKNATYGYVLE

SEQ ID NO: 14743 - protein, 164 aa, Homo sapiens
MMVRDERRFKMADKDGDLIATKEEFTAFLHPEEYDYMKDIVVQETMEDIDKNADGFIDLEEYIGDMYSHDGNTDEPEWVKTEREQFVEFRDKNRDGKMDKEETKDWILPSDYDHAEAEARHLVYESDQNKDGKLTKEEIVDKYDLFVGSQATDFGEALVRHDEF

SEQ ID NO: 14744 - protein, 113 aa, Homo sapiens
MNETNKTLVGPSELPTASAVAPGPGTGARAWPVLVGFVLGAVVLSLLIALAAKCHLCRRYHASYRHRPLPETGRGGRPQVAEDEDDDGFIEDNYIQPGTGELGTEGSRDHFSL

SEQ ID NO: 14745 - protein, 401 aa, Homo sapiens
MPVQLSEHPEWNESMHSLRISVGGLPVLASMTKAADPRFRPRWKVILTFFVGAAILWLLCSHRPAPGRPPTHNAHNWRLGQAPANWYNDTYPLSPPQRTPAGIRYRIAVIADLDTESRAQEENTWFSYLKKGYLTLSDSGDKVAVEWDKDHGVLESHLAEKGRGMELSDLIVFNGKLYSVDDRTGVVYQIEGSKAVPWVILSDGDGTVEKGFKAEWLAVKDERLYVGGLGKEWTTTTGDVVNENPEWVKVVGYKGSVDHENWVSNYNALRAAAGIQPPGYLIHESACWSDTLQRWFFLPRRASQERYSEKDDERKGANLLLSASPDFGDIAVSHVGAVVPTHGFSSFKFIPNTDDQIIVALKSEEDSGRVASYIMAFTLDGRFLLPETKIGSVKYEGIEFI

SEQ ID NO: 14746 - protein, 245 aa, Homo sapiens
MPVQLSEHPEWNESMHSLRISVGGLPVLASMTKAADPRFRPRWKVILTFFVGAAILWLLCSHRPAPGRPPTHNAHNWRLGQAPANWYNDTYPLSPPQRTPAGIRYRIAVIADLDTESRAQEENTWFSYLKKGYLTLSDSGDKVAVEWDKDHGVLESHLAEKGRGMELSDLIVFNGKLYSVDDRTGVVYQIEGSKAVPWVILSDGDGTVEKGFKAEWLAVREIVRKRWRLVKQVSHVGVLGQWIQR

SEQ ID NO: 14747 - protein, 350 aa, Homo sapiens
MPVQLSEHPEWNESMHSLRISVGGLPVLASMTKAADPRFRPLSPPQRTPAGIRYRIAVIADLDTESRAQEENTWFSYLKKGYLTLSDSGDKVAVEWDKDHGVLESHLAEKGRGMELSDLIVFNGKLYSVDDRTGVVYQIEGSKAVPWVILSDGDGTVEKGFKAEWLAVKDERLYVGGLGKEWTTTTGDVVNENPEWVKVVGYKGSVDHENWVSNYNALRAAAGIQPPGYLIHESACWSDTLQRWFFLPRRASQERYSEKDDERKGANLLLSASPDFGDIAVSHVGAVVPTHGFSSFKFIPNTDDQIIVALKSEEDSGRVASYIMAFTLDGRFLLPETKIGSVKYEGIEFI

SEQ ID NO: 14748 - protein, 150 aa, Homo sapiens
MEDYALTFGINPFIALMIQPIVTMTVVDNQGLGLPVDIQHKAKPSPKASQMLPPDLGPPSFQNLLSPSEKLEPWDPGMRKLTVQTCGLTFIHPAGHGLCHPTAEASAETLSSTALNRPSVREGACNEKSTENKKPQDSVLWSHSRWFQGN

SEQ ID NO: 14749 - protein, 96 aa, Homo sapiens
MEDYALTFGINPFIALMIQPIVTMTVVDNQGLGLPVDIQHKAKPSPKASQMLPPDLGPPSFQNCFTCRTAPSLVMVLSWKSGVRREVPVHPSYAKY

SEQ ID NO: 14750 - protein, 477 aa, Homo sapiens
MANMQGLVERLERAVSRLESLSAESHRPPGNCGEVNGVIAGVAPSVEAFDKLMDSMVAEFLKNSRILAGDVETHAEMVHSAFQAQRAFLLMASQYQQPHENDVAALLKPISEKIQEIQTFRERNRGSNMFNHLSAVSESIPALGWIAVSPKPGPYVKEMNDAATFYTNRVLKDYKHSDLRHVDWVKSYLNIWSELQAYIKEHHTTGLTWSKTGPVASTVSAFSVLSSGPGLPPPPPPLPPPGPPPLFENEGKKEESSPSRSALFAQLNQGEAITKGLRHVTDDQKTYKNPSLRAQGGQTQSPTKSHTPSPTSPKSYPSQKHAPVLELEGKKWRVEYQEDRNDLVISETELKQVAYIFKCEKSTIQIKGKVNSIIIDNCKKLGLVFDNVVGIVEVINSQDIQIQVMGRVPTISINKTEGCHIYLSEDALDCEIVSAKSSEMNILIPQDGDYREFPIPEQFKTAWDGSKLITEPAEIMA

SEQ ID NO: 14751 - protein, 413 aa, Homo sapiens
MANMQGLVERLERAVSRLESLSAESHRPPGNCGEVNGVIAGVAPSVEAFDKLMDSMVAEFLKNSRILAGDVETHAEMVHSAFQAQRAFLLMASQYQQPHENDVAALLKPISEKIQEIQTFRERNRGSNMFNHLSAVSESIPALGWIAVGPVASTVSAFSVLSSGPGLPPPPPPLPPPGPPPLFENEGKKEESSPSRSALFAQLNQGEAITKGLRHVTDDQKTYKNPSLRAQGGQTQSPTKSHTPSPTSPKSYPSQKHAPVLELEGKKWRVEYQEDRNDLVISETELKQVAYIFKCEKSTIQIKGKVNSIIIDNCKKLGLVFDNVVGIVEVINSQDIQIQVMGRVPTISINKTEGCHIYLSEDALDCEIVSAKSSEMNILIPQDGDYREFPIPEQFKTAWDGSKLITEPAEIMA

SEQ ID NO: 14752 - protein, 217 aa, Homo sapiens
MANMQGLVERLERAVSRLESLSAESHRPPGNCGEVNGVIAGVAPSVEAFDKLMDSMVAEFLKNSRILAGDVETHEYQEDRNDLVISETELKQVAYIFKCEKSTIQIKGKVNSIIIDNCKKLGLVFDNVVGIVEVINSQDIQIQVMGRVPTISINKTEGCHIYLSEDALDCEIVSAKSSEMNILIPQDGDYREFPIPEQFKTAWDGSKLITEPAEIMA

SEQ ID NO: 14753 - protein, 958 aa, Homo sapiens
MAFRGPEPWVSASLLRQRLKAEEKTLDLEFEVLSVGFNEAGRYALRLSAENPLQVGSGAGVQLQVNDGDPFPACSAITDVIEQQEPGQSLTLTRSKFIFTLPKGFCKNDGQHDAQLHVEALRLDEPLGRAAQRVGEAIFPIYPRPDQPRMNPKAQDHEDLYRYCGNLALLRASTDPTARHCGSLAYSVAFHVHRGPQPPVSDSPPRAGQPELMSPEEPLIASQSTEPEIGHLSPSKKETIMVTLHGATNLPACKDGSEPWPYVVVKSTSEEKNNQSSKAVTSVTSEPTRAPIWGDTVNVEIQAEDAGQEDVILKVVDNRKKQELLSYKIPIKYLRVFHPYHFELVKPTESGKADEATAKTQLYATVVRKSSFIPRYIGCNHMALEIFLRGVNEPLANNPNPIVVIARVVPNYKEFKVSQANRDLASVGLPITPLSFPIPSMMNFDVPRVSQNGCPQLSKPGGPPEQPLWNQSFLFQGRDGATSFSEDTALVLEYYSSTSMKGSQPWTLNQPLGISVLPLKSRLYQKMLTGKGLDGLHVERLPIMDTSLKTINDEAPTVALSFQLLSSERPENFLTPNNSKALPTLDPKILDKKLRTIQESWSKDTVSSTMDLSTSTPREAEEEPLVPEMSHDTEMNNYRRAMQKMAEDILSLRRQASILEGENRILRSRLAQQEEEEGQGKASEAQNTVSMKQKLLLSELDMKKLRDRVQHLQNELIRKNDREKELLLLYQAQQPQAALLKQYQGKLQKMKALEETVRHQEKVIEKMERVLEDRLQDRSKPPPLNRQQGKPYTGFPMLSASGLPLGSMGENLPVELYSVLLAENAKLRTELDKNRHQQAPIILQQQALPDLLSGTSDKFNLLAKLEHAQSRILSLESQLEDSARRWGREKQDLATRLQEQEKGFRHPSNSIIIEQPSALTHSMDLKQPSELEPLLPSSDSKLNKPLSPQKETANSQQT

SEQ ID NO: 14754 - protein, 1023 aa, Homo sapiens
MAFRGPEPWVSASLLRQRLKAEEKTLDLEFEVLSVGFNEAGRYALRLSAENPLQVGSGAGVQLQVNDGDPFPACSAITDVIEQQEPGQSLTLTRSKFIFTLPKGFCKNDGQHDAQLHVEALRLDEPLGRAAQRVGEAIFPIYPRPDQPRMNPKAQDHEDLYRYCGNLALLRASTDPTARHCGSLAYSVAFHVHRGPQPPVSDSPPRAGQPELMSPEEPLIASQSTEPEIGHLSPSKKETIMVTLHGATNLPACKDGSEPWPYVVVKSTSEEKNNQSSKAVTSVTSEPTRAPIWGDTVNVEIQAEDAGQEDVILKVVDNRKKQELLSYKIPIKYLRVFHPYHFELVKPTESGKADEATAKTQLYATVVRKSSFIPRYIGCNHMALEIFLRGVNEPLANNPNPIVVIARVVPNYKEFKVSQANRDLASVGLPITPLSFPIPSMMNFDVPRVSQNGCPQLSKPGGPPEQPLWNQSFLFQGRDGATSFSEDTALVLEYYSSTSMKGSQPWTLNQPLGISVLPLKSRLYQKMLTGKGLDGLHVERLPIMDTSLKTINDEAPTVALSFQLLSSERPENFLTPNNSKALPTLDPKILDKKLRTIQESWSKDTVSSTMDLSTSTPREAEEEPLVPEMSHDTEMNNYRRAMQKMAEDILSLRRQASILEGENRILRSRLAQQEEEEGQGKASEAQNTVSMKQKLLLSELDMKKLRDRVQHLQNELIRKNDREKELLLLYQAQQPQAALLKQYQGKLQKMKALEETVRHQEKVIEKMERVLEDRLQDRSKPPPLNRQQGKPYTGFPMLSASGLPLGSMGENLPVELYSVLLAENAKLRTELDKNRHQQAPIILQQQALPVDPGELGAGGDLTERLQETHGPGHSECTETLPAQDLLSGTSDKFNLLAKLEHAQSRILSLESQLEDSARRWGREKQDLATRLQEQEKGFRHPSNSIIIEQPPYSLPPAPGASIFGKPRATVDPGGWREEAFQSRGQGDGPLPDPEKKQGHQRPALLGNTREACPFHLPQNIYHV

SEQ ID NO: 14755 - protein, 333 aa, Homo sapiens
MGEPGPPSPPAPKAAPGLIDSFSEMNNYRRAMQKMAEDILSLRRQASILEGENRILRSRLAQQEEEEGQGKASEAQNTVSMKQKLLLSELDMKKLRDRVQHLQNELIRKNDREKELLLLYQAQQPQAALLKQYQGKLQKMKALEETVRHQEKVIEKMERVLEDRLQDRSKPPPLNRQQGKPYTGFPMLSASGLPLGSMGENLPVELYSVLLAENAKLRTELDKNRHQQAPIILQQQALPDLLSGTSDKFNLLAKLEHAQSRILSLESQLEDSARRWGREKQDLATRLQEQEKGFRHPSNSIIIEQPVSDPPGVAPRGSGGGAGSHRTPKVTGP

SEQ ID NO: 14756 - protein, 367 aa, Homo sapiens
MGEPGPPSPPAPKAAPGLIDSFSEMNNYRRAMQKMAEDILSLRRQASILEGENRILRSRLAQQEEEEGQGKASEAQNTVSMKQKLLLSELDMKKLRDRVQHLQNELIRKNDREKELLLLYQAQQPQAALLKQYQGKLQKMKALEETVRHQEKVIEKMERVLEDRLQDRSKPPPLNRQQGKPYTGFPMLSASGLPLGSMGENLPVELYSVLLAENAKLRTELDKNRHQQAPIILQQQALPVDPGELGAGGDLTERLQETHGPGHSECTETLPAQDLLSGTSDKFNLLAKLEHAQSRILSLESQLEDSARRWGREKQDLATRLQEQEKGFRHPSNSIIIEQPVSDPPGVAPRGSGGGAGSHRTPKVTGP

SEQ ID NO: 14757 - protein, 755 aa, Homo sapiens
MGLKNKKNTEDPEEPLIASQSTEPEIGHLSPSKKETIMVTLHGATNLPACKDGSEPWPYVVVKSTSEEKNNQSSKAVTSVTSEPTRAPIWGDTVNVEIQAEDAGQEDVILKVVDNRKKQELLSYKIPIKYLRVFHPYHFELVKPTESGKADEATAKTQLYATVVRKSSFIPRYIGCNHMALEIFLRGVNEPLANNPNPIVVIARVVPNYKEFKVSQANRDLASVGLPITPLSFPIPSMMNFDVPRVSQNGCPQLSKPGGPPEQPLWNQSFLFQGRDGATSFSEDTALVLEYYSSTSMKGSQPWTLNQPLGISVLPLKSRLYQKMLTGKGLDGLHVERLPIMDTSLKTINDEAPTVALSFQLLSSERPENFLTPNNSKALPTLDPKILDKKLRTIQESWSKDTVSSTMDLSTSTPREAEEEPLVPEMSHDTEMNNYRRAMQKMAEDILSLRRQASILEGENRILRSRLAQQEEEEGQGKASEAQNTVSMKQKLLLSELDMKKLRDRVQHLQNELIRKNDREKELLLLYQAQQPQAALLKQYQGKLQKMKALEETVRHQEKVIEKMERVLEDRLQDRSKPPPLNRQQGKPYTGFPMLSASGLPLGSMGENLPVELYSVLLAENAKLRTELDKNRHQQAPIILQQQALPDLLSGTSDKFNLLAKLEHAQSRILSLESQLEDSARRWGREKQDLATRLQEQEKGFRHPSNSIIIEQPSALTHSMDLKQPSELEPLLPSSDSKLNKPLSPQKETANSQQT

SEQ ID NO: 14758 - protein, 725 aa, Homo sapiens
MASWGGEKRGGAEGSPKLAVYATRKTRSVRSQEDQWYLGYPGDQWSSGFSYSWWKNSVGSESKHGEGALDQPQHDVRLEDLGELHRAARSGDVPGVEHVLAPGDTGVDKRDRKKSIQQLVPEYKEKQTPESLPQNNNPDWHPTNLTLSDETCQRSKNLKVGDKSPSVSPSMPENQSATKELGQMNLTEREKMDTGVVLLSGNDTLHDLCQSQLPENKESKEAEQDLELTSEEEQERLKGCENKQPQKTSQEPEMAKDCDREDIPIYPVLPHVQKSEEMWIEQGKLEWKNQLKLVINELKQRFGEIYEKYKIPACPEEEPLLDNSTRGTDVKDIPFNLTNNIPGCEEEDASEISVSVVFETFPEQKEPSLKNIIHPYYHPYSGSQEHVCQSSSKLHLHENKLDCDNDNKLGIGHIFSTDNNFHNDASTKKARNPEVVTVEMKEDQEFDLQMTKNMNQNSDSGSTNNYKSLKPKLENLSSLPPDSDRTSEVYLHEELQQDMQKFKNEVNTLEEEFLALKKENVQLHKEVEEEMEKHRSNSTELSGTLTDGTTVGNDDDGLNQQIPRKENEEHDRPADKTANEKNKVKNQIYPEADFADSMEPSEIASEDCELSHSVYENFMLLIEQLRMEYKDSASLPRIQDTFCLCEHLLKLKNNHCDQLTVKLKQMENMVSVLQNELSETKKTKLQLELQKIEWEKELYDLRLALKQENGRKEMPICCIIKIVNS

SEQ ID NO: 14759 - protein, 571 aa, Homo sapiens
MASWGGEKRGGAEGSPKLAVYATRKTRSVRSQEDQWYLGYPGDQWSSGFSYSWWKNSVGSESKHGEGALDQPQHDVRLEDLGELHRAARSGDVPGVEHVLAPGDTGVDKRDRKKSIQQLVPEYKEKQTPESLPQNNNPDWHPTNLTLSDETCQRSKNLKVGDKSPSVSPSMPENQSATKELGQMNLTEREKMDTGVVLLSGNDTLHDLCQSQLPENKESKEEQDLELTSEEEQERLKGCENKQPQKTSQEPEMAKDCDREDIPIYPVLPHVQKSEEMWIEQGKLEWKNQLKLVINELKQRFGEIYEKYKIPACPEEEPLLDNSTRGTDVKDIPFNLTNNIPGCEEEDASEISVSVVFETFPEQKEPSLKNIIHPYYHPYSGSQEHVCQSSSKLHLHENKLDCDNDNKLGIGHIFSTDNNFHNDASTKKARNPEVVTVEMKEDQEFDLQMTKNMNQNSDSGSTNNYKSLKPKLENLSSLPPDSDRTSEVYLHEELQQDMQKFKNEVNTLEEEFLALKKENVQLHKEVEEEMEKHRSNSTELSGTLTDGTTVGNDDDGLNQQIPRKENEEHDR

SEQ ID NO: 14760 - protein, 2353 aa, Homo sapiens
MTEGARAADEVRVPLGAPPPGPAALVGASPESPGAPGREAERGSELGVSPSESPAAERGAELGADEEQRVPYPALAATVFFCLGQTTRPRSWCLRLVCNPWFEHVSMLVIMLNCVTLGMFRPCEDVECGSERCNILEAFDAFIFAFFAVEMVIKMVALGLFGQKCYLGDTWNRLDFFIVVAGMMEYSLDGHNVSLSAIRTVRVLRPLRAINRVPSMRILVTLLLDTLPMLGNVLLLCFFVFFIFGIVGVQLWAGLLRNRCFLDSAFVRNNNLTFLRPYYQTEEGEENPFICSSRRDNGMQKCSHIPGRRELRMPCTLGWEAYTQPQAEGVGAARNACINWNQYYNVCRSGDSNPHNGAINFDNIGYAWIAIFQVITLEGWVDIMYYVMDAHSFYNFIYFILLIIVGSFFMINLCLVVIATQFSETKQRESQLMREQRARHLSNDSTLASFSEPGSCYEELLKYVGHIFRKVKRRSLRLYARWQSRWRKKVDPSAVQGQGPGHRQRRAGRHTASVHHLVYHHHHHHHHHYHFSHGSPRRPGPEPGACDTRLVRAGAPPSPPSPGRGPPDAESVHSIYHADCHIEGPQERARVAHAAATAAASLRLATGLGTMNYPTILPSGVGSGKGSTSPGPKGKWAGGPPGTGGHGPLSLNSPDPYEKIPHVVGEHGLGQAPGHLSGLSVPCPLPSPPAGTLTCELKSCPYCTRALEDPEGELSGSESGDSDGRGVYEFTQDVRHGDRWDPTRPPRATDTPGPGPGSPQRRAQQRAAPGEPGWMGRLWVTFSGKLRRIVDSKYFSRGIMMAILVNTLSMGVEYHEQPEELTNALEISNIVFTSMFALEMLLKLLACGPLGYIRNPYNIFDGIIVVISVWEIVGQADGGLSVLRTFRLLRVLKLVRFLPALRRQLVVLVKTMDNVATFCTLLMLFIFIFSILGMHLFGCKFSLKTDTGDTVPDRKNFDSLLWAIVTVFQILTQEDWNVVLYNGMASTSSWAALYFVALMTFGNYVLFNLLVAILVEGFQAEGDANRSDTDEDKTSVHFEEDFHKLRELQTTELKMCSLAVTPNGHLEGRGSLSPPLIMCTAATPMPTPKSSPFLDAAPSLPDSRRGSSSSGDPPLGDQKPPASLRSSPCAPWGPSGAWSSRRSSWSSLGRAPSLKRRGQCGERESLLSGEGKGSTDDEAEDGRAAPGPRATPLRRAESLDPRPLRPAALPPTKCRDRDGQVVALPSDFFLRIDSHREDAAELDDDSEDSCCLRLHKVLEPYKPQWCRSREAWALYLFSPQNRFRVSCQKVITHKMFDHVVLVFIFLNCVTIALERPDIDPGSTERVFLSVSNYIFTAIFVAEMMVKVVALGLLSGEHAYLQSSWNLLDGLLVLVSLVDIVVAMASAGGAKILGVLRVLRLLRTLRPLRVISRAPGLKLVVETLISSLRPIGNIVLICCAFFIIFGILGVQLFKGKFYYCEGPDTRNISTKAQCRAAHYRWVRRKYNFDNLGQALMSLFVLSSKDGWVNIMYDGLDAVGVDQQPVQNHNPWMLLYFISFLLIVSFFVLNMFVGVVVENFHKCRQHQEAEEARRREEKRLRRLERRRRSTFPSPEAQRRPYYADYSPTRRSIHSLCTSHYLDLFITFIICVNVITMSMEHYNQPKSLDEALKYCNYVFTIVFVFEAALKLVAFGFRRFFKDRWNQLDLAIVLLSLMGITLEEIEMSAALPINPTIIRIMRVLRIARVLKLLKMATGMRALLDTVVQALPQVGNLGLLFMLLFFIYAALGVELFGRLECSEDNPCEGLSRHATFSNFGMAFLTLFRVSTGDNWNGIMKDTLRECSREDKHCLSYLPALSPVYFVTFVLVAQFVLVNVVVAVLMKHLEESNKEAREDAELDAEIELEMAQGPGSARRVDADRPPLPQESPGARDAPNLVARKVSVSRMLSLPNDSYMFRPVVPASAPHPRPLQEVEMETYGAGTPLGSVASVHSPPAESCASLQIPLAVSSPARSGEPLHALSPRGTARSPSLSRLLCRQEAVHTDSLEGKIDSPRDTLDPAEPGEKTPVRPVTQGGSLQSPPRSPRPASVRTRKHTFGQRCVSSRPAAPGGEEAEASDPADEEVSHITSSACPWQPTAEPHGPEASPVAGGERDLRRLYSVDAQGFLDKPGRADEQWRPSAELGSGEPGEAKAWGPEAEPALGARRKKKMSPPCISVEPPAEDEGSARPSAAEGGSTTLRRRTPSCEATPHRDSLEPTEGSGAGGDPAAKGERWGQASCRAEHLTVPSFAFEPLDLGVPSGDPFLDGSHSVTPESRASSSGAIVPLEPPESEPPMPVGDPPEKRRGLYLTVPQCPLEKPGSPSATPAPGGGADDPV

SEQ ID NO: 14761 - protein, 2347 aa, Homo sapiens
MTEGARAADEVRVPLGAPPPGPAALVGASPESPGAPGREAERGSELGVSPSESPAAERGAELGADEEQRVPYPALAATVFFCLGQTTRPRSWCLRLVCNPWFEHVSMLVIMLNCVTLGMFRPCEDVECGSERCNILEAFDAFIFAFFAVEMVIKMVALGLFGQKCYLGDTWNRLDFFIVVAGMMEYSLDGHNVSLSAIRTVRVLRPLRAINRVPSMRILVTLLLDTLPMLGNVLLLCFFVFFIFGIVGVQLWAGLLRNRCFLDSAFVRNNNLTFLRPYYQTEEGEENPFICSSRRDNGMQKCSHIPGRRELRMPCTLGWEAYTQPQAEGVGAARNACINWNQYYNVCRSGDSNPHNGAINFDNIGYAWIAIFQVITLEGWVDIMYYVMDAHSFYNFIYFILLIIVGSFFMINLCLVVIATQFSETKQRESQLMREQRARHLSNDSTLASFSEPGSCYEELLKYVGHIFRKVKRRSLRLYARWQSRWRKKVDPSAVQGQGPGHRQRRAGRHTASVHHLVYHHHHHHHHHYHFSHGSPRRPGPEPGACDTRLVRAGAPPSPPSPGRGPPDAESVHSIYHADCHIEGPQERARVAHAAATAAASLRLATGLGTMNYPTILPSGVGSGKGSTSPGPKGKWAGGPPGTGGHGPLSLNSPDPYEKIPHVVGEHGLGQAPGHLSGLSVPCPLPSPPAGTLTCELKSCPYCTRALEDPEGELSGSESGDSDGRGVYEFTQDVRHGDRWDPTRPPRATDTPGPGPGSPQRRAQQRAAPGEPGWMGRLWVTFSGKLRRIVDSKYFSRGIMMAILVNTLSMGVEYHEQPEELTNALEISNIVFTSMFALEMLLKLLACGPLGYIRNPYNIFDGIIVVISVWEIVGQADGGLSVLRTFRLLRVLKLVRFLPALRRQLVVLVKTMDNVATFCTLLMLFIFIFSILGMHLFGCKFSLKTDTGDTVPDRKNFDSLLWAIVTVFQILTQEDWNVVLYNGMASTSSWAALYFVALMTFGNYVLFNLLVAILVEGFQAEGDANRSDTDEDKTSVHFEEDFHKLRELQTTELKMCSLAVTPNGHLEGRGSLSPPLIMCTAATPMPTPKSSPFLDAAPSLPDSRRGSSSSGDPPLGDQKPPASLRSSPCAPWGPSGAWSSRRSSWSSLGRAPSLKRRGQCGERESLLSGEGKGSTDDEAEDGRAAPGPRATPLRRAESLDPRPLRPAALPPTKCRDRDGQVVALPSDFFLRIDSHREDAAELDDDSEDSCCLRLHKVLEPYKPQWCRSREAWALYLFSPQNRFRVSCQKVITHKMFDHVVLVFIFLNCVTIALERPDIDPGSTERVFLSVSNYIFTAIFVAEMMVKVVALGLLSGEHAYLQSSWNLLDGLLVLVSLVDIVVAMASAGGAKILGVLRVLRLLRTLRPLRVISRAPGLKLVVETLISSLRPIGNIVLICCAFFIIFGILGVQLFKGKFYYCEGPDTRNISTKAQCRAAHYRWVRRKYNFDNLGQALMSLFVLSSKDGWVNIMYDGLDAVGVDQQPVQNHNPWMLLYFISFLLIVSFFVLNMFVGVVVENFHKCRQHQEAEEARRREEKRLRRLERRRRKAQRRPYYADYSPTRRSIHSLCTSHYLDLFITFIICVNVITMSMEHYNQPKSLDEALKYCNYVFTIVFVFEAALKLVAFGFRRFFKDRWNQLDLAIVLLSLMGITLEEIEMSAALPINPTIIRIMRVLRIARVLKLLKMATGMRALLDTVVQALPQVGNLGLLFMLLFFIYAALGVELFGRLECSEDNPCEGLSRHATFSNFGMAFLTLFRVSTGDNWNGIMKDTLRECSREDKHCLSYLPALSPVYFVTFVLVAQFVLVNVVVAVLMKHLEESNKEAREDAELDAEIELEMAQGPGSARRVDADRPPLPQESPGARDAPNLVARKVSVSRMLSLPNDSYMFRPVVPASAPHPRPLQEVEMETYGAGTPLGSVASVHSPPAESCASLQIPLAVSSPARSGEPLHALSPRGTARSPSLSRLLCRQEAVHTDSLEGKIDSPRDTLDPAEPGEKTPVRPVTQGGSLQSPPRSPRPASVRTRKHTFGQRCVSSRPAAPGGEEAEASDPADEEVSHITSSACPWQPTAEPHGPEASPVAGGERDLRRLYSVDAQGFLDKPGRADEQWRPSAELGSGEPGEAKAWGPEAEPALGARRKKKMSPPCISVEPPAEDEGSARPSAAEGGSTTLRRRTPSCEATPHRDSLEPTEGSGAGGDPAAKGERWGQASCRAEHLTVPSFAFEPLDLGVPSGDPFLDGSHSVTPESRASSSGAIVPLEPPESEPPMPVGDPPEKRRGLYLTVPQCPLEKPGSPSATPAPGGGADDPV

SEQ ID NO: 14762 - protein, 389 aa, Homo sapiens
MELSAVGERVFAAEALLKRRIRKGRMEYLVKWKGWSQKYSTWEPEENILDARLLAAFEEREREMELYGPKKRGPKPKTFLLKAQAKAKAKTYEFRSDSARGIRIPYPGRSPQDLASTSRAREGLRNMGLSPPASSTSTSSTCRAEAPRDRDRDRDRDRERDRERERERERERERERERERGTSRVDDKPSSPGDSSKKRGPKPRKELPDPSQRPLGEPSAGLGEYLKGRKLDDTPSGAGKFPAGHSVIQLARRQDSDLVQCGVTSPSSAEATGKLAVDTFPARVIKHRAAFLEAKGQGALDPNGTRVRHGSGPPSSGGGLYRDMGAQGGRPSLIARIPVARILGDPEEESWSPSLTNLEKVVVTDVTSNFLTVTIKESNTDQGFFKEKR

SEQ ID NO: 14763 - protein, 221 aa, Homo sapiens
MASWGGEKRGGAGGSPKPAVYATRKTPSVGSQEDQWYLDYPGDQWSLGFSYSWWKNSVGSESKHGEGALDQLQHDVRLEDLGELHRAARSGDVPGVEHVLAPGDTGVDKRDRKKSIQQLVPEYKEKQTPESLPQNNNPAAPSQAEGGEGGVACGTVEQMTWLCSLPHAVGGGDGDHSSTGAVGGHPRGPGEYCHLHEQRVHHHIFARGKRKGKNHVSNVVR

SEQ ID NO: 14764 - protein, 208 aa, Homo sapiens
MVFYFTSSSVNSSAYTIYMGKDKYENEDLIKHGWPEDIWFHVDKLSSAHVYLRLHKGENIEDIPKEVLMDCAHLVKANSIQGCKMNNVNVVYTPWSNLKKTADMDVGQIGFHRQKDVKIVTVEKKVNEILNRLEKTKVERFPDLAAEKECRDREERNEKKAQIQEMKKREKEEMKKKREMDELRSYSSLMKVENMSSNQDGNDSDEFM

SEQ ID NO: 14765 - protein, 140 aa, Homo sapiens
MDCAHLVKANSIQGCKMNNVNVVYTPWSNLKKTADMDVGQIGFHRQKDVKIVTVEKKVNEILNRLEKTKVERFPDLAAEKECRDREERNEKKAQIQEMKKREKEEMKKKREMDELRSYSSLMKVENMSSNQDGNDSDEFM

SEQ ID NO: 14766 - protein, 363 aa, Homo sapiens
MPVRTLFPESWLWRKFTLPKSKSGISHYPISVKVPDSITTWQFVVVSLKAGQGLCVSDPFELTVMKSFFVDLKLPSSVIRNEQVQIQAMLYNFRDRQAKVRVEFPHKETLCSASKPGAPSHQAGVQIQQTSYSIVLEPQGQTQTKLVPRQEFLNMVPDTEAEVFISVQGYTQMLTHRSSDGTYHTSKGNPGSTWLTSYVFRVFALAYSMMTTQVLSLSSLCDMANWIIIDRQAEDGHFLEKGPVVMTSMQDGYQGSEEDVSLTALVLIALNEGKELCRQKNLMASIERARGFLERKLPDIQTTFAVAIASYALALANSSQANDCLDSFASPSGCGMLLNQPQSWSGEGVISNPAMCYSSLSVS

SEQ ID NO: 14767 - protein, 675 aa, Homo sapiens
MEGRPPPEGRPPPRPRTGRAPRGRRRAVFAAVLHWSHITHLFENDRHFSHLSTLEREMAFRTEMGLYYSYFKTIVEAPSFLNGVWMIMNDKLTEYPLVINTLKRFNLYPEVILASWYRIYTKIMDLIGIQTKICWTVTRGEGLSPIESCEGLGDPACFYVAVIFILNGLMMALFFIYGTYLSGSRLGGLVTVLCFFFNHGECTRVMWTPPLRESFSYPFLVLQMLLVTHILRATKLYRGSLIALCISNVFFMLPWQFAQFVLLTQIASLFAVYVVGYIDICKLRKIIYIHMISLALCFVLMFGNSMLLTSYYASSLVIIWGILAMKPHFLKINVSELSLWVIQGCFWLFGTVILKYLTSKIFGIADDAHIGNLLTSKFFSYKDFDTLLYTCAAEFDFMEKETPLRYTKTLLLPVVLVVFVAIVRKIISDMWGVLAKQQTHVRKHQFDHGELVYHALQLLAYTALGILIMRLKLFLTPHMCVMASLICSRQLFGWLFCKVHPGAIVFAILAAMSIQGSANLQTQWNIVGEFSNLPQEELIEWIKYSTKPDAVFAGAMPTMASVKLSALRPIVNHPHYEDAGLRARTKIVYSMYSRKAAEEVKRELIKLKVNYYILEESWCVRRSKPGCSMPEIWDVEDPANAGKTPLCNLLVKDSKPHFTTVFQNSVYKVLEVVKE

SEQ ID NO: 14768 - protein, 85 aa, Homo sapiens
MYSRKAAEEVKRELIKLKVNYYILEESWCVRRSKPGCSMPEIWDVEDPANAGKTPLCNLLVKDSKPHFTTVFQNSVYKVLEVVKE

SEQ ID NO: 14769 - protein, 95 aa, Homo sapiens
MAPPPACRSPMSPPPPPLLLLLLSLALLGARARAEPAGSAVPAQSRPCVDCHAFEFMQRALQDLRKTACSLDARTETLLLQAERRALCACWPAGH

SEQ ID NO: 14770 - protein, 139 aa, Homo sapiens
MGNPGGVGSERMRVARRTRNVCRCPRAAGPGVPEPRAAPLPLLAMAPPPACRSPMSPPPPPLLLLLLSLALLGARARAEPAGSAVPAQSRPCVDCHAFEFMQRALQDLRKTACSLDARTETLLLQAERRALCACWPAGH

SEQ ID NO: 14771 - protein, 128 aa, Homo sapiens
MRVARRTRNVCRCPRAAGPGVPEPRAAPLPLLAMAPPPACRSPMSPPPPPLLLLLLSLALLGARARAEPAGSAVPAQSRPCVDCHAFEFMQRALQDLRKTACSLDARTETLLLQAERRALCACWPAGH

SEQ ID NO: 14772 - protein, 298 aa, Homo sapiens
MENFQKVEKIGEGTYGVVYKARNKLTGEVVALKKIRLDTETEGVPSTAIREISLLKELNHPNIVKLLDVIHTENKLYLVFEFLHQDLKKFMDASALTGIPLPLIKSYLFQLLQGLAFCHSHRVLHRDLKPQNLLINTEGAIKLADFGLARAFGVPVRTYTHEVVTLWYRAPEILLGCKYYSTAVDIWSLGCIFAEMVTRRALFPGDSEIDQLFRIFRTLGTPDEVVWPGVTSMPDYKPSFPKWARQDFSKVVPPLDEDGRSLLSQMLHYDPNKRISAKAALAHPFFQDVTKPVPHLRL

SEQ ID NO: 14773 - protein, 264 aa, Homo sapiens
MENFQKVEKIGEGTYGVVYKARNKLTGEVVALKKIRLDTETEGVPSTAIREISLLKELNHPNIVKLLDVIHTENKLYLVFEFLHQDLKKFMDASALTGIPLPLIKSYLFQLLQGLAFCHSHRVLHRDLKPQNLLINTEGAIKLADFGLARAFGVPVRTYTHEVTRRALFPGDSEIDQLFRIFRTLGTPDEVVWPGVTSMPDYKPSFPKWARQDFSKVVPPLDEDGRSLLSQMLHYDPNKRISAKAALAHPFFQDVTKPVPHLRL

SEQ ID NO: 14774 - protein, 437 aa, Homo sapiens
MSAVLLLALLGFILPLPGVQALLCQFGTVQHVWKVSDLPRQWTPKNTSCDSGLGCQDTLMLIESGPQVSLVLSKGCTEAKDQEPRVTEHRMGPGLSLISYTFVCRQEDFCNNLVNSLPLWAPQPPADPGSLRCPVCLSMEGCLEGTTEEICPKGTTHCYDGLLRLRGGGIFSNLRVQGCMPQPGCNLLNGTQEIGPVGMTENCNRKDFLTCHRGTTIMTHGNLAQEPTDWTTSNTEMCEVGQVCQETLLLLDVGLTSTLVGTKGCSTVGAQNSQKTTIHSAPPGVLVASYTHFCSSDLCNSASSSSVLLNSLPPQAAPVPGDRQCPTCVQPLGTCSSGSPRMTCPRGATHCYDGYIHLSGGGLSTKMSIQGCVAQPSSFLLNHTRQIGIFSAREKRDVQPPASQHEGGGAEGLESLTWGVGLALAPALWWGVVCPSC

SEQ ID NO: 14775 - protein, 248 aa, Homo sapiens
MSAVLLLALLGFILPLPGVQALLCQFGTVQHVWKVSDLPRQWTPKNTSCDSGLGCQDTLMLIESGPQVSLVLSKGCTEAKDQEPRVTEHRMGPGLSLISYTFVCRQEDFCNNLVNSLPLWAPQPPADPGSLRCPVCLSMEGCLEGTTEEICPKGTTHCYDGLLRLRGGGIFSNLRVQGCMPQPGCNLLNGTQEIGPVGMTENCNRKDFLQLKPVGLLEEHNVGEKERGQGQHQCVQLDWQKRAATGIF

SEQ ID NO: 14776 - protein, 145 aa, Homo sapiens
MSAVLLLALLGFILPLPGVQALLCQFGTVQHVWKVSDLPRQWTPKNTSCDSGLGCQDTLMLIESGPQVSLVLSKGCTEAKDQEPRVTEHRMGPGLSLISYTFVCRQEDFCNNLVNSLPLWAPQPPADPMMGAAEGPFGKAEQVDS

SEQ ID NO: 14777 - protein, 336 aa, Homo sapiens
MDYPTLLLALLHVYRALCEEVLWHTSVPFAENMSLECVYPSMGILTQVEWFKIGTQQDSIAIFSPTHGMVIRKPYAERVYFLNSTMASNNMTLFFRNASEDDVGYYSCSLYTYPQGTWQKVIQVVQSDSFEAAVPSNSHIVSEPGKNVTLTCQPQMTWPVQAVRWEKIQPRQIDLLTYCNLVHGRNFTSKFPRQIVSNCSHGRWSVIVIPDVTVSDSGLYRCYLQASAGENETFVMRLTVAEGKTDNQYTLFVAGGTVLLLLFVISITTIIVIFLNRRRRRERRDLFTESWDTQKAPNNYRSPISTSQPTNQSMDDTREDIYVNYPTFSRRPKTRV

SEQ ID NO: 14778 - protein, 372 aa, Homo sapiens
MAKQYDSVECPFCDEVSKYEKLAKIGQGTFGEVFKARHRKTGQKVALKKVLMENEKEGFPITALREIKILQLLKHENVVNLIEICRTKASPYNRCKGSIYLVFDFCEHDLAGLLSNVLVKFTLSEIKRVMQMLLNGLYYIHRNKILHRDMKAANVLITRDGVLKLADFGLARAFSLAKNSQPNRYTNRVVTLWYRPPELLLGERDYGPPIDLWGAGCIMAEMWTRSPIMQGNTEQHQLALISQLCGSITPEVWPNVDNYELYEKLELVKGQKRKVKDRLKAYVRDPYALDLIDKLLVLDPAQRIDSDDALNHDFFWSDPMPSDLKGMLSTHLTSMFEYLAPPRRKGSQITQQSTNQSRNPATTNQTEFERVF

SEQ ID NO: 14779 - protein, 489 aa, Homo sapiens
MQRDAPPRAPAPAPRLPAPPIGAAASSGGGGGGGSGGGGGGASAAPAPPGLSGTTSPRGPGGGRRAEEAGSAPRGRKWPWRRKWRGRGGAWSAAAAGPGAGAAAAATGGGGGALEAAMAKQYDSVECPFCDEVSKYEKLAKIGQGTFGEVFKARHRKTGQKVALKKVLMENEKEGFPITALREIKILQLLKHENVVNLIEICRTKASPYNRCKGSIYLVFDFCEHDLAGLLSNVLVKFTLSEIKRVMQMLLNGLYYIHRNKILHRDMKAANVLITRDGVLKLADFGLARAFSLAKNSQPNRYTNRVVTLWYRPPELLLGERDYGPPIDLWGAGCIMAEMWTRSPIMQGNTEQHQLALISQLCGSITPEVWPNVDNYELYEKLELVKGQKRKVKDRLKAYVRDPYALDLIDKLLVLDPAQRIDSDDALNHDFFWSDPMPSDLKGMLSTHLTSMFEYLAPPRRKGSQITQQSTNQSRNPATTNQTEFERVF

SEQ ID NO: 14780 - protein, 757 aa, Homo sapiens
MLLRLLLAWAAAGPTLGQDPWAAEPRAACGPSSCYALFPRRRTFLEAWRACRELGGDLATPRTPEEAQRVDSLVGAGPASRLLWIGLQRQARQCQLQRPLRGFTWTTGDQDTAFTNWAQPASGGPCPAQRCVALEASGEHRWLEGSCTLAVDGYLCQFGFEGACPALQDEAGQAGPAVYTTPFHLVSTEFEWLPFGSVAAVQCQAGRGASLLCVKQPEGGVGWSRAGPLCLGTGCSPDNGGCEHECVEEVDGHVSCRCTEGFRLAADGRSCEDPCAQAPCEQQCEPGGPQGYSCHCRLGFRPAEDDPHRCVDTDECQIAGVCQQMCVNYVGGFECYCSEGHELEADGISCSPAGAMGAQASQDLGDELLDDGEDEEDEDEAWKAFNGGWTEMPGILWMEPTQPPDFALAYRPSFPEDREPQIPYPEPTWPPPLSAPRVPYHSSVLSVTRPVVVSATHPTLPSAHQPPVIPATHPALSRDHQIPVIAANYPDLPSAYQPGILSVSHSAQPPAHQPPMISTKYPELFPAHQSPMFPDTRVAGTQTTTHLPGIPPNHAPLVTTLGAQLPPQAPDALVLRTQATQLPIIPTAQPSLTTTSRSPVSPAHQISVPAATQPAALPTLLPSQSPTNQTSPISPTHPHSKAPQIPREDGPSPKLALWLPSPAPTAAPTALGEAGLAEHSQRDDRWLLVALLVPTCVFLVVLLALGIVYCTRCGPHAPNKRITDCYRWVIHAGSKSPTEPMPPRGSLTGVQTCRTSV

SEQ ID NO: 14781 - protein, 433 aa, Homo sapiens
MCVNYVGGFECYCSEGHELEADGISCSPAGAMGAQASQDLGDELLDDGEDEEDEDEAWKAFNGGWTEMPGILWMEPTQPPDFALAYRPSFPEDREPQIPYPEPTWPPPLSAPRVPYHSSVLSVTRPVVVSATHPTLPSAHQPPVIPATHPALSRDHQIPVIAANYPDLPSAYQPGILSVSHSAQPPAHQPPMISTKYPELFPAHQSPMFPDTRVAGTQTTTHLPGIPPNHAPLVTTLGAQLPPQAPDALVLRTQATQLPIIPTAQPSLTTTSRSPVSPAHQISVPAATQPAALPTLLPSQSPTNQTSPISPTHPHSKAPQIPREDGPSPKLALWLPSPAPTAAPTALGEAGLAEHSQRDDRWLLVALLVPTCVFLVVLLALGIVYCTRCGPHAPNKRITDCYRWVIHAGSKSPTEPMPPRGSLTGVQTCRTSV

SEQ ID NO: 14782 - protein, 639 aa, Homo sapiens
MVDYIVEYDYDAVHDDELTIRVGEIIRNVKKLQEEGWLEGELNGRRGMFPDNFVKEIKRETEFKDDSLPIKRERHGNVASLVQRISTYGLPAGGIQPHPQTKNIKKKTKKRQCKVLFEYIPQNEDELELKVGDIIDINEEVEEGWWSGTLNNKLGLFPSNFVKELEVTDDGETHEAQDDSETVLAGPTSPIPSLGNVSETASGSVTQPKKIRGIGFGDIFKEGSVKLRTRTSSSETEEKKPEKPLILQSLGPKTQSVEITKTDTEGKIKAKEYCRTLFAYEGTNEDELTFKEGEIIHLISKETGEAGWWRGELNGKEGVFPDNFAVQINELDKDFPKPKKPPPPAKAPAPKPELIAAEKKYFSLKPEEKDEKSTLEQKPSKPAAPQVPPKKPTPPTKASNLLRSSGTVYPKRPEKPVPPPPPIAKINGEVSSISSKFETEPVSKLKLDSEQLPLRPKSVDFDSLTVRTSKETDVVNFDDIASSENLLHLTANRPKMPGRRLPGRFNGGHSPTHSPEKILKLPKEEDSANLKPSELKKDTCYSPKPSVYLSTPSSASKANTTAFLTPLEIKAKVETDDVKKNSLDELRAQIIELLCIVEALKKDHGKELEKLRKDLEEEKTMRSNLEMEIEKLKKAVLSS

SEQ ID NO: 14783 - protein, 3685 aa, Homo sapiens
MLWWEEVEDCYEREDVQKKTFTKWVNAQFSKFGKQHIENLFSDLQDGRRLLDLLEGLTGQKLPKEKGSTRVHALNNVNKALRVLQNNNVDLVNIGSTDIVDGNHKLTLGLIWNIILHWQVKNVMKNIMAGLQQTNSEKILLSWVRQSTRNYPQVNVINFTTSWSDGLALNALIHSHRPDLFDWNSVVCQQSATQRLEHAFNIARYQLGIEKLLDPEDVDTTYPDKKSILMYITSLFQVLPQQVSIEAIQEVEMLPRPPKVTKEEHFQLHHQMHYSQQITVSLAQGYERTSSPKPRFKSYAYTQAAYVTTSDPTRSPFPSQHLEAPEDKSFGSSLMESEVNLDRYQTALEEVLSWLLSAEDTLQAQGEISNDVEVVKDQFHTHEGYMMDLTAHQGRVGNILQLGSKLIGTGKLSEDEETEVQEQMNLLNSRWECLRVASMEKQSNLHRVLMDLQNQKLKELNDWLTKTEERTRKMEEEPLGPDLEDLKRQVQQHKVLQEDLEQEQVRVNSLTHMVVVVDESSGDHATAALEEQLKVLGDRWANICRWTEDRWVLLQDILLKWQRLTEEQCLFSAWLSEKEDAVNKIHTTGFKDQNEMLSSLQKLAVLKADLEKKKQSMGKLYSLKQDLLSTLKNKSVTQKTEAWLDNFARCWDNLVQKLEKSTAQISQAVTTTQPSLTQTTVMETVTTVTTREQILVKHAQEELPPPPPQKKRQITVDSEIRKRLDVDITELHSWITRSEAVLQSPEFAIFRKEGNFSDLKEKVNAIEREKAEKFRKLQDASRSAQALVEQMVNEGVNADSIKQASEQLNSRWIEFCQLLSERLNWLEYQNNIIAFYNQLQQLEQMTTTAENWLKIQPTTPSEPTAIKSQLKICKDEVNRLSDLQPQIERLKIQSIALKEKGQGPMFLDADFVAFTNHFKQVFSDVQAREKELQTIFDTLPPMRYQETMSAIRTWVQQSETKLSIPQLSVTDYEIMEQRLGELQALQSSLQEQQSGLYYLSTTVKEMSKKAPSEISRKYQSEFEEIEGRWKKLSSQLVEHCQKLEEQMNKLRKIQNHIQTLKKWMAEVDVFLKEEWPALGDSEILKKQLKQCRLLVSDIQTIQPSLNSVNEGGQKIKNEAEPEFASRLETELKELNTQWDHMCQQVYARKEALKGGLEKTVSLQKDLSEMHEWMTQAEEEYLERDFEYKTPDELQKAVEEMKRAKEEAQQKEAKVKLLTESVNSVIAQAPPVAQEALKKELETLTTNYQWLCTRLNGKCKTLEEVWACWHELLSYLEKANKWLNEVEFKLKTTENIPGGAEEISEVLDSLENLMRHSEDNPNQIRILAQTLTDGGVMDELINEELETFNSRWRELHEEAVRRQKLLEQSIQSAQETEKSLHLIQESLTFIDKQLAAYIADKVDAAQMPQEAQKIQSDLTSHEISLEEMKKHNQGKEAAQRVLSQIDVAQKKLQDVSMKFRLFQKPANFEQRLQESKMILDEVKMHLPALETKSVEQEVVQSQLNHCVNLYKSLSEVKSEVEMVIKTGRQIVQKKQTENPKELDERVTALKLHYNELGAKVTERKQQLEKCLKLSRKMRKEMNVLTEWLAATDMELTKRSAVEGMPSNLDSEVAWGKATQKEIEKQKVHLKSITEVGEALKTVLGKKETLVEDKLSLLNSNWIAVTSRAEEWLNLLLEYQKHMETFDQNVDHITKWIIQADTLLDESEKKKPQQKEDVLKRLKAELNDIRPKVDSTRDQAANLMANRGDHCRKLVEPQISELNHRFAAISHRIKTGKASIPLKELEQFNSDIQKLLEPLEAEIQQGVNLKEEDFNKDMNEDNEGTVKELLQRGDNLQQRITDERKREEIKIKQQLLQTKHNALKDLRSQRRKKALEISHQWYQYKRQADDLLKCLDDIEKKLASLPEPRDERKIKEIDRELQKKKEELNAVRRQAEGLSEDGAAMAVEPTQIQLSKRWREIESKFAQFRRLNFAQIHTVREETMMVMTEDMPLEISYVPSTYLTEITHVSQALLEVEQLLNAPDLCAKDFEDLFKQEESLKNIKDSLQQSSGRIDIIHSKKTAALQSATPVERVKLQEALSQLDFQWEKVNKMYKDRQGRFDRSVEKWRRFHYDIKIFNQWLTEAEQFLRKTQIPENWEHAKYKWYLKELQDGIGQRQTVVRTLNATGEEIIQQSSKTDASILQEKLGSLNLRWQEVCKQLSDRKKRLEEQKNILSEFQRDLNEFVLWLEEADNIASIPLEPGKEQQLKEKLEQVKLLVEELPLRQGILKQLNETGGPVLVSAPISPEEQDKLENKLKQTNLQWIKVSRALPEKQGEIEAQIKDLGQLEKKLEDLEEQLNHLLLWLSPIRNQLEIYNQPNQEGPFDVKETEIAVQAKQPDVEEILSKGQHLYKEKPATQPVKRKLEDLSSEWKAVNRLLQELRAKQPDLAPGLTTIGASPTQTVTLVTQPVVTKETAISKLEMPSSLMLEVPALADFNRAWTELTDWLSLLDQVIKSQRVMVGDLEDINEMIIKQKATMQDLEQRRPQLEELITAAQNLKNKTSNQEARTIITDRIERIQNQWDEVQEHLQNRRQQLNEMLKDSTQWLEAKEEAEQVLGQARAKLESWKEGPYTVDAIQKKITETKQLAKDLRQWQTNVDVANDLALKLLRDYSADDTRKVHMITENINASWRSIHKRVSEREAALEETHRLLQQFPLDLEKFLAWLTEAETTANVLQDATRKERLLEDSKGVKELMKQWQDLQGEIEAHTDVYHNLDENSQKILRSLEGSDDAVLLQRRLDNMNFKWSELRKKSLNIRSHLEASSDQWKRLHLSLQELLVWLQLKDDELSRQAPIGGDFPAVQKQNDVHRAFKRELKTKEPVIMSTLETVRIFLTEQPLEGLEKLYQEPRELPPEERAQNVTRLLRKQAEEVNTEWEKLNLHSADWQRKIDETLERLQELQEATDELDLKLRQAEVIKGSWQPVGDLLIDSLQDHLEKVKALRGEIAPLKENVSHVNDLARQLTTLGIQLSPYNLSTLEDLNTRWKLLQVAVEDRVRQLHEAHRDFGPASQHFLSTSVQGPWERAISPNKVPYYINHETQTTCWDHPKMTELYQSLADLNNVRFSAYRTAMKLRRLQKALCLDLLSLSAACDALDQHNLKQNDQPMDILQIINCLTTIYDRLEQEHNNLVNVPLCVDMCLNWLLNVYDTGRTGRIRVLSFKTGIISLCKAHLEDKYRYLFKQVASSTGFCDQRRLGLLLHDSIQIPRQLGEVASFGGSNIEPSVRSCFQFANNKPEIEAALFLDWMRLEPQSMVWLPVLHRVAAAETAKHQAKCNICKECPIIGFRYRSLKHFNYDICQSCFFSGRVAKGHKMHYPMVEYCTPTTSGEDVRDFAKVLKNKFRTKRYFAKHPRMGYLPVQTVLEGDNMETPVTLINFWPVDSAPASSPQLSHDDTHSRIEHYASRLAEMENSNGSYLNDSISPNESIDDEHLLIQHYCQSLNQDSPLSQPRSPAQILISLESEERGELERILADLEEENRNLQAEYDRLKQQHEHKGLSPLPSPPEMMPTSPQSPRDAELIAEAKLLRQHKGRLEARMQILEDHNKQLESQLHRLRQLLEQPQAEAKVNGTTVSSPSTSLQRSDSSQPMLLRVVGSQTSDSMGEEDLLSPPQDTSTGLEEVMEQLNNSFPSSRGRNTPGKPMREDTM

SEQ ID NO: 14784 - protein, 3677 aa, Homo sapiens
MEDEREDVQKKTFTKWVNAQFSKFGKQHIENLFSDLQDGRRLLDLLEGLTGQKLPKEKGSTRVHALNNVNKALRVLQNNNVDLVNIGSTDIVDGNHKLTLGLIWNIILHWQVKNVMKNIMAGLQQTNSEKILLSWVRQSTRNYPQVNVINFTTSWSDGLALNALIHSHRPDLFDWNSVVCQQSATQRLEHAFNIARYQLGIEKLLDPEDVDTTYPDKKSILMYITSLFQVLPQQVSIEAIQEVEMLPRPPKVTKEEHFQLHHQMHYSQQITVSLAQGYERTSSPKPRFKSYAYTQAAYVTTSDPTRSPFPSQHLEAPEDKSFGSSLMESEVNLDRYQTALEEVLSWLLSAEDTLQAQGEISNDVEVVKDQFHTHEGYMMDLTAHQGRVGNILQLGSKLIGTGKLSEDEETEVQEQMNLLNSRWECLRVASMEKQSNLHRVLMDLQNQKLKELNDWLTKTEERTRKMEEEPLGPDLEDLKRQVQQHKVLQEDLEQEQVRVNSLTHMVVVVDESSGDHATAALEEQLKVLGDRWANICRWTEDRWVLLQDILLKWQRLTEEQCLFSAWLSEKEDAVNKIHTTGFKDQNEMLSSLQKLAVLKADLEKKKQSMGKLYSLKQDLLSTLKNKSVTQKTEAWLDNFARCWDNLVQKLEKSTAQISQAVTTTQPSLTQTTVMETVTTVTTREQILVKHAQEELPPPPPQKKRQITVDSEIRKRLDVDITELHSWITRSEAVLQSPEFAIFRKEGNFSDLKEKVNAIEREKAEKFRKLQDASRSAQALVEQMVNEGVNADSIKQASEQLNSRWIEFCQLLSERLNWLEYQNNIIAFYNQLQQLEQMTTTAENWLKIQPTTPSEPTAIKSQLKICKDEVNRLSDLQPQIERLKIQSIALKEKGQGPMFLDADFVAFTNHFKQVFSDVQAREKELQTIFDTLPPMRYQETMSAIRTWVQQSETKLSIPQLSVTDYEIMEQRLGELQALQSSLQEQQSGLYYLSTTVKEMSKKAPSEISRKYQSEFEEIEGRWKKLSSQLVEHCQKLEEQMNKLRKIQNHIQTLKKWMAEVDVFLKEEWPALGDSEILKKQLKQCRLLVSDIQTIQPSLNSVNEGGQKIKNEAEPEFASRLETELKELNTQWDHMCQQVYARKEALKGGLEKTVSLQKDLSEMHEWMTQAEEEYLERDFEYKTPDELQKAVEEMKRAKEEAQQKEAKVKLLTESVNSVIAQAPPVAQEALKKELETLTTNYQWLCTRLNGKCKTLEEVWACWHELLSYLEKANKWLNEVEFKLKTTENIPGGAEEISEVLDSLENLMRHSEDNPNQIRILAQTLTDGGVMDELINEELETFNSRWRELHEEAVRRQKLLEQSIQSAQETEKSLHLIQESLTFIDKQLAAYIADKVDAAQMPQEAQKIQSDLTSHEISLEEMKKHNQGKEAAQRVLSQIDVAQKKLQDVSMKFRLFQKPANFEQRLQESKMILDEVKMHLPALETKSVEQEVVQSQLNHCVNLYKSLSEVKSEVEMVIKTGRQIVQKKQTENPKELDERVTALKLHYNELGAKVTERKQQLEKCLKLSRKMRKEMNVLTEWLAATDMELTKRSAVEGMPSNLDSEVAWGKATQKEIEKQKVHLKSITEVGEALKTVLGKKETLVEDKLSLLNSNWIAVTSRAEEWLNLLLEYQKHMETFDQNVDHITKWIIQADTLLDESEKKKPQQKEDVLKRLKAELNDIRPKVDSTRDQAANLMANRGDHCRKLVEPQISELNHRFAAISHRIKTGKASIPLKELEQFNSDIQKLLEPLEAEIQQGVNLKEEDFNKDMNEDNEGTVKELLQRGDNLQQRITDERKREEIKIKQQLLQTKHNALKDLRSQRRKKALEISHQWYQYKRQADDLLKCLDDIEKKLASLPEPRDERKIKEIDRELQKKKEELNAVRRQAEGLSEDGAAMAVEPTQIQLSKRWREIESKFAQFRRLNFAQIHTVREETMMVMTEDMPLEISYVPSTYLTEITHVSQALLEVEQLLNAPDLCAKDFEDLFKQEESLKNIKDSLQQSSGRIDIIHSKKTAALQSATPVERVKLQEALSQLDFQWEKVNKMYKDRQGRFDRSVEKWRRFHYDIKIFNQWLTEAEQFLRKTQIPENWEHAKYKWYLKELQDGIGQRQTVVRTLNATGEEIIQQSSKTDASILQEKLGSLNLRWQEVCKQLSDRKKRLEEQKNILSEFQRDLNEFVLWLEEADNIASIPLEPGKEQQLKEKLEQVKLLVEELPLRQGILKQLNETGGPVLVSAPISPEEQDKLENKLKQTNLQWIKVSRALPEKQGEIEAQIKDLGQLEKKLEDLEEQLNHLLLWLSPIRNQLEIYNQPNQEGPFDVKETEIAVQAKQPDVEEILSKGQHLYKEKPATQPVKRKLEDLSSEWKAVNRLLQELRAKQPDLAPGLTTIGASPTQTVTLVTQPVVTKETAISKLEMPSSLMLEVPALADFNRAWTELTDWLSLLDQVIKSQRVMVGDLEDINEMIIKQKATMQDLEQRRPQLEELITAAQNLKNKTSNQEARTIITDRIERIQNQWDEVQEHLQNRRQQLNEMLKDSTQWLEAKEEAEQVLGQARAKLESWKEGPYTVDAIQKKITETKQLAKDLRQWQTNVDVANDLALKLLRDYSADDTRKVHMITENINASWRSIHKRVSEREAALEETHRLLQQFPLDLEKFLAWLTEAETTANVLQDATRKERLLEDSKGVKELMKQWQDLQGEIEAHTDVYHNLDENSQKILRSLEGSDDAVLLQRRLDNMNFKWSELRKKSLNIRSHLEASSDQWKRLHLSLQELLVWLQLKDDELSRQAPIGGDFPAVQKQNDVHRAFKRELKTKEPVIMSTLETVRIFLTEQPLEGLEKLYQEPRELPPEERAQNVTRLLRKQAEEVNTEWEKLNLHSADWQRKIDETLERLQELQEATDELDLKLRQAEVIKGSWQPVGDLLIDSLQDHLEKVKALRGEIAPLKENVSHVNDLARQLTTLGIQLSPYNLSTLEDLNTRWKLLQVAVEDRVRQLHEAHRDFGPASQHFLSTSVQGPWERAISPNKVPYYINHETQTTCWDHPKMTELYQSLADLNNVRFSAYRTAMKLRRLQKALCLDLLSLSAACDALDQHNLKQNDQPMDILQIINCLTTIYDRLEQEHNNLVNVPLCVDMCLNWLLNVYDTGRTGRIRVLSFKTGIISLCKAHLEDKYRYLFKQVASSTGFCDQRRLGLLLHDSIQIPRQLGEVASFGGSNIEPSVRSCFQFANNKPEIEAALFLDWMRLEPQSMVWLPVLHRVAAAETAKHQAKCNICKECPIIGFRYRSLKHFNYDICQSCFFSGRVAKGHKMHYPMVEYCTPTTSGEDVRDFAKVLKNKFRTKRYFAKHPRMGYLPVQTVLEGDNMETPVTLINFWPVDSAPASSPQLSHDDTHSRIEHYASRLAEMENSNGSYLNDSISPNESIDDEHLLIQHYCQSLNQDSPLSQPRSPAQILISLESEERGELERILADLEEENRNLQAEYDRLKQQHEHKGLSPLPSPPEMMPTSPQSPRDAELIAEAKLLRQHKGRLEARMQILEDHNKQLESQLHRLRQLLEQPQAEAKVNGTTVSSPSTSLQRSDSSQPMLLRVVGSQTSDSMGEEDLLSPPQDTSTGLEEVMEQLNNSFPSSRGRNTPGKPMREDTM

SEQ ID NO: 14785 - protein, 3681 aa, Homo sapiens [sequence omitted]

SEQ ID NO: 14786 - protein, 2344 aa, Homo sapiens
MTEIILLIFFPAYFLNAVRRQKLLEQSIQSAQETEKSLHLIQESLTFIDKQLAAYIADKVDAAQMPQEAQKIQSDLTSHEISLEEMKKHNQGKEAAQRVLSQIDVAQKKLQDVSMKFRLFQKPANFEQRLQESKMILDEVKMHLPALETKSVEQEVVQSQLNHCVNLYKSLSEVKSEVEMVIKTGRQIVQKKQTENPKELDERVTALKLHYNELGAKVTERKQQLEKCLKLSRKMRKEMNVLTEWLAATDMELTKRSAVEGMPSNLDSEVAWGKATQKEIEKQKVHLKSITEVGEALKTVLGKKETLVEDKLSLLNSNWIAVTSRAEEWLNLLLEYQKHMETFDQNVDHITKWIIQADTLLDESEKKKPQQKEDVLKRLKAELNDIRPKVDSTRDQAANLMANRGDHCRKLVEPQISELNHRFAAISHRIKTGKASIPLKELEQFNSDIQKLLEPLEAEIQQGVNLKEEDFNKDMNEDNEGTVKELLQRGDNLQQRITDERKREEIKIKQQLLQTKHNALKDLRSQRRKKALEISHQWYQYKRQADDLLKCLDDIEKKLASLPEPRDERKIKEIDRELQKKKEELNAVRRQAEGLSEDGAAMAVEPTQIQLSKRWREIESKFAQFRRLNFAQIHTVREETMMVMTEDMPLEISYVPSTYLTEITHVSQALLEVEQLLNAPDLCAKDFEDLFKQEESLKNIKDSLQQSSGRIDIIHSKKTAALQSATPVERVKLQEALSQLDFQWEKVNKMYKDRQGRFDRSVEKWRRFHYDIKIFNQWLTEAEQFLRKTQIPENWEHAKYKWYLKELQDGIGQRQTVVRTLNATGEEIIQQSSKTDASILQEKLGSLNLRWQEVCKQLSDRKKRLEEQKNILSEFQRDLNEFVLWLEEADNIASIPLEPGKEQQLKEKLEQVKLLVEELPLRQGILKQLNETGGPVLVSAPISPEEQDKLENKLKQTNLQWIKVSRALPEKQGEIEAQIKDLGQLEKKLEDLEEQLNHLLLWLSPIRNQLEIYNQPNQEGPFDVKETEIAVQAKQPDVEEILSKGQHLYKEKPATQPVKRKLEDLSSEWKAVNRLLQELRAKQPDLAPGLTTIGASPTQTVTLVTQPVVTKETAISKLEMPSSLMLEVPALADFNRAWTELTDWLSLLDQVIKSQRVMVGDLEDINEMIIKQKATMQDLEQRRPQLEELITAAQNLKNKTSNQEARTIITDRIERIQNQWDEVQEHLQNRRQQLNEMLKDSTQWLEAKEEAEQVLGQARAKLESWKEGPYTVDAIQKKITETKQLAKDLRQWQTNVDVANDLALKLLRDYSADDTRKVHMITENINASWRSIHKRVSEREAALEETHRLLQQFPLDLEKFLAWLTEAETTANVLQDATRKERLLEDSKGVKELMKQWQDLQGEIEAHTDVYHNLDENSQKILRSLEGSDDAVLLQRRLDNMNFKWSELRKKSLNIRSHLEASSDQWKRLHLSLQELLVWLQLKDDELSRQAPIGGDFPAVQKQNDVHRAFKRELKTKEPVIMSTLETVRIFLTEQPLEGLEKLYQEPRELPPEERAQNVTRLLRKQAEEVNTEWEKLNLHSADWQRKIDETLERLQELQEATDELDLKLRQAEVIKGSWQPVGDLLIDSLQDHLEKVKALRGEIAPLKENVSHVNDLARQLTTLGIQLSPYNLSTLEDLNTRWKLLQVAVEDRVRQLHEAHRDFGPASQHFLSTSVQGPWERAISPNKVPYYINHETQTTCWDHPKMTELYQSLADLNNVRFSAYRTAMKLRRLQKALCLDLLSLSAACDALDQHNLKQNDQPMDILQIINCLTTIYDRLEQEHNNLVNVPLCVDMCLNWLLNVYDTGRTGRIRVLSFKTGIISLCKAHLEDKYRYLFKQVASSTGFCDQRRLGLLLHDSIQIPRQLGEVASFGGSNIEPSVRSCFQFANNKPEIEAALFLDWMRLEPQSMVWLPVLHRVAAAETAKHQAKCNICKECPIIGFRYRSLKHFNYDICQSCFFSGRVAKGHKMHYPMVEYCTPTTSGEDVRDFAKVLKNKFRTKRYFAKHPRMGYLPVQTVLEGDNMETPVTLINFWPVDSAPASSPQLSHDDTHSRIEHYASRLAEMENSNGSYLNDSISPNESIDDEHLLIQHYCQSLNQDSPLSQPRSPAQILISLESEERGELERILADLEEENRNLQAEYDRLKQQHEHKGLSPLPSPPEMMPTSPQSPRDAELIAEAKLLRQHKGRLEARMQILEDHNKQLESQLHRLRQLLEQPQAEAKVNGTTVSSPSTSLQRSDSSQPMLLRVVGSQTSDSMGEEDLLSPPQDTSTGLEEVMEQLNNSFPSSRGRNTPGKPMREDTM

SEQ ID NO: 14787 - protein, 2341 aa, Homo sapiens
MSARKLRNLSYKKAVRRQKLLEQSIQSAQETEKSLHLIQESLTFIDKQLAAYIADKVDAAQMPQEAQKIQSDLTSHEISLEEMKKHNQGKEAAQRVLSQIDVAQKKLQDVSMKFRLFQKPANFEQRLQESKMILDEVKMHLPALETKSVEQEVVQSQLNHCVNLYKSLSEVKSEVEMVIKTGRQIVQKKQTENPKELDERVTALKLHYNELGAKVTERKQQLEKCLKLSRKMRKEMNVLTEWLAATDMELTKRSAVEGMPSNLDSEVAWGKATQKEIEKQKVHLKSITEVGEALKTVLGKKETLVEDKLSLLNSNWIAVTSRAEEWLNLLLEYQKHMETFDQNVDHITKWIIQADTLLDESEKKKPQQKEDVLKRLKAELNDIRPKVDSTRDQAANLMANRGDHCRKLVEPQISELNHRFAAISHRIKTGKASIPLKELEQFNSDIQKLLEPLEAEIQQGVNLKEEDFNKDMNEDNEGTVKELLQRGDNLQQRITDERKREEIKIKQQLLQTKHNALKDLRSQRRKKALEISHQWYQYKRQADDLLKCLDDIEKKLASLPEPRDERKIKEIDRELQKKKEELNAVRRQAEGLSEDGAAMAVEPTQIQLSKRWREIESKFAQFRRLNFAQIHTVREETMMVMTEDMPLEISYVPSTYLTEITHVSQALLEVEQLLNAPDLCAKDFEDLFKQEESLKNIKDSLQQSSGRIDIIHSKKTAALQSATPVERVKLQEALSQLDFQWEKVNKMYKDRQGRFDRSVEKWRRFHYDIKIFNQWLTEAEQFLRKTQIPENWEHAKYKWYLKELQDGIGQRQTVVRTLNATGEEIIQQSSKTDASILQEKLGSLNLRWQEVCKQLSDRKKRLEEQKNILSEFQRDLNEFVLWLEEADNIASIPLEPGKEQQLKEKLEQVKLLVEELPLRQGILKQLNETGGPVLVSAPISPEEQDKLENKLKQTNLQWIKVSRALPEKQGEIEAQIKDLGQLEKKLEDLEEQLNHLLLWLSPIRNQLEIYNQPNQEGPFDVKETEIAVQAKQPDVEEILSKGQHLYKEKPATQPVKRKLEDLSSEWKAVNRLLQELRAKQPDLAPGLTTIGASPTQTVTLVTQPVVTKETAISKLEMPSSLMLEVPALADFNRAWTELTDWLSLLDQVIKSQRVMVGDLEDINEMIIKQKATMQDLEQRRPQLEELITAAQNLKNKTSNQEARTIITDRIERIQNQWDEVQEHLQNRRQQLNEMLKDSTQWLEAKEEAEQVLGQARAKLESWKEGPYTVDAIQKKITETKQLAKDLRQWQTNVDVANDLALKLLRDYSADDTRKVHMITENINASWRSIHKRVSEREAALEETHRLLQQFPLDLEKFLAWLTEAETTANVLQDATRKERLLEDSKGVKELMKQWQDLQGEIEAHTDVYHNLDENSQKILRSLEGSDDAVLLQRRLDNMNFKWSELRKKSLNIRSHLEASSDQWKRLHLSLQELLVWLQLKDDELSRQAPIGGDFPAVQKQNDVHRAFKRELKTKEPVIMSTLETVRIFLTEQPLEGLEKLYQEPRELPPEERAQNVTRLLRKQAEEVNTEWEKLNLHSADWQRKIDETLERLQELQEATDELDLKLRQAEVIKGSWQPVGDLLIDSLQDHLEKVKALRGEIAPLKENVSHVNDLARQLTTLGIQLSPYNLSTLEDLNTRWKLLQVAVEDRVRQLHEAHRDFGPASQHFLSTSVQGPWERAISPNKVPYYINHETQTTCWDHPKMTELYQSLADLNNVRFSAYRTAMKLRRLQKALCLDLLSLSAACDALDQHNLKQNDQPMDILQIINCLTTIYDRLEQEHNNLVNVPLCVDMCLNWLLNVYDTGRTGRIRVLSFKTGIISLCKAHLEDKYRYLFKQVASSTGFCDQRRLGLLLHDSIQIPRQLGEVASFGGSNIEPSVRSCFQFANNKPEIEAALFLDWMRLEPQSMVWLPVLHRVAAAETAKHQAKCNICKECPIIGFRYRSLKHFNYDICQSCFFSGRVAKGHKMHYPMVEYCTPTTSGEDVRDFAKVLKNKFRTKRYFAKHPRMGYLPVQTVLEGDNMETPVTLINFWPVDSAPASSPQLSHDDTHSRIEHYASRLAEMENSNGSYLNDSISPNESIDDEHLLIQHYCQSLNQDSPLSQPRSPAQILISLESEERGELERILADLEEENRNLQAEYDRLKQQHEHKGLSPLPSPPEMMPTSPQSPRDAELIAEAKLLRQHKGRLEARMQILEDHNKQLESQLHRLRQLLEQPQAEAKVNGTTVSSPSTSLQRSDSSQPMLLRVVGSQTSDSMGEEDLLSPPQDTSTGLEEVMEQLNNSFPSSRGRNTPGKPMREDTM

SEQ ID NO: 14788 - protein, 1225 aa, Homo sapiens
MPSSLMLEVPALADFNRAWTELTDWLSLLDQVIKSQRVMVGDLEDINEMIIKQKATMQDLEQRRPQLEELITAAQNLKNKTSNQEARTIITDRIERIQNQWDEVQEHLQNRRQQLNEMLKDSTQWLEAKEEAEQVLGQARAKLESWKEGPYTVDAIQKKITETKQLAKDLRQWQTNVDVANDLALKLLRDYSADDTRKVHMITENINASWRSIHKRVSEREAALEETHRLLQQFPLDLEKFLAWLTEAETTANVLQDATRKERLLEDSKGVKELMKQWQDLQGEIEAHTDVYHNLDENSQKILRSLEGSDDAVLLQRRLDNMNFKWSELRKKSLNIRSHLEASSDQWKRLHLSLQELLVWLQLKDDELSRQAPIGGDFPAVQKQNDVHRAFKRELKTKEPVIMSTLETVRIFLTEQPLEGLEKLYQEPRELPPEERAQNVTRLLRKQAEEVNTEWEKLNLHSADWQRKIDETLERLQELQEATDELDLKLRQAEVIKGSWQPVGDLLIDSLQDHLEKVKALRGEIAPLKENVSHVNDLARQLTTLGIQLSPYNLSTLEDLNTRWKLLQVAVEDRVRQLHEAHRDFGPASQHFLSTSVQGPWERAISPNKVPYYINHETQTTCWDHPKMTELYQSLADLNNVRFSAYRTAMKLRRLQKALCLDLLSLSAACDALDQHNLKQNDQPMDILQIINCLTTIYDRLEQEHNNLVNVPLCVDMCLNWLLNVYDTGRTGRIRVLSFKTGIISLCKAHLEDKYRYLFKQVASSTGFCDQRRLGLLLHDSIQIPRQLGEVASFGGSNIEPSVRSCFQFANNKPEIEAALFLDWMRLEPQSMVWLPVLHRVAAAETAKHQAKCNICKECPIIGFRYRSLKHFNYDICQSCFFSGRVAKGHKMHYPMVEYCTPTTSGEDVRDFAKVLKNKFRTKRYFAKHPRMGYLPVQTVLEGDNMETPVTLINFWPVDSAPASSPQLSHDDTHSRIEHYASRLAEMENSNGSYLNDSISPNESIDDEHLLIQHYCQSLNQDSPLSQPRSPAQILISLESEERGELERILADLEEENRNLQAEYDRLKQQHEHKGLSPLPSPPEMMPTSPQSPRDAELIAEAKLLRQHKGRLEARMQILEDHNKQLESQLHRLRQLLEQPQAEAKVNGTTVSSPSTSLQRSDSSQPMLLRVVGSQTSDSMGEEDLLSPPQDTSTGLEEVMEQLNNSFPSSRGRNTPGKPMREDTM

SEQ ID NO: 14789 - protein, 1115 aa, Homo sapiens
MPSSLMLEVPALADFNRAWTELTDWLSLLDQVIKSQRVMVGDLEDINEMIIKQKATMQDLEQRRPQLEELITAAQNLKNKTSNQEARTIITDRIERIQNQWDEVQEHLQNRRQQLNEMLKDSTQWLEAKEEAEQVLGQARAKLESWKEGPYTVDAIQKKITETKQLAKDLRQWQTNVDVANDLALKLLRDYSADDTRKVHMITENINASWRSIHKRVSEREAALEETHRLLQQFPLDLEKFLAWLTEAETTANVLQDATRKERLLEDSKGVKELMKQWQDLQGEIEAHTDVYHNLDENSQKILRSLEGSDDAVLLQRRLDNMNFKWSELRKKSLNIRSHLEASSDQWKRLHLSLQELLVWLQLKDDELSRQAPIGGDFPAVQKQNDVHRAFKRELKTKEPVIMSTLETVRIFLTEQPLEGLEKLYQEPRELPPEERAQNVTRLLRKQAEEVNTEWEKLNLHSADWQRKIDETLERLQELQEATDELDLKLRQAEVIKGSWQPVGDLLIDSLQDHLEKVKALRGEIAPLKENVSHVNDLARQLTTLGIQLSPYNLSTLEDLNTRWKLLQVAVEDRVRQLHEAHRDFGPASQHFLSTSVQGPWERAISPNKVPYYINHETQTTCWDHPKMTELYQSLADLNNVRFSAYRTAMKLRRLQKALCLDLLSLSAACDALDQHNLKQNDQPMDILQIINCLTTIYDRLEQEHNNLVNVPLCVDMCLNWLLNVYDTGRTGRIRVLSFKTGIISLCKAHLEDKYRYLFKQVASSTGFCDQRRLGLLLHDSIQIPRQLGEVASFGGSNIEPSVRSCFQFANNKPEIEAALFLDWMRLEPQSMVWLPVLHRVAAAETAKHQAKCNICKECPIIGFRYRSLKHFNYDICQSCFFSGRVAKGHKMHYPMVEYCTPTTSGEDVRDFAKVLKNKFRTKRYFAKHPRMGYLPVQTVLEGDNMETNLQAEYDRLKQQHEHKGLSPLPSPPEMMPTSPQSPRDAELIAEAKLLRQHKGRLEARMQILEDHNKQLESQLHRLRQLLEQPQAEAKVNGTTVSSPSTSLQRSDSSQPMLLRVVGSQTSDSMGEEDLLSPPQDTSTGLEEVMEQLNNSFPSSRGRNTPGKPMREDTM

SEQ ID NO: 14790 - protein, 1243 aa, Homo sapiens
MPSSLMLEVPALADFNRAWTELTDWLSLLDQVIKSQRVMVGDLEDINEMIIKQKATMQDLEQRRPQLEELITAAQNLKNKTSNQEARTIITDRIERIQNQWDEVQEHLQNRRQQLNEMLKDSTQWLEAKEEAEQVLGQARAKLESWKEGPYTVDAIQKKITETKQLAKDLRQWQTNVDVANDLALKLLRDYSADDTRKVHMITENINASWRSIHKRVSEREAALEETHRLLQQFPLDLEKFLAWLTEAETTANVLQDATRKERLLEDSKGVKELMKQWQDLQGEIEAHTDVYHNLDENSQKILRSLEGSDDAVLLQRRLDNMNFKWSELRKKSLNIRSHLEASSDQWKRLHLSLQELLVWLQLKDDELSRQAPIGGDFPAVQKQNDVHRAFKRELKTKEPVIMSTLETVRIFLTEQPLEGLEKLYQEPRELPPEERAQNVTRLLRKQAEEVNTEWEKLNLHSADWQRKIDETLERLQELQEATDELDLKLRQAEVIKGSWQPVGDLLIDSLQDHLEKVKALRGEIAPLKENVSHVNDLARQLTTLGIQLSPYNLSTLEDLNTRWKLLQVAVEDRVRQLHEAHRDFGPASQHFLSTSVQGPWERAISPNKVPYYINHETQTTCWDHPKMTELYQSLADLNNVRFSAYRTAMKLRRLQKALCLDLLSLSAACDALDQHNLKQNDQPMDILQIINCLTTIYDRLEQEHNNLVNVPLCVDMCLNWLLNVYDTGRTGRIRVLSFKTGIISLCKAHLEDKYRYLFKQVASSTGFCDQRRLGLLLHDSIQIPRQLGEVASFGGSNIEPSVRSCFQFANNKPEIEAALFLDWMRLEPQSMVWLPVLHRVAAAETAKHQAKCNICKECPIIGFRYRSLKHFNYDICQSCFFSGRVAKGHKMHYPMVEYCTPTTSGEDVRDFAKVLKNKFRTKRYFAKHPRMGYLPVQTVLEGDNMETPVTLINFWPVDSAPASSPQLSHDDTHSRIEHYASRLAEMENSNGSYLNDSISPNESIDDEHLLIQHYCQSLNQDSPLSQPRSPAQILISLESEERGELERILADLEEENRNLQAEYDRLKQQHEHKGLSPLPSPPEMMPTSPQSPRDAELIAEAKLLRQHKGRLEARMQILEDHNKQLESQLHRLRQLLEQPQAEAKVNGTTVSSPSTSLQRSDSSQPMLLRVVGSQTSDSMGEEDLLSPPQDTSTGLEEVMEQLNNSFPSSRGHNVGSLFHMADDLGRAMESLVSVMTDEEGAE

SEQ ID NO: 14791 - protein, 1230 aa, Homo sapiens
MPSSLMLEVPALADFNRAWTELTDWLSLLDQVIKSQRVMVGDLEDINEMIIKQKATMQDLEQRRPQLEELITAAQNLKNKTSNQEARTIITDRIERIQNQWDEVQEHLQNRRQQLNEMLKDSTQWLEAKEEAEQVLGQARAKLESWKEGPYTVDAIQKKITETKQLAKDLRQWQTNVDVANDLALKLLRDYSADDTRKVHMITENINASWRSIHKRVSEREAALEETHRLLQQFPLDLEKFLAWLTEAETTANVLQDATRKERLLEDSKGVKELMKQWQDLQGEIEAHTDVYHNLDENSQKILRSLEGSDDAVLLQRRLDNMNFKWSELRKKSLNIRSHLEASSDQWKRLHLSLQELLVWLQLKDDELSRQAPIGGDFPAVQKQNDVHRAFKRELKTKEPVIMSTLETVRIFLTEQPLEGLEKLYQEPRELPPEERAQNVTRLLRKQAEEVNTEWEKLNLHSADWQRKIDETLERLQELQEATDELDLKLRQAEVIKGSWQPVGDLLIDSLQDHLEKVKALRGEIAPLKENVSHVNDLARQLTTLGIQLSPYNLSTLEDLNTRWKLLQVAVEDRVRQLHEAHRDFGPASQHFLSTSVQGPWERAISPNKVPYYINHETQTTCWDHPKMTELYQSLADLNNVRFSAYRTAMKLRRLQKALCLDLLSLSAACDALDQHNLKQNDQPMDILQIINCLTTIYDRLEQEHNNLVNVPLCVDMCLNWLLNVYDTGRTGRIRVLSFKTGIISLCKAHLEDKYRYLFKQVASSTGFCDQRRLGLLLHDSIQIPRQLGEVASFGGSNIEPSVRSCFQFANNKPEIEAALFLDWMRLEPQSMVWLPVLHRVAAAETAKHQAKCNICKECPIIGFRYRSLKHFNYDICQSCFFSGRVAKGHKMHYPMVEYCTPTTSGEDVRDFAKVLKNKFRTKRYFAKHPRMGYLPVQTVLEGDNMETPASSPQLSHDDTHSRIEHYASRLAEMENSNGSYLNDSISPNESIDDEHLLIQHYCQSLNQDSPLSQPRSPAQILISLESEERGELERILADLEEENRNLQAEYDRLKQQHEHKGLSPLPSPPEMMPTSPQSPRDAELIAEAKLLRQHKGRLEARMQILEDHNKQLESQLHRLRQLLEQPQAEAKVNGTTVSSPSTSLQRSDSSQPMLLRVVGSQTSDSMGEEDLLSPPQDTSTGLEEVMEQLNNSFPSSRGHNVGSLFHMADDLGRAMESLVSVMTDEEGAE

SEQ ID NO: 14792 - protein, 1133 aa, Homo sapiens
MPSSLMLEVPALADFNRAWTELTDWLSLLDQVIKSQRVMVGDLEDINEMIIKQKATMQDLEQRRPQLEELITAAQNLKNKTSNQEARTIITDRIERIQNQWDEVQEHLQNRRQQLNEMLKDSTQWLEAKEEAEQVLGQARAKLESWKEGPYTVDAIQKKITETKQLAKDLRQWQTNVDVANDLALKLLRDYSADDTRKVHMITENINASWRSIHKRVSEREAALEETHRLLQQFPLDLEKFLAWLTEAETTANVLQDATRKERLLEDSKGVKELMKQWQDLQGEIEAHTDVYHNLDENSQKILRSLEGSDDAVLLQRRLDNMNFKWSELRKKSLNIRSHLEASSDQWKRLHLSLQELLVWLQLKDDELSRQAPIGGDFPAVQKQNDVHRAFKRELKTKEPVIMSTLETVRIFLTEQPLEGLEKLYQEPRELPPEERAQNVTRLLRKQAEEVNTEWEKLNLHSADWQRKIDETLERLQELQEATDELDLKLRQAEVIKGSWQPVGDLLIDSLQDHLEKVKALRGEIAPLKENVSHVNDLARQLTTLGIQLSPYNLSTLEDLNTRWKLLQVAVEDRVRQLHEAHRDFGPASQHFLSTSVQGPWERAISPNKVPYYINHETQTTCWDHPKMTELYQSLADLNNVRFSAYRTAMKLRRLQKALCLDLLSLSAACDALDQHNLKQNDQPMDILQIINCLTTIYDRLEQEHNNLVNVPLCVDMCLNWLLNVYDTGRTGRIRVLSFKTGIISLCKAHLEDKYRYLFKQVASSTGFCDQRRLGLLLHDSIQIPRQLGEVASFGGSNIEPSVRSCFQFANNKPEIEAALFLDWMRLEPQSMVWLPVLHRVAAAETAKHQAKCNICKECPIIGFRYRSLKHFNYDICQSCFFSGRVAKGHKMHYPMVEYCTPTTSGEDVRDFAKVLKNKFRTKRYFAKHPRMGYLPVQTVLEGDNMETNLQAEYDRLKQQHEHKGLSPLPSPPEMMPTSPQSPRDAELIAEAKLLRQHKGRLEARMQILEDHNKQLESQLHRLRQLLEQPQAEAKVNGTTVSSPSTSLQRSDSSQPMLLRVVGSQTSDSMGEEDLLSPPQDTSTGLEEVMEQLNNSFPSSRGHNVGSLFHMADDLGRAMESLVSVMTDEEGAE

SEQ ID NO: 14793 - protein, 956 aa, Homo sapiens
MLHRKTYHVKDLQGEIEAHTDVYHNLDENSQKILRSLEGSDDAVLLQRRLDNMNFKWSELRKKSLNIRSHLEASSDQWKRLHLSLQELLVWLQLKDDELSRQAPIGGDFPAVQKQNDVHRAFKRELKTKEPVIMSTLETVRIFLTEQPLEGLEKLYQEPRELPPEERAQNVTRLLRKQAEEVNTEWEKLNLHSADWQRKIDETLERLQELQEATDELDLKLRQAEVIKGSWQPVGDLLIDSLQDHLEKVKALRGEIAPLKENVSHVNDLARQLTTLGIQLSPYNLSTLEDLNTRWKLLQVAVEDRVRQLHEAHRDFGPASQHFLSTSVQGPWERAISPNKVPYYINHETQTTCWDHPKMTELYQSLADLNNVRFSAYRTAMKLRRLQKALCLDLLSLSAACDALDQHNLKQNDQPMDILQIINCLTTIYDRLEQEHNNLVNVPLCVDMCLNWLLNVYDTGRTGRIRVLSFKTGIISLCKAHLEDKYRYLFKQVASSTGFCDQRRLGLLLHDSIQIPRQLGEVASFGGSNIEPSVRSCFQFANNKPEIEAALFLDWMRLEPQSMVWLPVLHRVAAAETAKHQAKCNICKECPIIGFRYRSLKHFNYDICQSCFFSGRVAKGHKMHYPMVEYCTPTTSGEDVRDFAKVLKNKFRTKRYFAKHPRMGYLPVQTVLEGDNMETPVTLINFWPVDSAPASSPQLSHDDTHSRIEHYASRLAEMENSNGSYLNDSISPNESIDDEHLLIQHYCQSLNQDSPLSQPRSPAQILISLESEERGELERILADLEEENRNLQAEYDRLKQQHEHKGLSPLPSPPEMMPTSPQSPRDAELIAEAKLLRQHKGRLEARMQILEDHNKQLESQLHRLRQLLEQPQAEAKVNGTTVSSPSTSLQRSDSSQPMLLRVVGSQTSDSMGEEDLLSPPQDTSTGLEEVMEQLNNSFPSSRGRNTPGKPMREDTM

SEQ ID NO: 14794 - protein, 617 aa, Homo sapiens
MREQLKGHETQTTCWDHPKMTELYQSLADLNNVRFSAYRTAMKLRRLQKALCLDLLSLSAACDALDQHNLKQNDQPMDILQIINCLTTIYDRLEQEHNNLVNVPLCVDMCLNWLLNVYDTGRTGRIRVLSFKTGIISLCKAHLEDKYRYLFKQVASSTGFCDQRRLGLLLHDSIQIPRQLGEVASFGGSNIEPSVRSCFQFANNKPEIEAALFLDWMRLEPQSMVWLPVLHRVAAAETAKHQAKCNICKECPIIGFRYRSLKHFNYDICQSCFFSGRVAKGHKMHYPMVEYCTPTTSGEDVRDFAKVLKNKFRTKRYFAKHPRMGYLPVQTVLEGDNMETPVTLINFWPVDSAPASSPQLSHDDTHSRIEHYASRLAEMENSNGSYLNDSISPNESIDDEHLLIQHYCQSLNQDSPLSQPRSPAQILISLESEERGELERILADLEEENRNLQAEYDRLKQQHEHKGLSPLPSPPEMMPTSPQSPRDAELIAEAKLLRQHKGRLEARMQILEDHNKQLESQLHRLRQLLEQPQAEAKVNGTTVSSPSTSLQRSDSSQPMLLRVVGSQTSDSMGEEDLLSPPQDTSTGLEEVMEQLNNSFPSSRGRNTPGKPMREDTM

SEQ ID NO: 14795 - protein, 604 aa, Homo sapiens
MREQLKGHETQTTCWDHPKMTELYQSLADLNNVRFSAYRTAMKLRRLQKALCLDLLSLSAACDALDQHNLKQNDQPMDILQIINCLTTIYDRLEQEHNNLVNVPLCVDMCLNWLLNVYDTGRTGRIRVLSFKTGIISLCKAHLEDKYRYLFKQVASSTGFCDQRRLGLLLHDSIQIPRQLGEVASFGGSNIEPSVRSCFQFANNKPEIEAALFLDWMRLEPQSMVWLPVLHRVAAAETAKHQAKCNICKECPIIGFRYRSLKHFNYDICQSCFFSGRVAKGHKMHYPMVEYCTPTTSGEDVRDFAKVLKNKFRTKRYFAKHPRMGYLPVQTVLEGDNMETPASSPQLSHDDTHSRIEHYASRLAEMENSNGSYLNDSISPNESIDDEHLLIQHYCQSLNQDSPLSQPRSPAQILISLESEERGELERILADLEEENRNLQAEYDRLKQQHEHKGLSPLPSPPEMMPTSPQSPRDAELIAEAKLLRQHKGRLEARMQILEDHNKQLESQLHRLRQLLEQPQAEAKVNGTTVSSPSTSLQRSDSSQPMLLRVVGSQTSDSMGEEDLLSPPQDTSTGLEEVMEQLNNSFPSSRGRNTPGKPMREDTM

SEQ ID NO: 14796 - protein, 635 aa, Homo sapiens
MREQLKGHETQTTCWDHPKMTELYQSLADLNNVRFSAYRTAMKLRRLQKALCLDLLSLSAACDALDQHNLKQNDQPMDILQIINCLTTIYDRLEQEHNNLVNVPLCVDMCLNWLLNVYDTGRTGRIRVLSFKTGIISLCKAHLEDKYRYLFKQVASSTGFCDQRRLGLLLHDSIQIPRQLGEVASFGGSNIEPSVRSCFQFANNKPEIEAALFLDWMRLEPQSMVWLPVLHRVAAAETAKHQAKCNICKECPIIGFRYRSLKHFNYDICQSCFFSGRVAKGHKMHYPMVEYCTPTTSGEDVRDFAKVLKNKFRTKRYFAKHPRMGYLPVQTVLEGDNMETPVTLINFWPVDSAPASSPQLSHDDTHSRIEHYASRLAEMENSNGSYLNDSISPNESIDDEHLLIQHYCQSLNQDSPLSQPRSPAQILISLESEERGELERILADLEEENRNLQAEYDRLKQQHEHKGLSPLPSPPEMMPTSPQSPRDAELIAEAKLLRQHKGRLEARMQILEDHNKQLESQLHRLRQLLEQPQAEAKVNGTTVSSPSTSLQRSDSSQPMLLRVVGSQTSDSMGEEDLLSPPQDTSTGLEEVMEQLNNSFPSSRGHNVGSLFHMADDLGRAMESLVSVMTDEEGAE

SEQ ID NO: 14797 - protein, 622 aa, Homo sapiens
MREQLKGHETQTTCWDHPKMTELYQSLADLNNVRFSAYRTAMKLRRLQKALCLDLLSLSAACDALDQHNLKQNDQPMDILQIINCLTTIYDRLEQEHNNLVNVPLCVDMCLNWLLNVYDTGRTGRIRVLSFKTGIISLCKAHLEDKYRYLFKQVASSTGFCDQRRLGLLLHDSIQIPRQLGEVASFGGSNIEPSVRSCFQFANNKPEIEAALFLDWMRLEPQSMVWLPVLHRVAAAETAKHQAKCNICKECPIIGFRYRSLKHFNYDICQSCFFSGRVAKGHKMHYPMVEYCTPTTSGEDVRDFAKVLKNKFRTKRYFAKHPRMGYLPVQTVLEGDNMETPASSPQLSHDDTHSRIEHYASRLAEMENSNGSYLNDSISPNESIDDEHLLIQHYCQSLNQDSPLSQPRSPAQILISLESEERGELERILADLEEENRNLQAEYDRLKQQHEHKGLSPLPSPPEMMPTSPQSPRDAELIAEAKLLRQHKGRLEARMQILEDHNKQLESQLHRLRQLLEQPQAEAKVNGTTVSSPSTSLQRSDSSQPMLLRVVGSQTSDSMGEEDLLSPPQDTSTGLEEVMEQLNNSFPSSRGHNVGSLFHMADDLGRAMESLVSVMTDEEGAE

SEQ ID NO: 14798 - protein, 525 aa, Homo sapiens
MREQLKGHETQTTCWDHPKMTELYQSLADLNNVRFSAYRTAMKLRRLQKALCLDLLSLSAACDALDQHNLKQNDQPMDILQIINCLTTIYDRLEQEHNNLVNVPLCVDMCLNWLLNVYDTGRTGRIRVLSFKTGIISLCKAHLEDKYRYLFKQVASSTGFCDQRRLGLLLHDSIQIPRQLGEVASFGGSNIEPSVRSCFQFANNKPEIEAALFLDWMRLEPQSMVWLPVLHRVAAAETAKHQAKCNICKECPIIGFRYRSLKHFNYDICQSCFFSGRVAKGHKMHYPMVEYCTPTTSGEDVRDFAKVLKNKFRTKRYFAKHPRMGYLPVQTVLEGDNMETNLQAEYDRLKQQHEHKGLSPLPSPPEMMPTSPQSPRDAELIAEAKLLRQHKGRLEARMQILEDHNKQLESQLHRLRQLLEQPQAEAKVNGTTVSSPSTSLQRSDSSQPMLLRVVGSQTSDSMGEEDLLSPPQDTSTGLEEVMEQLNNSFPSSRGHNVGSLFHMADDLGRAMESLVSVMTDEEGAE

SEQ ID NO: 14799 - protein, 340 aa, Homo sapiens
MREQLKGHETQTTCWDHPKMTELYQSLADLNNVRFSAYRTAMKLRRLQKALCLDLLSLSAACDALDQHNLKQNDQPMDILQIINCLTTIYDRLEQEHNNLVNVPLCVDMCLNWLLNVYDTGRTGRIRVLSFKTGIISLCKAHLEDKYRYLFKQVASSTGFCDQRRLGLLLHDSIQIPRQLGEVASFGGSNIEPSVRSCFQFANNKPEIEAALFLDWMRLEPQSMVWLPVLHRVAAAETAKHQAKCNICKECPIIGFRYRSLKHFNYDICQSCFFSGRVAKGHKMHYPMVEYCTPTTSGEDVRDFAKVLKNKFRTKRYFAKHPRMGYLPVQTVLEGDNMET

SEQ ID NO: 14800 - protein, 164 aa, Homo sapiens
MSEPAGDVRQNPCGSKACRRLFGPVDSEQLSRDCDALMAGCIQEARERWNFDFVTETPLEGDFAWERVRGLGLPKLYLPTGPRRGRDELGGGRRPGTSPALLQGTAEEDHVDLSLSCTLVPRSGEQAEGSPGGPGDSQGRKRRQTSMTDFYHSKRRLIFSKRKP

SEQ ID NO: 14801 - protein, 421 aa, Homo sapiens
MSAHSMLCERIAIAKELIKRAESLSRSRKGGIEGGAKLCSKLKAELKFLQKVEAGKVAIKESHLQSTNLTHLRAIVESAENLEEVVSVLHVFGYTDTLGEKQTLVVDVVANGGHTWVKAIGRKAEALHNIWLGRGQYGDKSIIEQAEDFLQASHQQPVQYSNPHIIFAFYNSVSSPMAEKLKEMGISVRGDIVAVNALLDHPEELQPSESESDDEGPELLQVTRVDRENILASVAFPTEIKVDVCKRVNLDITTLITYVSALSYGGCHFIFKEKVLTEQAEQERKEQVLPQLEAFMKDKELFACESAVKDFQSILDTLGGPGERERATVLIKRINVVPDQPSERALRLVASSKINSRSLTIFGTGDTLKAITMTANSGFVRAANNQGVKFSVFIHQPRALTESKEALATPLPKDYTTDSEH

SEQ ID NO: 14802 - protein, 479 aa, Homo sapiens
MQEVPEAAGLARVEPPRRSSGVGAARLRFPGGSRPLRARACVLALAVLALPERNNADSMSAHSMLCERIAIAKELIKRAESLSRSRKGGIEGGAKLCSKLKAELKFLQKVEAGKVAIKESHLQSTNLTHLRAIVESAENLEEVVSVLHVFGYTDTLGEKQTLVVDVVANGGHTWVKAIGRKAEALHNIWLGRGQYGDKSIIEQAEDFLQASHQQPVQYSNPHIIFAFYNSVSSPMAEKLKEMGISVRGDIVAVNALLDHPEELQPSESESDDEGPELLQVTRVDRENILASVAFPTEIKVDVCKRVNLDITTLITYVSALSYGGCHFIFKEKVLTEQAEQERKEQVLPQLEAFMKDKELFACESAVKDFQSILDTLGGPGERERATVLIKRINVVPDQPSERALRLVASSKINSRSLTIFGTGDTLKAITMTANSGFVRAANNQGVKFSVFIHQPRALTESKEALATPLPKDYTTDSEH

SEQ ID NO: 14803 - protein, 537 aa, Homo sapiens
MGATGAAEPLQSVLWVKQQRCAVSLEPARALLRWWRSPGPGAGAPGADACSVPVSEIIAVEETDVHGKHQGSGKWQKMEKPYAFTVHCVKRARRHRWKWAQVTFWCPEEQLCHLWLQTLREMLEKLTSRPKHLLVFINPFGGKGQGKRIYERKVAPLFTLASITTDIIVTEHANQAKETLYEINIDKYDGIVCVGGDGMFSEVLHGLIGRTQRSAGVDQNHPRAVLVPSSLRIGIIPAGSTDCVCYSTVGTSDAETSALHIVVGDSLAMDVSSVHHNSTLLRYSVSLLGYGFYGDIIKDSEKKRWLGLARYDFSGLKTFLSHHCYEGTVSFLPAQHTVGSPRDRKPCRAGCFVCRQSKQQLEEEQKKALYGLEAAEDVEEWQVVCGKFLAINATNMSCACRRSPRGLSPAAHLGDGSSDLILIRKCSRFNFLRFLIRHTNQQDQFDFTFVEVYRVKKFQFTSKHMEDEDSDLKEGGKKRFGHICSSHPSCCCTVSNSSWNCDGEVLHSPAIEVRVHCQLVRLFARGIEENPKPDSHS

SEQ ID NO: 14804 - protein, 339 aa, Homo sapiens
MFSEVLHGLIGRTQRSAGVDQNHPRAVLVPSSLRIGIIPAGSTDCVCYSTVGTSDAETSALHIVVGDSLAMDVSSVHHNSTLLRYSVSLLGYGFYGDIIKDSEKKRWLGLARYDFSGLKTFLSHHCYEGTVSFLPAQHTVGSPRDRKPCRAGCFVCRQSKQQLEEEQKKALYGLEAAEDVEEWQVVCGKFLAINATNMSCACRRSPRGLSPAAHLGDGSSDLILIRKCSRFNFLRFLIRHTNQQDQFDFTFVEVYRVKKFQFTSKHMEDEDSDLKEGGKKRFGHICSSHPSCCCTVSNSSWNCDGEVLHSPAIEVRVHCQLVRLFARGIEENPKPDSHS

SEQ ID NO: 14805 - protein, 300 aa, Homo sapiens
MANCEFSPVSGDKPCCRLSRRAQLCLGVSILVLILVVVLAVVVPRWRQQWSGPGTTKRFPETVLARCVKYTEIHPEMRHVDCQSVWDAFKGAFISKHPCNITEEDYQPLMKLGTQTVPCNKILLWSRIKDLAHQFTQVQRDMFTLEDTLLGYLADDLTWCGEFNTSKINYQSCPDWRKDCSNNPVSVFWKTVSRRFAEAACDVVHVMLNGSRSKIFDKNSTFGSVEVHNLQPEKVQTLEAWVIHGGREDSRDLCQDPTIKELESIISKRNIQFSCKNIYRPDKFLQCVKNPEDSSCTSEI

SEQ ID NO: 14806 - protein, 122 aa, Homo sapiens
MANCEFSPVSGDKPCCRLSRRAQLCLGVSILVLILVVVLAVVVPRWRQQWSGPGTTKRFPETVLARCVKYTEIHPEMRHVDCQSVWDAFKGAFISKHPCNITEEDYQPLMKLGTQTVPCNKK

SEQ ID NO: 14807 - protein, 216 aa, Homo sapiens
MLASPARPTLRMLANHALSTPHCACSPAPAPRTASASRRRCVPVEARAAGVFGDRLAGVFGSRGLKHGGVQAPRPRVVRAEPRAGFAVVRSPRRLCGRSHAPQPPAHLGLGPGCFPAVAVVVPVPGSRAHRPFAALLVEGSFLGDPPIPPRRSGVLARGSAGADCLASSVTPGPSLWIPLLLVAGCVSCFVGLAVCVWMQARVSPAWPAGLFLLPR

SEQ ID NO: 14808 - protein, 1117 aa, Homo sapiens
MLAGRPGTRSAVGELGTESSDNLDRAPLGPRESGGHHRPGSYLDMKIHLEKNLEEERQILLQQQKICRNRARKYFVESNRRKKAFEEKRKEQEEKEHQIREQILQQRKQKFEEVTEKFQRAHVPLSQRRKAVSRKPVPPLEEALKQIQESNLKSEVNLPFSRRPTINWRAIDSALPSALSKNDHKHQKQLLSKINCEKEMNENMRATLATSKNVFQLKLEETQKLLEDQHLSNLQKFGDEVNQITNSETLSSIDSLEATEHEEIYLTLNKEHSTSIQRNTISLKPANMQSTNLSCFDEDKLAFSKTQHINNWLTNLDASNTQNVTAFSDILSKSNVLPSWEYFNSKEQNPSPLNGTVERATNTANNSVPFVSSPPMFVLDKKCEKTSETSTMRTTDSTSGAFKRERPLVTESPTFKFSKSQSTSDSLTQEVATFPDQEKYSELNQENGTTSIPTSCVPVATPLVLPSNIQSARPSAKNSIHIKEIDAVQCSDKLDELKDGKEEEIKYFNCNKEELPLFSDSFQDAYIPHNPDSKDEKQKLAETSSLSNVTSNYDFVGQHKKMKYNIHERNGVRFLKSILKKESKYEHGYLKALIINQSFKFGNQKAAAIRDSIELTKEKGAEIPKTIKKLRWFDETSNIENNAENSHSLKNKTGTTQQHSQQFHIQSGAGSNIISVSTCAVNSADTKKSREDSISENVTTLGGSGADHMPLNCFIPSGYNFAKHAWPASKKEESKIPVHDDSKTKQGKPQRGRAKIIRKPGSAKVQSGFICTNRKGAVIQPQSASKVNIFTQAQGKLIIPCPPPQSTSNIRSGKNIQVSQCQPVTPENPQNIITHNSFNSKHVLPTEHSLNQWNQESSSPLSNACSDLVTVIPSLPSYCSSECQTFAKINHSNGTQAVARQDATLYCTQRSPVCEESYPSVTLRTAEEESVPLWKRGPNVLHQNKRATGSTVMRRKRIAETKRRNILEQKRQNPGSVGQKYSEQINNFGQSVLLSSSEPKQTTRGTSYIEEVSDSTSEFLMAENLVKASVPEDEILTVLNSKQIQKSNLPLNKTQQFNICTLSAEEQKILESLNDLSERLHYIQESICKNPSIKNTLQIIPLLEKREDRTSSCRDKR

SEQ ID NO: 14809 - protein, 167 aa, Homo sapiens
MSLALRSELVVDKTKRKKRRELSEEQKQEIKDAFELFDTDKDEAIDYHELKVAMRALGFDVKKADVLKILKDYDREATGKITFEDFNEVVTDWILERDPHEEILKAFKLFDDDDSGKISLRNLRRVARELGENMSDEELRAMIEEFDKDGDGEINQEEFIAIMTGDI

SEQ ID NO: 14810 - protein, 442 aa, Homo sapiens
MSDSAGGRAGLRRYPKLPVWVVEDHQEVLPFIYRAIGSKHLPASNVSFLHFDSHPDLLIPVNMPADTVFDKETLFGELSIENWIMPAVYAGHFSHVIWFHPTWAQQIREGRHHFLVGKDTSTTTIRVTSTDHYFLSDGLYVPEDQLENQKPLQLDVIMVKPYKLCNNQEENDAVSSAKKPKLALEDSENTASTNCDSSSEGLEKDTATQRSDQTCLEPSCSCSSENQECQTAASTGEILEILKKGKAFVLDIDLDFFSVKNPFKEMFTQEEYKILQELYQFKKPGTNLTEEDLVDIVDTRIHQLEDLEATFADLCDGDDEETVQRWASNPGMESLVPLVQSLKKRMEVPDYEMVHQAGLTCDYSELPHHISTEQEIECLIQSVHYLLKNLPNPTLVTIARSSLDDYCPSDQVDTIQEKVLNMLRALYGNLDLQVYAAESPPS

SEQ ID NO: 14811 - protein, 177 aa, Homo sapiens
MFTQEEYKILQELYQFKKPGTNLTEEDLVDIVDTRIHQLEDLEATFADLCDGDDEETVQRWASNPGMESLVPLVQSLKKRMEVPDYEMVHQAGLTCDYSELPHHISTEQEIECLIQSVHYLLKNLPNPTLVTIARSSLDDYCPSDQVDTIQEKVLNMLRALYGNLDLQVYAAESPPS

SEQ ID NO: 14812 - protein, 163 aa, Homo sapiens
MEVPDYEMFPASSSSPSETTSAWISLSMSLSAFWSKPFNKSLGSSKLSNISLPSSEPSKLFQPLPVPKLLPHFQVHQAGLTCDYSELPHHISTEQEIECLIQSVHYLLKNLPNPTLVTIARSSLDDYCPSDQVDTIQEKVLNMLRALYGNLDLQVYAAESPPS

SEQ ID NO: 14813 - protein, 187 aa, Homo sapiens
MSTFPVLAEDIPLRERHVKGRVDPHFRAPKMEMFQRLLLLLLLSMGGTWASKEPLRPRCRPINATLAVEKEGCPVCITVNTTICAGYCPTMTRVLQGVLPALPQVVCNYRDVRFESIRLPGCPRGVNPVVSYAVALSCQCALCRRSTTDCGGPKDHPLTCDDPRFQDSSSSKAPPPSLPSPSRLPGP

SEQ ID NO: 14814 - protein, 155 aa, Homo sapiens
MSKRLLLLLLLSMGGTWASKEPLRPRCRPINATLAVEKEGCPVCITVNTTICAGYCPTMTRVLQGVLPALPQVVCNYRDVRFESIRLPGCPRGVNPVVSYAVALSCQCALCRRSTTDCGGPKDHPLTCDDPRFQDSSSSKAPPPSLPSPSRLPGP

SEQ ID NO: 14815 - protein, 476 aa, Homo sapiens
MKFQGPLACLLLALCLGSGEAGPLQSGEESTGTNIGEALGHGLGDALSEGVGKAIGKEAGGAAGSKVSEALGQGTREAVGTGVRQVPGFGVADALGNRVGEAAHALGNTGHEIGRQAEDVIRHGADAVRGSWQGVPGHNGAWETSGGHGIFGSQGGLGGQGQGNPGGLGTPWVHGYPGNSAGSFGMNPQGAPWGQGGNGGPPNFGTNTQGAVAQPGYGSVRASNQNEGCTNPPPSGSGGGSSNSGGGSGSQSGSSGSGSNGDNNNGSSSGGSSSGSSSGGSSGGSSGGSSGNSGGSRGDSGSESSWGSSTGSSSGNHGGSGGGNGHKPGCEKPGNEARGSGESGIQNSETSPGMFNFDTFWKNFKSKLGFINWDAINKNQVPPPSTRALLYFSRLWEDFKQNTPFLNWKAIIEGADASSLQKRAGRDDQNYNYNQHAYPTAYGGKYSVKTPAKGGVSPSSSASRVQPGLLQWVKFW

SEQ ID NO: 14816 - protein, 466 aa, Homo sapiens
  MOD_RES (295)..(295): Any amino acid
MKFQGPLACLLLALCLGSGEAGPLQSGEESTGTNIGEALGHGLGDALSEGVGKAIGKEAGGAAGSKVSEALGQGTREAVGTGVRQVPGFGVADALGNRVGEAAHALGNTGHEIGRQAEDVIRHGADAVRGSWQGVPGHNGAWETSGGHGIFGSQGGLGGQGQGNPGGLGTPWVHGYPGNSAGSFGMNPQGAPWGQGGNGGPPNFGTNTQGAVAQPGYGSVRASNQNEGCTNPPPSGSGGGSSNSGGSSTGSSSGNHGGSGGGNGHKPGCEKPGNEARGSGESGIQGFRGPGSFPXNMREISKEGNRLLGGSGDNYRGQGSSWGSGGGDAVGGVNTVNSETSPGMFNFDTFWKNFKSKLGFINWDAINKNQVPPPSTRALLYFSRLWEDFKQNTPFLNWKAIIEGADASSLQKRAGRDDQNYNYNQHAYPTAYGGKYSVKTPAKGGVSPSSSASRVQPGLLQWVKFW

SEQ ID NO: 14817 - protein, 386 aa, Homo sapiens
MKFQGPLACLLLALCLGSGEAGPLQSGEESTGTNIGEALGHGLGDALSEGVGKAIGKEAGGAAGSKVSEALGQGTREAVGTGVRQVPGFGVADALGNRVGEAAHALGNTGHEIGRQAEDVIRHGADAVRGSWQGVPGHNGAWETSGGHGIFGSQGGLGGQGQGNPGGLGTPWVHGYPGNSAGSFGMNPQGAPWGQGGNGGPPNFGTNTQGAVAQPGYGSVRASNQNEGCTNPPPSGSGGGSSNSGGGSGSQSGSSGSGSNGDNNNGSSSGGSSSGSSSGGSSGGSSGGSSGNSGGSRGDSGSESSWGSSTGSSSGNHGGSGGGNGHKPGCEKPGNEARGSGESGIQNSETSPGMFNFDTFWKNFKSKLGFINWDAINKDQRSSRIP

SEQ ID NO: 14818 - protein, 449 aa, Homo sapiens
MKFQGPLACLLLALCLGSGEAGPLQSGEESTGTNIGEALGHGLGDALSEGVGKAIGKEAGGAAGSKVSEALGQGTREAVGTGVRQVPGFGVADALGNRVGEAAHALGNTGHEIGRQAEDVIRHGADAVRGSWQGVPGHNGAWETSGGHGIFGSQGGLGGQGQGNPGGLGTPWVHGYPGNSAGSFGMNPQGAPWGQGGNGGPPNFGTNTQGAVAQPGYGSVRASNQNEGCTNPPPSGSGGGSSNSGGSSTGSSSGNHGGSGGGNGHKPGCEKPGNEARGSGESGIQGQGSSWGSGGGDAVGGVNTVNSETSPGMFNFDTFWKNFKSKLGFINWDAINKNQVPPPSTRALLYFSRLWEDFKQNTPFLNWKAIIEGADASSLQKRAGRDDQPGAGWQEVAAVTSKNYNYNQHAYPTAYGGKYSVKTPAKGGVSPSSSASRVQPGLLQWVKFW

SEQ ID NO: 14819 - protein, 398 aa, Homo sapiens
MKFQGPLACLLLALCLGSGEAGPLQSGEESTGTNIGEALGHGLGDALSEGVGKAIGKEAGGAAGSKVSEALGQGTREAVGTGVRQVPGFGVADALGNRVGEAAHALGNTGHEIGRQAEDVIRHGADAVRGSWQGVPGHNGAWETSGGHGIFGSQGGLGGQGQGNPGGLGTPWVHGYPGNSAGSFGMNPQGAPWGQGGNGGPPNFGTNTQGAVAQPGYGSVRASNQNEGCTNPPPSGSGGGSSNSGGGSGSQSGSSGSGSNGDNNNGSSSGGSSSGSSSGGSSGGSSGGSSGNSGGSRGDSGSESSWGSSTGSSSGNHGGSGGGNGHKPGCEKPGNEARGSGESGIQGFRGQGVSSNMRNSETSPGMFNFDTFWKNFKSKLGFINWDAINKDQRSSRIP

SEQ ID NO: 14820 - protein, 436 aa, Homo sapiens
MKFQGPLACLLLALCLGSGEAGPLQSGEESTGTNIGEALGHGLGDALSEGVGKAIGKEAGGAAGSKVSEALGQGTREAVGTGVRQVPGFGVADALGNRVGEAAHALGNTGHEIGRQAEDVIRHGADAVRGSWQGVPGHNGAWETSGGHGIFGSQGGLGGQGQGNPGGLGTPWVHGYPGNSAGSFGMNPQGAPWGQGGNGGPPNFGTNTQGAVAQPGYGSVRASNQNEGCTNPPPSGSGGGSSNSGGGSGSQSGSSGSGSNGDNNNGSSSGGSSSGSSSGGSSGGSSGGSSGNSGGSRGDSGSESSWGSSTGSSSGNHGGSGGGNGHKPGCEKPGNEARGSGESGIQGFRGQGVSSNMREISKEGNRLLGGSGDNYRGQGSSWGSGGGDAVGGVNTVNSETSPGMFNFDTFWKNFKSKLGFINWDAINKDQRSSRIP

SEQ ID NO: 14821 - protein, 369 aa, Homo sapiens
MKFQGPLACLLLALCLGSGEAGPLQSGEESTGTNIGEALGHGLGDALSEGVGKAIGKEAGGAAGSKVSEALGQGTREAVGTGVRQVPGFGVADALGNRVGEAAHALGNTGHEIGRQAEDVIRHGADAVRGSWQGVPGHNGAWETSGGHGIFGSQGGLGGQGQGNPGGLGTPWVHGYPGNSAGSFGMNPQGAPWGQGGNGGPPNFGTNTQGAVAQPGYGSVRASNQNEGCTNPPPSGSGGGSSNSGGGSGSQSGSSGSGSNGDNNNGSSSGGSSSGSSSGGSSGGSSGGSSGNSGGSRGDSGSESSWGSSTGSSSGNHGGSGGGNGHKPGNSETSPGMFNFDTFWKNFKSKLGFINWDAINKDQRSSRIP

SEQ ID NO: 14822 - protein, 189 aa, Homo sapiens
MLGITSCSDQQAKEGEGLEGSSTGSSSGNHGGSGGGNGHKPGCEKPGNEARGSGESGIQNSETSPGMFNFDTFWKNFKSKLGFINWDAINKNQVPPPSTRALLYFSRLWEDFKQNTPFLNWKAIIEGADASSLQKRAGRDDQNYNYNQHAYPTAYGGKYSVKTPAKGGVSPSSSASRVQPGLLQWVKFW

SEQ ID NO: 14823 - protein, 170 aa, Homo sapiens
MSPPDQGVVESRLWRQMLHKGQGSSWGSGGGDAVGGVNTVNSETSPGMFNFDTFWKNFKSKLGFINWDAINKNQVPPPSTRALLYFSRLWEDFKQNTPFLNWKAIIEGADASSLQKRAGRDDQNYNYNQHAYPTAYGGKYSVKTPAKGGVSPSSSASRVQPGLLQWVKFW

SEQ ID NO: 14824 - protein, 152 aa, Homo sapiens
MRGQGSSWGSGGGDAVGGVNTVNSETSPGMFNFDTFWKNFKSKLGFINWDAINKNQVPPPSTRALLYFSRLWEDFKQNTPFLNWKAIIEGADASSLQKRAGRDDQNYNYNQHAYPTAYGGKYSVKTPAKGGVSPSSSASRVQPGLLQWVKFW

SEQ ID NO: 14825 - protein, 132 aa, Homo sapiens
MRNSETSPGMFNFDTFWKNFKSKLGFINWDAINKNQVPPPSTRALLYFSRLWEDFKQNTPFLNWKAIIEGADASSLQKRAGRDDQNYNYNQHAYPTAYGGKYSVKTPAKGGVSPSSSASRVQPGLLQWVKFW

SEQ ID NO: 14826 - protein, 146 aa, Homo sapiens
MRNSETSPGMFNFDTFWKNFKSKLGFINWDAINKNQVPPPSTRALLYFSRLWEDFKQNTPFLNWKAIIEGADASSLQKRAGRDDQPGAGWQEVAAVTSKNYNYNQHAYPTAYGGKYSVKTPAKGGVSPSSSASRVQPGLLQWVKFW

SEQ ID NO: 14827 - protein, 123 aa, Homo sapiens
MFNFDTFWKNFKSKLGFINWDAINKNQVPPPSTRALLYFSRLWEDFKQNTPFLNWKAIIEGADASSLQKRAGRDDQNYNYNQHAYPTAYGGKYSVKTPAKGGVSPSSSASRVQPGLLQWVKFW

SEQ ID NO: 14828 - protein, 137 aa, Homo sapiens
MFNFDTFWKNFKSKLGFINWDAINKNQVPPPSTRALLYFSRLWEDFKQNTPFLNWKAIIEGADASSLQKRAGRDDQPGAGWQEVAAVTSKNYNYNQHAYPTAYGGKYSVKTPAKGGVSPSSSASRVQPGLLQWVKFW

SEQ ID NO: 14829 - protein, 90 aa, Homo sapiens
MNMKPATASALLLLLLGLAWTQGSHGWGADASSLQKRAGRDDQNYNYNQHAYPTAYGGKYSVKTPAKGGVSPSSSASRVQPGLLQWVKFW

SEQ ID NO: 14830 - protein, 465 aa, Homo sapiens
MKFQGPLACLLLALCLGSGEAGPLQSGEESTGTNIGEALGHGLGDALSEGVGKAIGKEAGGAAGSKVSEALGQGTREAVGTGVRQVPGFGVADALGNRVGEAAHALGNTGHEIGRQAEDVIRHGADAVRGSWQGVPGHNGAWETSGGHGIFGSQGGLGGQGQGNPGGLGTPWVHGYPGNSAGSFGMNPQGAPWGQGGNGGPPNFGTNTQGAVAQPGYGSVRASNQNEGCTNPPPSGSGGGSSNSGGSSTGSSSGNHGGSGGGNGHKPGCEKPGNEARGSGESGIQGFRGQGVSSNMREISKEGNRLLGGSGDNYRGQGSSWGSGGGDAVGGVNTVNSETSPGMFNFDTFWKNFKSKLGFINWDAINKNQVPPPSTRALLYFSRLWEDFKQNTPFLNWKAIIEGADASSLQKRAGRDDQNYNYNQHAYPTAYGGKYSVKTPAKGGVSPSSSASRVQPGLLQWVKFW

SEQ ID NO: 14831 - protein, 96 aa, Homo sapiens
MTPCLESFCQRAKDCKQNIPLPFLIQDWPLSESKPQGQDFWTPQPLQAAAPSHEFQQVALHPARTRLASRPQGGRLMSSREVGLRAPRCSCGKRKR

SEQ ID NO: 14832 - protein, 532 aa, Homo sapiens
MDQFGDILEGEVDHSFFDSDFEEGKKCETNSVFDKQNDDPKERIDKDTKNVNSNTGMQTTENYLTEKGNERNVKFPPEHPVENDVTQTVSSFSLPASSRSKKLCDVTTGLKIHVSIPNRIPKIVKEGEDDYYTDGEESSDDGKKYHVKSKSAKPSTNVKKSIRKKYCKVSSSSSSSLSSSSSGSGTDCLDAGSDSHLSDSSPSSKSSKKHVSGITLLSPKHKYKSGIKSTETQPSSTTPKCGHYPEESEDTVTDVSPLSTPDISPLQSFELGIANDQKVKIKKQENVSQEIYEDVEDLKNNSKYLKAAKKGKEKHEPDVSSKSSSVLDSSLDHRHKQKVLHDTMDLNHLLKAFLQLDKKGPQKHHFDQPSVAPGKNYSFTREEVRQIDRENQRLLKELSRQAEKPGSKSTIPRSADHPPKLYHSALNRQKEQQRIERENLALLKRLEAVKPTVGMKRSEQLMDYHRNMGYLNSSPLSRRARSTLGQYSPLRASRTSSATSGLSCRSERSAVDPSSGHPRRRPKPPNVRTAWL

SEQ ID NO: 14833 - protein, 453 aa, Homo sapiens
MDQFGDILEGEVDHSFFDSDFEEGKKCETNSVFDKQNDDPKERIDKDTKNVNSNTGMQTTENYLTEKGNERNVKFPPEHPVENDVTQTVSSFSLPASSRSKKLCDVTTGLKIHVSIPNRIPKIVKEGEDDYYTDGEESSDDGKKYHVKSKSAKPSTNVKKSIRKKYCKVSSSSSSSLSSSSSGSGTDCLDAGSDSHLSDSSPSSKSSKKHVSGITLLSPKHKYKSGIKSTETQPSSTTPKCGHYPEESEDTVTDVSPLSTPDISPLQSFELGIANDQKVKIKKQENVSQEIYEDVEDLKNNSKYLKAAKKGKEKHEPDVSSKSSSVLDSSLDHRHKQKVLHDTMDLNHLLKAFLQLDKKGPQKHHFDQPSVAPGKNYSFTREEVRQIDRENQRLLKELSRQAEKPGSKSTIPRSADHPPKLYHSALNRQKEQQRIERENLTISLCHPGWSAVT

SEQ ID NO: 14834 - protein, 94 aa, Homo sapiens
MPTSETSWWPGACLCSSCAWTSDSRFFNLWTLGLAPAASQGFSGLKPQTDDCTVSFPGFEAFGLGLSHYWHLSFPACRQSIMGLCLVIVLANSS

SEQ ID NO: 14835 - protein, 253 aa, Homo sapiens
MHSWERLAVLVLLGAAACAAPPRGRILGGREAEAHARPYMASVQLNGAHLCGGVLVAEQWVLSAAHCLEDAADGKVQVLLGAHSLSQPEPSKRLYDVLRAVPHPDSQPDTIDHDLLLLQLSEKATLGPAVRPLPWQRVDRDVAPGTLCDVAGWGIVNHAGRRPDSLQHVLLPVLDRATCNRRTHHDGAITERLMCAESNRRDSCKGDSGGPLVCGGVLEGVVTSGSRVCGNRKKPGIYTRVASYAAWIDSVLA

SEQ ID NO: 14836 - protein, 474 aa, Homo sapiens
MIMNKMKNFKRRFSLSVPRTETIEESLAEFTEQFNQLHNRRNENLQLGPLGRDPPQECSTFSPTDSGEEPGQLSPGVQFQRRQNQRRFSMEDVSKRLSLPMDIRLPQEFLQKLQMESPDLPKPLSRMSRRASLSDIGFGKLETYVKLDKLGEGTYATVFKGRSKLTENLVALKEIRLEHEEGAPCTAIREVSLLKNLKHANIVTLHDLIHTDRSLTLVFEYLDSDLKQYLDHCGNLMSMHNVKIFMFQLLRGLAYCHHRKILHRDLKPQNLLINERGELKLADFGLARAKSVPTKTYSNEVVTLWYRPPDVLLGSTEYSTPIDMWGVGCIHYEMATGRPLFPGSTVKEELHLIFRLLGTPTEETWPGVTAFSEFRTYSFPCYLPQPLINHAPRLDTDGIHLLSSLLLYESKSRMSAEAALSHSYFRSLGERVHQLEDTASIFSLKEIQLQKDPGYRGLAFQQPGRGKNRRQSIF

SEQ ID NO: 14837 - protein, 504 aa, Homo sapiens
MIMNKMKNFKRRFSLSVPRTETIEESLAEFTEQFNQLHNRRNENLQLGPLGRDPPQECSTFSPTDSGEEPGQLSPGVQFQRRQNQRRFSMEVRASGALPRQVAGCTHKGVHRRAAALQPDFDVSKRLSLPMDIRLPQEFLQKLQMESPDLPKPLSRMSRRASLSDIGFGKLETYVKLDKLGEGTYATVFKGRSKLTENLVALKEIRLEHEEGAPCTAIREVSLLKNLKHANIVTLHDLIHTDRSLTLVFEYLDSDLKQYLDHCGNLMSMHNVKIFMFQLLRGLAYCHHRKILHRDLKPQNLLINERGELKLADFGLARAKSVPTKTYSNEVVTLWYRPPDVLLGSTEYSTPIDMWGVGCIHYEMATGRPLFPGSTVKEELHLIFRLLGTPTEETWPGVTAFSEFRTYSFPCYLPQPLINHAPRLDTDGIHLLSSLLLYESKSRMSAEAALSHSYFRSLGERVHQLEDTASIFSLKEIQLQKDPGYRGLAFQQPGRGKNRRQSIF

SEQ ID NO: 14838 - protein, 465 aa, Homo sapiens
METGFPAIMYPGSFIGGWGEEYLSWEGPGLPDFVFQQQPVESEAMHCSNPKSGVVLATVARGPDACQILTRAPLGQDPPQRTVLGLLTANGQYRRTCGQGITRIRCYSGSENAFPPAGKKALPDCGVQEPPKQGFDIYMDELEQGDRDSCSVREGMAFEDVYEVDTGTLKSDLHFLLDFNTVSPMLVDSSLLSQSEDISSLGTDVINVTEYAEEIYQYLREAEIRHRPKAHYMKKQPDITEGMRTILVDWLVEVGEEYKLRAETLYLAVNFLDRFLSCMSVLRGKLQLVGTAAMLLASKYEEIYPPEVDEFVYITDDTYTKRQLLKMEHLLLKVLAFDLTVPTTNQFLLQYLRRQGVCVRTENLAKYVAELSLLEADPFLKYLPSLIAAAAFCLANYTVNKHFWPETLAAFTGYSLSEIVPCLSELHKAYLDIPHRPQQAIREKYKASKYLCVSLMEPPAVLLLQ

SEQ ID NO: 14839 - protein, 464 aa, Homo sapiens
METGFPAIMYPGSFIGGWGEEYLSWEGPGLPDFVFQQPVESEAMHCSNPKSGVVLATVARGPDACQILTRAPLGQDPPQRTVLGLLTANGQYRRTCGQGITRIRCYSGSENAFPPAGKKALPDCGVQEPPKQGFDIYMDELEQGDRDSCSVREGMAFEDVYEVDTGTLKSDLHFLLDFNTVSPMLVDSSLLSQSEDISSLGTDVINVTEYAEEIYQYLREAEIRHRPKAHYMKKQPDITEGMRTILVDWLVEVGEEYKLRAETLYLAVNFLDRFLSCMSVLRGKLQLVGTAAMLLASKYEEIYPPEVDEFVYITDDTYTKRQLLKMEHLLLKVLAFDLTVPTTNQFLLQYLRRQGVCVRTENLAKYVAELSLLEADPFLKYLPSLIAAAAFCLANYTVNKHFWPETLAAFTGYSLSEIVPCLSELHKAYLDIPHRPQQAIREKYKASKYLCVSLMEPPAVLLLQ

SEQ ID NO: 14840 - protein, 421 aa, Homo sapiens
MHCSNPKSGVVLATVARGPDACQILTRAPLGQDPPQRTVLGLLTANGQYRRTCGQGITRIRCYSGSENAFPPAGKKALPDCGVQEPPKQGFDIYMDELEQGDRDSCSVREGMAFEDVYEVDTGTLKSDLHFLLDFNTVSPMLVDSSLLSQSEDISSLGTDVINVTEYAEEIYQYLREAEIRHRPKAHYMKKQPDITEGMRTILVDWLVEVGEEYKLRAETLYLAVNFLDRFLSCMSVLRGKLQLVGTAAMLLASKYEEIYPPEVDEFVYITDDTYTKRQLLKMEHLLLKVLAFDLTVPTTNQFLLQYLRRQGVCVRTENLAKYVAELSLLEADPFLKYLPSLIAAAAFCLANYTVNKHFWPETLAAFTGYSLSEIVPCLSELHKAYLDIPHRPQQAIREKYKASKYLCVSLMEPPAVLLLQ

SEQ ID NO: 14841 - protein, 1383 aa, Homo sapiens
MYATDSRGHSPAFLQPQNGNSRHPSGYVPGKVVPLRPPPPPKSQASAKFTSIRREDRATFAFSPEEQQAQRESQKQKRHKNTFICFAITSFSFFIALAIILGISSKYAPDENCPDQNPRLRNWDPGQDSAKQVVIKEGDMLRLTSDATVHSIVIQDGGLLVFGDNKDGSRNITLRTHYILIQDGGALHIGAEKCRYKSKATITLYGKSDEGESMPTFGKKFIGVEAGGTLELHGARKASWTLLARTLNSSGLPFGSYTFEKDFSRGLNVRVIDQDTAKILESERFDTHEYRNESRRLQEFLRFQDPGRIVAIAVGDSAAKSLLQGTIQMIQERLGSELIQGLGYRQAWALVGVIDGGSTSCNESVRNYENHSSGGKALAQREFYTVDGQKFSVTAYSEWIEGVSLSGFRVEVVDGVKLNLLDDVSSWKPGDQIVVASTDYSMYQAEEFTLLPCSECSHFQVKVKETPQFLHMGEIIDGVDMRAEVGILTRNIVIQGEVEDSCYAENQCQFFDYDTFGGHIMIMKNFTSVHLSYVELKHMGQQQMGRYPVHFHLCGDVDYKGGYRHATFVDGLSIHHSFSRCITVHGTNGLLIKDTIGFDTLGHCFFLEDGIEQRNTLFHNLGLLTKPGTLLPTDRNNSMCTTMRDKVFGNYIPVPATDCMAVSTFWIAHPNNNLINNAAAGSQDAGIWYLFHKEPTGESSGLQLLAKPELTPLGIFYNNRVHSNFKAGLFIDKGVKTTNSSAADPREYLCLDNSARFRPHQDANPEKPRVAALIDRLIAFKNNDNGAWVRGGDIIVQNSAFADNGIGLTFASDGSFPSDEGSSQEVSESLFVGESRNYGFQGGQNKYVGTGGIDQKPRTLPRNRTFPIRGFQIYDGPIHLTRSTFKKYVPTPDRYSSAIGFLMKNSWQITPRNNISLVKFGPHVSLNVFFGKPGPWFEDCEMDGDKNSIFHDIDGSVTGYKDAYVGRMDNYLIRHPSCVNVSKWNAVICSGTYAQVYVQTWSTQNLSMTITRDEYPSNPMVLRGINQKAAFPQYQPVVMLEKGYTIHWNGPAPRTTFLYLVNFNKNDWIRVGLCYPSNTSFQVTFGYLQRQNGSLSKIEEYEPVHSLEELQRKQSERKFYFDSSTGLLFLYLKAKSHRHGHSYCSSQGCERVKIQAATDSKDISNCMAKAYPQYYRKPSVVKRMPAMLTGLCQGCGTRQVVFTSDPHKSYLPVQFQSPDKAETQRGDPSVISVNGTDFTFRSAGVLLLVVDPCSVPFRLTEKTVFPLADVSRIEEYLKTGIPPRSIVLLSTRGEIKQLNISHLLVPLGLAKPAHLYDKGSTIFLGFSGNFKPSWTKLFTSPAGQGLGVLEQFIPLQLDEYGCPRATTVRRRDLELLKQASKAH

SEQ ID NO: 14842 - protein, 1320 aa, Homo sapiens
MYATDSRGHSPAFLQPQNGNSRHPSGYVPGKVVPLRPPPPPKSQASAKFTSIRREDRATFAFSPEEQQAQRESQKQKRHKNTFICFAITSFSFFIALAIILGISSKYAPDENCPDQNPRLRNWDPGQDSAKQVVIKEGDMLRLTSDATVHSIVIQDGGLLVFGDNKDGSRNITLRTHYILIQDGGALHIGAEKCRYKSKATITLYGKSDEGESMPTFGKKFIGVEAGGTLELHGARKASWTLLARTLNSSGLPFGSYTFEKDFSRGLNVRVIDQDTAKILESERFDTHEYRNESRRLQEFLRFQDPGRIVAIAVGDSAAKSLLQGTIQMIQERLGSELIQGLGYRQAWALVGVIDGGSTSCNESVRNYENHSSGGKALAQREFYTVDGQKFSVTAYSEWIEETPQFLHMGEIIDGVDMRAEVGILTRNIVIQGEVEDSCYAENQCQFFDYDTFGGHIMIMKNFTSVHLSYVELKHMGQQQMGRYPVHFHLCGDVDYKGGYRHATFVDGLSIHHSFSRCITVHGTNGLLIKDTIGFDTLGHCFFLEDGIEQRNTLFHNLGLLTKPGTLLPTDRNNSMCTTMRDKVFGNYIPVPATDCMAVSTFWIAHPNNNLINNAAAGSQDAGIWYLFHKEPTGESSGLQLLAKPELTPLGIFYNNRVHSNFKAGLFIDKGVKTTNSSAADPREYLCLDNSARFRPHQDANPEKPRVAALIDRLIAFKNNDNGAWVRGGDIIVQNSAFADNGIGLTFASDGSFPSDEGSSQEVSESLFVGESRNYGFQGGQNKYVGTGGIDQKPRTLPRNRTFPIRGFQIYDGPIHLTRSTFKKYVPTPDRYSSAIGFLMKNSWQITPRNNISLVKFGPHVSLNVFFGKPGPWFEDCEMDGDKNSIFHDIDGSVTGYKDAYVGRMDNYLIRHPSCVNVSKWNAVICSGTYAQVYVQTWSTQNLSMTITRDEYPSNPMVLRGINQKAAFPQYQPVVMLEKGYTIHWNGPAPRTTFLYLVNFNKNDWIRVGLCYPSNTSFQVTFGYLQRQNGSLSKIEEYEPVHSLEELQRKQSERKFYFDSSTGLLFLYLKAKSHRHGHSYCSSQGCERVKIQAATDSKDISNCMAKAYPQYYRKPSVVKRMPAMLTGLCQGCGTRQVVFTSDPHKSYLPVQFQSPDKAETQRGDPSVISVNGTDFTFRSAGVLLLVVDPCSVPFRLTEKTVFPLADVSRIEEYLKTGIPPRSIVLLSTRGEIKQLNISHLLVPLGLAKPAHLYDKGSTIFLGFSGNFKPSWTKLFTSPAGQGLGVLEQFIPLQLDEYGCPRATTVRRRDLELLKQASKAH

SEQ ID NO: 14843 - protein, 404 aa, Homo sapiens
MSRRSSRLQAKQQPQPSQTESPQEAQIIQAKKRKTTQDVKKRREEVTKKHQYEIRNCWPPVLSGGISPCIIIETPHKEIGTSDFSRFTNYRFKNLFINPSPLPDLSWGCSKEVWLNMLKKESRYVHDKHFEVLHSDLEPQMRSILLDWLLEVCEVYTLHRETFYLAQDFFDRFMLTQKDINKNMLQLIGITSLFIASKLEEIYAPKLQEFAYVTDGACSEEDILRMELIILKALKWELCPVTIISWLNLFLQVDALKDAPKVLLPQYSQETFIQIAQLLDLCILAIDSLEFQYRILTAAALCHFTSIEVVKKASGLEWDSISECVDWMVPFVNVVKSTSPVKLKTFKKIPMEDRHNIQTHTNYLAMLEEVNYINTFRKGGQLSPVCNGGIMTPPKSTEKPPGKH

SEQ ID NO: 14844 - protein, 359 aa, Homo sapiens
MSRRSSRLQAKQQPQPSQTESPQEAQIIQAKKRKTTQDVKKRREEVTKKHQYEIRNCWPPVLSGGISPCIIIETPHKEIGTSDFSRFTNYRFKNLFINPSPLPDLSWGCSKEVWLNMLKKESRYVHDKHFEVLHSDLEPQMRSILLDWLLEVCEVYTLHRETFYLAYVTDGACSEEDILRMELIILKALKWELCPVTIISWLNLFLQVDALKDAPKVLLPQYSQETFIQIAQLLDLCILAIDSLEFQYRILTAAALCHFTSIEVVKKASGLEWDSISECVDWMVPFVNVVKSTSPVKLKTFKKIPMEDRHNIQTHTNYLAMLEEVNYINTFRKGGQLSPVCNGGIMTPPKSTEKPPGKH

SEQ ID NO: 14845 - protein, 1227 aa, Homo sapiens
MAAVLESLLREEVSVAAVVRWIARSTQGSEDNAGEAAALSSLRALRKEFVPFLLNFLREQSSRVLPQGPPTPAKTPGASAALPGRPGGPPRGSRGARSQLFPPTEAQSTAAEAPLARRGGRRRGPGPARERGGRGLEEGVSGESLPGAGGRRLRGSGSPSRPSLTLSDPPNLSNLEEFPPVGSVPPGPTGTKPSRRINPTPVSEERSLSKPKTCFTSPPISCVPSSQPSALDTSPWGLGLPPGCRSLQEEREMLRKERSKQLQQSPTPTCPTPELGSPLPSRTGSLTDEPADPARVSSRQRLELVALVYSSCIAENLVPNLFLELFFVFQLLTARRMVTAKDSDPELSPAVLDSLESPLFQSIHDCVFFAVQVLECHFQVLSNLDKGTLKLLAENERLLCFSPALQGRLRAAYEGSVAKVSLVMPPSTQAVSFQPETDNRANFSSDRAFHTFKKQRDVFYEVLREWEDHHEEPGWDFEKGLGSRIRAMMGQLSAACSHSHFVRLFQKQLLQMCQSPGGAGGTVLGEAPDVLSMLGADKLGRLWRLQERLMAPQSSGGPCPPPTFPGCQGFFRDFILSASSFQFNQHLMDSLSLKIQELNGLALPQHEPNDEDGESDVDWQGERKQFAVVLLSLRLLAKFLGFVAFLPYRGPEPPPTGELQDSILALRSQVPPVLDVRTLLQRGLQARRAVLTVPWLVEFLSFADHVVPLLEYYRDIFTLLLRLHRSLVLSQESEGKMCFLNKLLLLAVLGWLFQIPTVPEDLFFLEEGPSYAFEVDTVAPEHGLDNAPVVDQQLLYTCCPYIGELRKLLASWVSGSSGRSGGFMRKITPTTTTSLGAQPSQTSQGLQAQLAQAFFHNQPPSLRRTVEFVAERIGSNCVKHIKATLVADLVRQAESLLQEQLVTQGEEGGDPAQLLEILCSQLCPHGAQALALGREFCQRKSPGAVRALLPEETPAAVLSSAENIAVGLATEKACAWLSANITALIRREVKAAVSRTLRAQGPEPAARGERRGCSRACEHHAPLPSHLISEIKDVLSLAVGPRDPDEGVSPEHLEQLLGQLGQTLRCRQFLCPPAEQHLAKCSVELASLLVADQIPILGPPAQYRLERGQARRLLHMLLSLWKEDFQGPVPLQLLLSPRNVGLLADTRPREWDLLLFLLRELVEKGLMGRMEIEACLGSLHQAQWPGDFAEELATLSNLFLAEPHLPEPQLRACELVQPNRGTVLAQS

SEQ ID NO: 14846 - protein, 1226 aa, Homo sapiens
MAAVLESLLREEVSVAAVVRWIARSTQGSEDNAGEAAALSSLRALRKEFVPFLLNFLREQSSRVLPQGPPTPAKTPGASAALPGRPGGPPRGSRGARSQLFPPTEAQSTAAEAPLARRGGRRRGPGPARERGGRGLEEGVSGESLPGAGGRRLRGSGSPSRPSLTLSDPPNLSNLEEFPPVGSVPPGPTGETQLSCRRWVPRRLWGVSHSSSALRSGAPGCRTKPSRRINPTPVSEERSLSKPKTCFTSPPISCVPSSKQLQQSPTPTCPTPELGSPLPSRTGSLTDEPADPARVSSRQRLELVALVYSSCIAENLVPNLFLELFFVFQLLTARRMVTAKDSDPELSPAVLDSLESPLFQSIHDCVFFAVQVLECHFQVLSNLDKGTLKLLAENERLLCFSPALQGRLRAAYEGSVAKVSLVMPPSTQAVSFQPETDNRANFSSDRAFHTFKKQRDVFYEVLREWEDHHEEPGWDFEKGLGSRIRAMMGQLSAACSHSHFVRLFQKQLLQMCQSPGGAGGTVLGEAPDVLSMLGADKLGRLWRLQERLMAPQSSGGPCPPPTFPGCQGFFRDFILSASSFQFNQHLMDSLSLKIQELNGLALPQHEPNDEDGESDVDWQGERKQFAVVLLSLRLLAKFLGFVAFLPYRGPEPPPTGELQDSILALRSQVPPVLDVRTLLQRGLQARRAVLTVPWLVEFLSFADHVVPLLEYYRDIFTLLLRLHRSLVLSQESEGKMCFLNKLLLLAVLGWLFQIPTVPEDLFFLEEGPSYAFEVDTVAPEHGLDNAPVVDQQLLYTCCPYIGELRKLLASWVSGSSGRSGGFMRKITPTTTTSLGAQPSQTSQGLQAQLAQAFFHNQPPSLRRTVEFVAERIGSNCVKHIKATLVADLVRQAESLLQEQLVTQGEEGGDPAQLLEILCSQLCPHGAQALALGREFCQRKSPGAVRALLPEETPAAVLSSAENIAVGLATEKACAWLSANITALIRREVKAAVSRTLRAQGPEPAARGERRGCSRACEHHAPLPSHLISEIKDVLSLAVGPRDPDEGVSPEHLEQLLGQLGQTLRCRQFLCPPAEQHLAKCSVELASLLVADQIPILGPPAQYRLERGQARRLLHMLLSLWKEDFQGPVPLQLLLSPRNVGLLADTRPREWDLLLFLLRELVEKGLMGRMEIEACLGSLHQAQWPGDFAEELATLSNLFLAEPHLPEPQLRACELVQPNRGTVLAQS

SEQ ID NO: 14847 - protein, 292 aa, Homo sapiens
MELLCCEGTRHAPRAGPDPRLLGDQRVLQSLLRLEERYVPRASYFQCVQREIKPHMRKMLAYWMLEVCEEQRCEEEVFPLAMNYLDRYLSCVPTRKAQLQLLGAVCMLLASKLRETTPLTIEKLCIYTDHAVSPRQLRDWEVLVLGKLKWDLAAVIAHDFLAFILHRLSLPRDRQALVKKHAQTFLALCATDYTFAMYPPSMIATGSIGAAVQGLGACSMSGDELTELLAGITGTEVDCLRACQEQIEAALRESLREASQTSSSPAPKAPRGSSSQGPSQTSTPTDVTAIHL

SEQ ID NO: 14848 - protein, 211 aa, Homo sapiens
MNYLDRYLSCVPTRKAQLQLLGAVCMLLASKLRETTPLTIEKLCIYTDHAVSPRQLRDWEVLVLGKLKWDLAAVIAHDFLAFILHRLSLPRDRQALVKKHAQTFLALCATDYTFAMYPPSMIATGSIGAAVQGLGACSMSGDELTELLAGITGTEVDCLRACQEQIEAALRESLREASQTSSSPAPKAPRGSSSQGPSQTSTPTDVTAIHL

SEQ ID NO: 14849 - protein, 220 aa, Homo sapiens
MELLCCEGTRHAPRAGPDPRLLGDQRVLQSLLRLEERYVPRASYFQCVQREIKPHMRKMLAYWMLEDWEVLVLGKLKWDLAAVIAHDFLAFILHRLSLPRDRQALVKKHAQTFLALCATDYTFAMYPPSMIATGSIGAAVQGLGACSMSGDELTELLAGITGTEVDCLRACQEQIEAALRESLREASQTSSSPAPKAPRGSSSQGPSQTSTPTDVTAIHL

SEQ ID NO: 14850 - protein, 96 aa, Homo sapiens
MYPPSMIATGSIGAAVQGLGACSMSGDELTELLAGITGTEVDCLRACQEQIEAALRESLREASQTSSSPAPKAPRGSSSQGPSQTSTPTDVTAIHL

SEQ ID NO: 14851 - protein, 347 aa, Homo sapiens
MALLFSLILAICTRPGFLASPSGVRLVGGLHRCEGRVEVEQKGQWGTVCDDGWDIKDVAVLCRELGCGAASGTPSGILYEPPAEKEQKVLIQSVSCTGTEDTLAQCEQEEVYDCSHDEDAGASCENPESSFSPVPEGVRLADGPGHCKGRVEVKHQNQWYTVCQTGWSLRAAKVVCRQLGCGRAVLTQKRCNKHAYGRKPIWLSQMSCSGREATLQDCPSGPWGKNTCNHDEDTWVECEDPFDLRLVGGDNLCSGRLEVLHKGVWGSVCDDNWGEKEDQVVCKQLGCGKSLSPSFRDRKCYGPGVGRIWLDNVRCSGEEQSLEQCQHRFWGFHDCTHQEDVAVICSG

SEQ ID NO: 14852 - protein, 2923 aa, Homo sapiens
MRSPATGVPLPTPPPPLLLLLLLLLPPPLLGDQVGPCRSLGSRGRGSSGACAPMGWLCPSSASNLWLYTSRCRDAGTELTGHLVPHHDGLRVWCPESEAHIPLPPAPEGCPWSCRLLGIGGHLSPQGKLTLPEEHPCLKAPRLRCQSCKLAQAPGLRAGERSPEESLGGRRKRNVNTAPQFQPPSYQATVPENQPAGTPVASLRAIDPDEGEAGRLEYTMDALFDSRSNQFFSLDPVTGAVTTAEELDRETKSTHVFRVTAQDHGMPRRSALATLTILVTDTNDHDPVFEQQEYKESLRENLEVGYEVLTVRATDGDAPPNANILYRLLEGSGGSPSEVFEIDPRSGVIRTRGPVDREEVESYQLTVEASDQGRDPGPRSTTAAVFLSVEDDNDNAPQFSEKRYVVQVREDVTPGAPVLRVTASDRDKGSNAVVHYSIMSGNARGQFYLDAQTGALDVVSPLDYETTKEYTLRVRAQDGGRPPLSNVSGLVTVQVLDINDNAPIFVSTPFQATVLESVPLGYLVLHVQAIDADAGDNARLEYRLAGVGHDFPFTINNGTGWISVAAELDREEVDFYSFGVEARDHGTPALTASASVSVTVLDVNDNNPTFTQPEYTVRLNEDAAVGTSVVTVSAVDRDAHSVITYQITSGNTRNRFSITSQSGGGLVSLALPLDYKLERQYVLAVTASDGTRQDTAQIVVNVTDANTHRPVFQSSHYTVNVNEDRPAGTTVVLISATDEDTGENARITYFMEDSIPQFRIDADTGAVTTQAELDYEDQVSYTLAITARDNGIPQKSDTTYLEILVNDVNDNAPQFLRDSYQGSVYEDVPPFTSVLQISATDRDSGLNGRVFYTFQGGDDGDGDFIVESTSGIVRTLRRLDRENVAQYVLRAYAVDKGMPPARTPMEVTVTVLDVNDNPPVFEQDEFDVFVEENSPIGLAVARVTATDPDEGTNAQIMYQIVEGNIPEVFQLDIFSGELTALVDLDYEDRPEYVLVIQATSAPLVSRATVHVRLLDRNDNPPVLGNFEILFNNYVTNRSSSFPGGAIGRVPAHDPDISDSLTYSFERGNELSLVLLNASTGELKLSRALDNNRPLEAIMSVLVSDGVHSVTAQCALRVTIITDEMLTHSITLRLEDMSPERFLSPLLGLFIQAVAATLATPPDHVVVFNVQRDTDAPGGHILNVSLSVGQPPGPGGGPPFLPSEDLQERLYLNRSLLTAISAQRVLPFDDNICLREPCENYMRCVSVLRFDSSAPFIASSSVLFRPIHPVGGLRCRCPPGFTGDYCETEVDLCYSRPCGPHGRCRSREGGYTCLCRDGYTGEHCEVSARSGRCTPGVCKNGGTCVNLLVGGFKCDCPSGDFEKPYCQVTTRSFPAHSFITFRGLRQRFHFTLALSFATKERDGLLLYNGRFNEKHDFVALEVIQEQVQLTFSAGESTTTVSPFVPGGVSDGQWHTVQLKYYNKPLLGQTGLPQGPSEQKVAVVTVDGCDTGVALRFGSVLGNYSCAAQGTQGGSKKSLDLTGPLLLGGVPDLPESFPVRMRQFVGCMRNLQVDSRHIDMADFIANNGTVPGCPAKKNVCDSNTCHNGGTCVNQWDAFSCECPLGFGGKSCAQEMANPQHFLGSSLVAWHGLSLPISQPWYLSLMFRTRQADGVLLQAITRGRSTITLQLREGHVMLSVEGTGLQASSLRLEPGRANDGDWHHAQLALGASGGPGHAILSFDYGQQRAEGNLGPRLHGLHLSNITVGGIPGPAGGVARGFRGCLQGVRVSDTPEGVNSLDPSHGESINVEQGCSLPDPCDSNPCPANSYCSNDWDSYSCSCDPGYYGDNCTNVCDLNPCEHQSVCTRKPSAPHGYTCECPPNYLGPYCETRIDQPCPRGWWGHPTCGPCNCDVSKGFDPDCNKTSGECHCKENHYRPPGSPTCLLCDCYPTGSLSRVCDPEDGQCPCKPGVIGRQCDRCDNPFAEVTTNGCEVNYDSCPRAIEAGIWWPRTRFGLPAAAPCPKGSFGTAVRHCDEHRGWLPPNLFNCTSITFSELKGFAERLQRNESGLDSGRSQQLALLLRNATQHTAGYFGSDVKVAYQLATRLLAHESTQRGFGLSATQDVHFTENLLRVGSALLDTANKRHWELIQQTEGGTAWLLQHYEAYASALAQNMRHTYLSPFTIVTPNIVISVVRLDKGNFAGAKLPRYEALRGEQPPDLETTVILPESVFRETPPVVRPAGPGEAQEPEELARRQRRHPELSQGEAVASVIIYRTLAGLLPHNYDPDKRSLRVPKRPIINTPVVSISVHDDEELLPRALDKPVTVQFRLLETEERTKPICVFWNHSILVSGTGGWSARGCEVVFRNESHVSCQCNHMTSFAVLMDVSRRENGEILPLKTLTYVALGVTLAALLLTFFFLTLLRILRSNQHGIRRNLTAALGLAQLVFLLGINQADLPFACTVIAILLHFLYLCTFSWALLEALHLYRALTEVRDVNTGPMRFYYMLGWGVPAFITGLAVGLDPEGYGNPDFCWLSIYDTLIWSFAGPVAFAVSMSVFLYILAARASCAAQRQGFEKKGPVSGLQPSFAVLLLLSATWLLALLSVNSDTLLFHYLFATCNCIQGPFIFLSYVVLSKEVRKALKLACSRKPSPDPALTTKSTLTSSYNCPSPYADGRLYQPYGDSAGSLHSTSRSGKSQPSYIPFLLREESALNPGQGPPGLGDPGSLFLEGQDQQHDPDTDSDSDLSLEDDQSGSYASTHSSDSEEEEEEEEEEAAFPGEQGWDSLLGPGAERLPLHSTPKDGGPGPGKAPWPGDFGTTAKESSGNGAPEERLRENGDALSREGSLGPLPGSSAQPHKGILKKKCLPTISEKSSLLRLPLEQCTGSSRGSSASEGSRGGPPPRPPPRQSLQEQLNGVMPIAMSIKAGTVDEDSSGSEFLFFNFLH

SEQ ID NO: 14853 - protein, 108 aa, Homo sapiens
MDSLALGRWRQRRAEDLQVPGDVKRVCRRLEASGHERGCHQVNACALASWGPEDRELPSRGCLPAPRPESGQGRLSTGISQNGGRSSAQPCPRCIAGESGHFSHTKNH

SEQ ID NO: 14854 - protein, 240 aa, Homo sapiens
MAGPPRLLLLPLLLALARGLPGALAAQEVQQSPHCTTVPVGASVNITCSTSGGLRGIYLRQLGPQPQDIIYYEDGVVPTTDRRFRGRIDFSGSQDNLTITMHRLQLSDTGTYTCQAITEVNVYGSGTLVLVTEEQSQGWHRCSDAPPRASALPAPPTGSALPDPQTASALPDPPAASALPAALAVISFLLGLGLGVACVLARTQIKKLCSWRDKNSAACVVYEDMSHSRCNTLSSPNQYQ

SEQ ID NO: 14855 - protein, 132 aa, Homo sapiens
MGRTWCGMWRRRRPGRRSAVPRWPHLSSQSGVEPPDRWTGTPGWPSRDQEAPGSMMPPAAAQPSAHGALVPPATAHEPVDHPALHWLACCCCLSLPGQLPLAIRLGWDLDLEAGPSSGKLCPRARRWQPLPS

SEQ ID NO: 14856 - protein, 369 aa, Homo sapiens
MASGAQLPPQPSSSEVSAVQSPGGRPGAGLEETALGVPLPPSPGEAPLPRSNRSRCPGTRQPGAASLHAASAAVPVRPRRGTAPAGKTADAVPAAAPEQAPRPAPQSRKPRNLEGDLDERRLLCHLQLAQDREARLWRGGKPQDEICDAFEEVVLWLLRLQNTFYFSQSTFNLALTIFGRLLISVKVKEKYLHCATITSLRLAAKVNEEEEFIPQVKDFTKHYGSDYSPNELLRMELAILDRLHWDLYIGTPLDFLTIFHALVVLSWPHVLELLPQRNPSLHVASLTRQLQHCMAGHQLLQFKGSTLALVIITLELERLMPGWCAPISDLLKKAQVGDMQYSCCKELVMQQLRSLQSSSCTDNFVSPAN

SEQ ID NO: 14857 - protein, 385 aa, Homo sapiens
MASGAQLPPQPSSSEVSAVQSPGGRPGAGLEETALGVPLPPSPGEAPLPRSNRSRCPGTRQPGAASLHAASAAVPVRPRRGTAPAGKTADAVPAAAPEQAPRPAPQSRKPRNLEGDLDERRLLCHLQLAQDREARLWRGGKPQDEICDAFEEVVLWLLRLQNTFYFSQSTFNLALTIFGRLLISVKVKEKYLHCATITSLRLAAKVNEEEEFIPQVKDFTKHYGSDYSPNELLRMELAILDRLHWDLYIGTPLDFLTIEKYGVFCSNIKNHGLQFHALVVLSWPHVLELLPQRNPSLHVASLTRQLQHCMAGHQLLQFKGSTLALVIITLELERLMPGWCAPISDLLKKAQVGDMQYSCCKELVMQQLRSLQSSSCTDNFVSPAN

SEQ ID NO: 14858 - protein, 370 aa, Homo sapiens
MASGAQLPPQPSSSEVSAVQSPGGRPGAGLEETALGVPLPPSPGEAPLPRSNRSRCPGTRQPGAASLHAASAAVPVRPRRGTAPAGKTADAVPAAAPEQAPRPAPQSRKPRNLEGDLDERRLLCHLQLAQDREARLWRGGKPQQDEICDAFEEVVLWLLRLQNTFYFSQSTFNLALTIFGRLLISVKVKEKYLHCATITSLRLAAKVNEEEEFIPQVKDFTKHYGSDYSPNELLRMELAILDRLHWDLYIGTPLDFLTIFHALVVLSWPHVLELLPQRNPSLHVASLTRQLQHCMAGHQLLQFKGSTLALVIITLELERLMPGWCAPISDLLKKAQVGDMQYSCCKELVMQQLRSLQSSSCTDNFVSPAN

SEQ ID NO: 14859 - protein, 340 aa, Homo sapiens
MALRLLRRAARGAAAAALLRLKASLAADIPRLGYSSSSHHKYIPRRAVLYVPGNDEKKIKKIPSLNVDCAVLDCEDGVAANKKNEARLRIVKTLEDIDLGPTEKCVRVNSVSSGLAEEDLETLLQSRVLPSSLMLPKVESPEEIQWFADKFSFHLKGRKLEQPMNLIPFVETAMGLLNFKAVCEETLKVGPQVGLFLDAVVFGGEDFRASIGATSSKETLDILYARQKIVVIAKAFGLQAIDLVYIDFRDGAGLLRQSREGAAMGFTGKQVIHPNQIAVVQEQFSPSPEKIKWAEELIAAFKEHQQLGKGAFTFQGSMIDMPLLKQAQNTVTLATSIKEK

SEQ ID NO: 14860 - protein, 306 aa, Homo sapiens
MALRLLRRAARGAAAAALLRLKASLAADIPRLGYSSSSHHKYIPRRAVLYVPGNDEKKIKKIPSLNVDCAVLDCEDGVAANKKNEARLRIVKTLEDIDLGPTEKCVRVNSVSSGLAEEDLETLLQSRVLPSSLMLPKVESPEEIQWAVCEETLKVGPQVGLFLDAVVFGGEDFRASIGATSSKETLDILYARQKIVVIAKAFGLQAIDLVYIDFRDGAGLLRQSREGAAMGFTGKQVIHPNQIAVVQEQFSPSPEKIKWAEELIAAFKEHQQLGKGAFTFQGSMIDMPLLKQAQNTVTLATSIKEK

SEQ ID NO: 14861 - protein, 411 aa, Homo sapiens
MQCSWKAVLLLALASIAIQYTAIRTFTAKSFHTCPGLAEAGLAERLCEESPTFAYNLSRKTHILILATTRSGSSFVGQLFNQHLDVFYLFEPLYHVQNTLIPRFTQGKSPADRRVMLGASRDLLRSLYDCDLYFLENYIKPPPVNHTTDRIFRRGASRVLCSRPVCDPPGPADLVLEEGDCVRKCGLLNLTVAAEACRERSHVAIKTVRVPEVNDLRALVEDPRLNLKVIQLVRDPRGILASRSETFRDTYRLWRLWYGTGRKPYNLDVTQLTTVCEDFSNSVSTGLMRPPWLKGKYMLVRYEDLARNPMKKTEEIYGFLGIPLDSHVARWIQNNTRGDPTLGKHKYGTVRNSAATAEKWRFRLSYDIVAFAQNACQQVLAQLGYKIAASEEELKNPSVSLVEERDFRPFS

SEQ ID NO: 14862 - protein, 752 aa, Homo sapiens
MGPLMVLFCLLFLYPGLADSAPSCPQNVNISGGTFTLSHGWAPGSLLTYSCPQGLYPSPASRLCKSSGQWQTPGATRSLSKAVCKPVRCPAPVSFENGIYTPRLGSYPVGGNVSFECEDGFILRGSPVRQCRPNGMWDGETAVCDNGAGHCPNPGISLGAVRTGFRFGHGDKVRYRCSSNLVLTGSSERECQGNGVWSGTEPICRQPYSYDFPEDVAPALGTSFSHMLGATNPTQKTKESLGRKIQIQRSGHLNLYLLLDCSQSVSENDFLIFKESASLMVDRIFSFEINVSVAIITFASEPKVLMSVLNDNSRDMTEVISSLENANYKDHENGTGTNTYAALNSVYLMMNNQMRLLGMETMAWQEIRHAIILLTDGKSNMGGSPKTAVDHIREILNINQKRNDYLDIYAIGVGKLDVDWRELNELGSKKDGERHAFILQDTKALHQVFEHMLDVSKLTDTICGVGNMSANASDQERTPWHVTIKPKSQETCRGALISDQWVLTAAHCFRDGNDHSLWRVNVGDPKSQWGKEFLIEKAVISPGFDVFAKKNQGILEFYGDDIALLKLAQKVKMSTHARPICLPCTMEANLALRRPQGSTCRDHENELLNKQSVPAHFVALNGSKLNINLKMGVEWTSCAEVVSQEKTMFPNLTDVREVVTDQFLCSGTQEDESPCKGESGGAVFLERRFRFFQVGLVSWGLYNPCLGSADKNSRKRAPRSKVPPPRDFHINLFRMQPWLRQHLGDVLNFLPL

SEQ ID NO: 14863 - protein, 538 aa, Homo sapiens
MRALCIRETCSSELGFSRNWSRRKAGHCPNPGISLGAVRTGFRFGHGDKVRYRCSSNLVLTGSSERECQGNGVWSGTEPICRQPYSYDFPEDVAPALGTSFSHMLGATNPTQKTKDHENGTGTNTYAALNSVYLMMNNQMRLLGMETMAWQEIRHAIILLTDGKSNMGGSPKTAVDHIREILNINQKRNDYLDIYAIGVGKLDVDWRELNELGSKKDGERHAFILQDTKALHQVFEHMLDVSKLTDTICGVGNMSANASDQERTPWHVTIKPKSQETCRGALISDQWVLTAAHCFRDGNDHSLWRVNVGDPKSQWGKEFLIEKAVISPGFDVFAKKNQGILEFYGDDIALLKLAQKVKMSTHARPICLPCTMEANLALRRPQGSTCRDHENELLNKQSVPAHFVALNGSKLNINLKMGVEWTSCAEVVSQEKTMFPNLTDVREVVTDQFLCSGTQEDESPCKGESGGAVFLERRFRFFQVGLVSWGLYNPCLGSADKNSRKRAPRSKVPPPRDFHINLFRMQPWLRQHLGDVLNFLPL

SEQ ID NO: 14864 - protein, 620 aa, Homo sapiens
MGPLMVLFCLLFLYPAGHCPNPGISLGAVRTGFRFGHGDKVRYRCSSNLVLTGSSERECQGNGVWSGTEPICRQPYSYDFPEDVAPALGTSFSHMLGATNPTQKTKESLGRKIQIQRSGHLNLYLLLDCSQSVSENDFLIFKESASLMVDRIFSFEINVSVAIITFASEPKVLMSVLNDNSRDMTEVISSLENANYKDHENGTGTNTYAALNSVYLMMNNQMRLLGMETMAWQEIRHAIILLTDGKSNMGGSPKTAVDHIREILNINQKRNDYLDIYAIGVGKLDVDWRELNELGSKKDGERHAFILQDTKALHQVFEHMLDVSKLTDTICGVGNMSANASDQERTPWHVTIKPKSQETCRGALISDQWVLTAAHCFRDGNDHSLWRVNVGDPKSQWGKEFLIEKAVISPGFDVFAKKNQGILEFYGDDIALLKLAQKVKMSTHARPICLPCTMEANLALRRPQGSTCRDHENELLNKQSVPAHFVALNGSKLNINLKMGVEWTSCAEVVSQEKTMFPNLTDVREVVTDQFLCSGTQEDESPCKGESGGAVFLERRFRFFQVGLVSWGLYNPCLGSADKNSRKRAPRSKVPPPRDFHINLFRMQPWLRQHLGDVLNFLPL

SEQ ID NO: 14865 - protein, 127 aa, Homo sapiens
MRGAGAILRPAARGARDLNPRRDISSWLAQWFPRTPARSVVALKTPIKVELVAGKTYRWCVCGRSKKQPFCDGSHFFQRTGLSPLKFKAQETRMVALCTCKATQRPPYCDGTHRSERVQKAEVGSPL

SEQ ID NO: 14866 - protein, 446 aa, Homo sapiens
MRTLNTSAMDGTGLVVERDFSVRILTACFLSLLILSTLLGNTLVCAAVIRFRHLRSKVTNFFVISLAVSDLLVAVLVMPWKAVAEIAGFWPFGSFCNIWVAFDIMCSTASILNLCVISVDRYWAISSPFRYERKMTPKAAFILISVAWTLSVLISFIPVQLSWHKAKPTSPSDGNATSLAETIDNCDSSLSRTYAISSSVISFYIPVAIMIVTYTRIYRIAQKQIRRIAALERAAVHAKNCQTTTGNGKPVECSQPESSFKMSFKRETKVLKTLSVIMGVFVCCWLPFFILNCILPFCGSGETQPFCIDSNTFDVFVWFGWANSSLNPIIYAFNADFRKAFSTLLGCYRLCPATNNAIETVSINNNGAAMFSSHHEPRGSISKECNLVYLIPHAVGSSEDLKKEEAAGIARPLEKLSPALSVILDYDTDVSLEKIQPITQNGQHPT

SEQ ID NO: 14867 - protein, 356 aa, Homo sapiens
MHHQWLLLAACFWVIFMFMVASKFITLTFKDPDVYSAKQEFLFLTTMPEVRKLPEEKHIPEELKPTGKELPDSQLVQPLVYMERLELIRNVCRDDALKNLSHTPVSKFVLDRIFVCDKHKILFCQTPKVGNTQWKKVLIVLNGAFSSIEEIPENVVHDHEKNGLPRLSSFSDAEIQKRLKTYFKFFIVRDPFERLISAFKDKFVHNPRFEPWYRHEIAPGIIRKYRRNRTETRGIQFEDFVRYLGDPNHRWLDLQFGDHIIHWVTYVELCAPCEIMYSVIGHHETLEDDAPYILKEAGIDHLVSYPTIPPGITVYNRTKVEHYFLGISKRDIRRLYARFEGDFKLFGYQKPDFLLN

SEQ ID NO: 14868 - protein, 135 aa, Homo sapiens
MVLESVARIVKVQLPAYLKRLPVPESITGFARLTVSEWLRLLPFLGVLALLGYLAVRPFLPKKKQQKDSLINLKIQKENPKVVNEINIEDLCLTKAAYCRCWRSKTFPACDGSHNKHNELTGDNVGPLILKKKEV

SEQ ID NO: 14869 - protein, 1669 aa, Homo sapiens
MGPRLSVWLLLLPAALLLHEEHSRAAAKGGCAGSGCGKCDCHGVKGQKGERGLPGLQGVIGFPGMQGPEGPQGPPGQKGDTGEPGLPGTKGTRGPPGASGYPGNPGLPGIPGQDGPPGPPGIPGCNGTKGERGPLGPPGLPGFAGNPGPPGLPGMKGDPGEILGHVPGMLLKGERGFPGIPGTPGPPGLPGLQGPVGPPGFTGPPGPPGPPGPPGEKGQMGLSFQGPKGDKGDQGVSGPPGVPGQAQVQEKGDFATKGEKGQKGEPGFQGMPGVGEKGEPGKPGPRGKPGKDGDKGEKGSPGFPGEPGYPGLIGRQGPQGEKGEAGPPGPPGIVIGTGPLGEKGERGYPGTPGPRGEPGPKGFPGLPGQPGPPGLPVPGQAGAPGFPGERGEKGDRGFPGTSLPGPSGRDGLPGPPGSPGPPGQPGYTNGIVECQPGPPGDQGPPGIPGQPGFIGEIGEKGQKGESCLICDIDGYRGPPGPQGPPGEIGFPGQPGAKGDRGLPGRDGVAGVPGPQGTPGLIGQPGAKGEPGEFYFDLRLKGDKGDPGFPGQPGMPGRAGSPGRDGHPGLPGPKGSPGSVGLKGERGPPGGVGFPGSRGDTGPPGPPGYGPAGPIGDKGQAGFPGGPGSPGLPGPKGEPGKIVPLPGPPGAEGLPGSPGFPGPQGDRGFPGTPGRPGLPGEKGAVGQPGIGFPGPPGPKGVDGLPGDMGPPGTPGRPGFNGLPGNPGVQGQKGEPGVGLPGLKGLPGLPGIPGTPGEKGSIGVPGVPGEHGAIGPPGLQGIRGEPGPPGLPGSVGSPGVPGIGPPGARGPPGGQGPPGLSGPPGIKGEKGFPGFPGLDMPGPKGDKGAQGLPGITGQSGLPGLPGQQGAPGIPGFPGSKGEMGVMGTPGQPGSPGPVGAPGLPGEKGDHGFPGSSGPRGDPGLKGDKGDVGLPGKPGSMDKVDMGSMKGQKGDQGEKGQIGPIGEKGSRGDPGTPGVPGKDGQAGQPGQPGPKGDPGISGTPGAPGLPGPKGSVGGMGLPGTPGEKGVPGIPGPQGSPGLPGDKGAKGEKGQAGPPGIGIPGLRGEKGDQGIAGFPGSPGEKGEKGSIGIPGMPGSPGLKGSPGSVGYPGSPGLPGEKGDKGLPGLDGIPGVKGEAGLPGTPGPTGPAGQKGEPGSDGIPGSAGEKGEPGLPGRGFPGFPGAKGDKGSKGEVGFPGLAGSPGIPGSKGEQGFMGPPGPQGQPGLPGSPGHATEGPKGDRGPQGQPGLPGLPGPMGPPGLPGIDGVKGDKGNPGWPGAPGVPGPKGDPGFQGMPGIGGSPGITGSKGDMGPPGVPGFQGPKGLPGLQGIKGDQGDQGVPGAKGLPGPPGPPGPYDIIKGEPGLPGPEGPPGLKGLQGLPGPKGQQGVTGLVGIPGPPGIPGFDGAPGQKGEMGPAGPTGPRGFPGPPGPDGLPGSMGPPGTPSVDHGFLVTRHSQTIDDPQCPSGTKILYHGYSLLYVQGNERAHGQDLGTAGSCLRKFSTMPFLFCNINNVCNFASRNDYSYWLSTPEPMPMSMAPITGENIRPFISRCAVCEAPAMVMAVHSQTIQIPPCPSGWSSLWIGYSFVMHTSAGAEGSGQALASPGSCLEEFRSAPFIECHGRGTCNYYANAYSFWLATIERSEMFKKPTPSTLKAGELRTHVSRCQVCMRRT

SEQ ID NO: 14870 - protein, 519 aa, Homo sapiens
MGPRLSVWLLLLPAALLLHEEHSRAAAKGGCAGSGCGKCDCHGVKGQKGERGLPGLQGVIGFPGMQGPEGPQGPPGQKGDTGEPGLPGTKGTRGPPGASGYPGNPGLPGIPGQDGPPGPPGIPGCNGTKGERGPLGPPGLPGFAGNPGPPGLPGMKGDPGEILGHVPGMLLKGERGFPGIPGTPGPPGLPGLQGPVGPPGFTGPPGPPGPPGPPGEKGQMGLSFQGPKGDKGDQGVSGPPGVPGQAQVQEKGDFATKGEKGQKGEPGFQGMPGVGEKGEPGKPGPRGKPGKDGDKGEKGSPGFPGEPGYPGLIGRQGPQGEKGEAGPPGPPGIVIGTGPLGEKGERGYPGTPGPRGEPGPKGFPGLPGQPGPPGLPVPGQAGAPGFPGERGEKGDRGFPGTSLPGPSGRDGLPGPPGSPGPPGQPGYTNGIVECQPGPPGDQGPPGIPGQPGFIGEIGEKGQKGESCLICDIDGYRGPPGPQGPPGEIGFPGQPGAKGDRGLPGRDGVAGVPLLFQIHK

SEQ ID NO: 14871 - protein, 298 aa, Homo sapiens
MESQKEARTLQEPVARPSGASSSQTPNDKERREGGAVPAAAALGAEADDDSADGLWELPVEPAERRPECTRCSRPQKVCLCPFLPAHPLHISTHLYIIQHPAEENKVLRTVPLLAACLPQDKCKVKIGRRFSEERDPELSTVCRKSGTLILYPGAEAANLEEFILDSPVYPSTIIIIDGTWSQAKDIFYKNSLFRHPKQVQLKTSISSQYVIRMQPTNRCLSTLECAAVALSILEKNNYIQETLLRPLQALCSFQLQHGAQIRLSKEHLLKNGLYPKPMPKNKRKLRKMELLMNSVKI

SEQ ID NO: 14872 - protein, 232 aa, Homo sapiens
MPGTATYRPQKVCLCPFLPAHPLHISTHLYIIQHPAEENKVLRTVPLLAACLPQDKCKVKIGRRFSEERDPELSTVCRKSGTLILYPGAEAANLEEFILDSPVYPSTIIIIDGTWSQAKDIFYKNSLFRHPKQVQLKTSISSQYVIRMQPTNRCLSTLECAAVALSILEKNNYIQETLLRPLQALCSFQLQHGAQIRLSKEHLLKNGLYPKPMPKNKRKLRKMELLMNSVKI

SEQ ID NO: 14873 - protein, 352 aa, Homo sapiens
MKPALLEVMRMNRICRMVLATCLGSFILVIFYFQSMLHPVMRRNPFGVDICCRKGSRSPLQELYNPIQLELSNTAVLHQMRRDQVTDTCRANSATSRKRRVLTPNDLKHLVVDEDHELIYCYVPKVACTNWKRLMMVLTGRGKYSDPMEIPANEAHVSANLKTLNQYSIPEINHRLKSYMKFLFVREPFERLVSAYRNKFTQKYNISFHKRYGTKIIKRQRKNATQEALRKGDDVKFEEFVAYLIDPHTQREEPFNEHWQTVYSLCHPCHIHYDLVGKYETLEEDSNYVLQLAGVGSYLKFPTYAKSTRTTDEMTTEFFQNISSEHQTQLYEVYKLDFLMFNYSVPSYLKLE

SEQ ID NO: 14874 - protein, 347 aa, Homo sapiens
MKPALLEVMRMNRICRMVLATCLGSFILVIFYFQIMRRNPFGVDICCRKGSRSPLQELYNPIQLELSNTAVLHQMRRDQVTDTCRANSATSRKRRVLTPNDLKHLVVDEDHELIYCYVPKVACTNWKRLMMVLTGRGKYSDPMEIPANEAHVSANLKTLNQYSIPEINHRLKSYMKFLFVREPFERLVSAYRNKFTQKYNISFHKRYGTKIIKRQRKNATQEALRKGDDVKFEEFVAYLIDPHTQREEPFNEHWQTVYSLCHPCHIHYDLVGKYETLEEDSNYVLQLAGVGSYLKFPTYAKSTRTTDEMTTEFFQNISSEHQTQLYEVYKLDFLMFNYSVPSYLKLE

SEQ ID NO: 14875 - protein, 182 aa, Homo sapiens
MRRCRRCARWPHRCPGPQSGPRSHFSPWPRTLGPAPALCVRTPLRPGPSSALGPLSACPSVPDYTASPPAGDSARSIVAASRAAGSGSTPGAGSKDCSPPPHSHSAAAAGESGDIGPGSGAVEAPGRGARRPTRQREDGGGAVGCFGVSRHRGREAQMSHSSHCGSRSCSAAAARPSLLQLA

SEQ ID NO: 14876 - protein, 245 aa, Homo sapiens
MSSESEKDKERLIQAAKMFFFHVQDLASVINTLTELFSRSMNTQILLMAVKNNSYIKDFFEQMLKIFKEMQSVVDARHDKIQKESLCSKVAMAMCSVVQKSTNVEELHQSAKEVFKSAHTPVIISVLNSSNILGSLESSLSHLMKFPIMNLQLSDFYTEDTKEQSDVTTSERTRSPPGSSKTTMIDTLKKLQDVLKTEDSKNPTKSAADLLEQIVKAMGPILEILQKAIKTMEMNISVFKKASDK

SEQ ID NO: 14877 - protein, 561 aa, Homo sapiens
MRHCINCCIQLLPDGAHKQQVNCQGGPHHGHQACPTCKGENKILFRVDSKQMNLLAVLEVRTEGNENWGGFLRFKKGKRCSLVFGLIIMTLVMASYILSGAHQELLISSPFHYGGFPSNPSLMDSENPSDTKEHHHQSSVNNISYMKDYPSIKLIINSITTRIEFTTRQLPDLEDLKKQELHMFSVIPNKFLPNSKSPCWYEEFSGQNTTDPYLTNSYVLYSKRFRSTFDALRKAFWGHLAHAHGKHFRLRCLPHFYIIGQPKCGTTDLYDRLRLHPEVKFSAIKEPHWWTRKRFGIVRLRDGLRDRYPVEDYLDLFDLAAHQIHQGLQASSAKEQSKMNTIIIGEASASTMWDNNAWTFFYDNSTDGEPPFLTQDFIHAFQPNARLIVMLRDPVERLYSDYLYFASSNKSADDFHEKVTEALQLFENCMLDYSLRACVYNNTLNNAMPVRLQVGLYAVYLLDWLSVFDKQQFLILRLEDHASNVKYTMHKVFQFLNLGPLSEKQEALMTKSPASNARRPEDRNLGPMWPITQKILRDFYRPFNARLAQVLADEAFAWKTT

SEQ ID NO: 14878 - protein, 506 aa, Homo sapiens
MRHCINCCIQLLPDGAHKQQVNCQGGPHHGHQACPTCKGENKILFRVDSKQMNLLAVLEVRTEGNENWGGFLRFKKGKRCSLVFGLIIMTLVMASYILSGAHQELLISSPFHYGGFPSNPSLMDSENPSDTKEHHHQSSVNNISYMKDYPSIKLIINSITTRIEFTTRQLPDLEDLKKQELHMFSVIPNKFLPNSKSPCWYEEFSGQNTTDPYLTNSYVLYSKRFRSTFDALRKAFWGHLAHAHGKHFRLRCLPHFYIIGQPKCGTTDLYDRLRLHPEVKFSAIKEPHWWTRKRFGIVRLRDGLRDRYPVEDYLDLFDLAAHQIHQGLQASSAKEQSKMNTIIIGEASASTMWDNNAWTFFYDNSTDGEPPFLTQDFIHAFQPNARLIVMLRDPVERLYSDYLYFASSNKSADDFHEKVTEALQLFENCMLDYSLRACVYNNTLNNAMPVCTPPPRTPRAGPWQKELVCCYYASGIVGLRFSIGTERSVLMCKCCSPLFMDVKAEN

SEQ ID NO: 14879 - protein, 1675 aa, Homo sapiens
MAQILPIRFQEHLQLQNLGINPANIGFSTLTMESDKFICIREKVGEQAQVVIIDMNDPSNPIRRPISADSAIMNPASKVIALKAGKTLQIFNIEMKSKMKAHTMTDDVTFWKWISLNTVALVTDNAVYHWSMEGESQPVKMFDRHSSLAGCQIINYRTDAKQKWLLLTGISAQQNRVVGAMQLYSVDRKVSQPIEGHAASFAQFKMEGNAEESTLFCFAVRGQAGGKLHIIEVGTPPTGNQPFPKKAVDVFFPPEAQNDFPVAMQISEKHDVVFLITKYGYIHLYDLETGTCIYMNRISGETIFVTAPHEATAGIIGVNRKGQVLSVCVEEENIIPYITNVLQNPDLALRMAVRNNLAGAEELFARKFNALFAQGNYSEAAKVAANAPKGILRTPDTIRRFQSVPAQPGQTSPLLQYFGILLDQGQLNKYESLELCRPVLQQGRKQLLEKWLKEDKLECSEELGDLVKSVDPTLALSVYLRANVPNKVIQCFAETGQVQKIVLYAKKVGYTPDWIFLLRNVMRISPDQGQQFAQMLVQDEEPLADITQIVDVFMEYNLIQQCTAFLLDALKNNRPSEGPLQTRLLEMNLMHAPQVADAILGNQMFTHYDRAHIAQLCEKAGLLQRALEHFTDLYDIKRAVVHTHLLNPEWLVNYFGSLSVEDSLECLRAMLSANIRQNLQICVQVASKYHEQLSTQSLIELFESFKSFEGLFYFLGSIVNFSQDPDVHFKYIQAACKTGQIKEVERICRESNCYDPERVKNFLKEAKLTDQLPLIIVCDRFDFVHDLVLYLYRNNLQKYIEIYVQKVNPSRLPVVIGGLLDVDCSEDVIKNLILVVRGQFSTDELVAEVEKRNRLKLLLPWLEARIHEGCEEPATHNALAKIYIDSNNNPERFLRENPYYDSRVVGKYCEKRDPHLACVAYERGQCDLELINVCNENSLFKSLSRYLVRRKDPELWGSVLLESNPYRRPLIDQVVQTALSETQDPEEVSVTVKAFMTADLPNELIELLEKIVLDNSVFSEHRNLQNLLILTAIKADRTRVMEYINRLDNYDAPDIANIAISNELFEEAFAIFRKFDVNTSAVQVLIEHIGNLDRAYEFAERCNEPAVWSQLAKAQLQKGMVKEAIDSYIKADDPSSYMEVVQAANTSGNWEELVKYLQMARKKARESYVETELIFALAKTNRLAELEEFINGPNNAHIQQVGDRCYDEKMYDAAKLLYNNVSNFGRLASTLVHLGEYQAAVDGARKANSTRTWKEVCFACVDGKEFRLAQMCGLHIVVHADELEELINYYQDRGYFEELITMLEAALGLERAHMGMFTELAILYSKFKPQKMREHLELFWSRVNIPKVLRAAEQAHLWAELVFLYDKYEEYDNAIITMMNHPTDAWKEGQFKDIITKVANVELYYRAIQFYLEFKPLLLNDLLMVLSPRLDHTRAVNYFSKVKQLPLVKPYLRSVQNHNNKSVNESLNNLFITEEDYQALRTSIDAYDNFDNISLAQRLEKHELIEFRRIAAYLFKGNNRWKQSVELCKKDSLYKDAMQYASESKDTELAEELLQWFLQEEKRECFGACLFTCYDLLRPDVVLETAWRHNIMDFAMPYFIQVMKEYLTKVDKLDASESLRKEEEQATETQPIVYGQPQLMLTAGPSVAVPPQAPFGYGYTAPPYGQPQPGFGYSM

SEQ ID NO: 14880 - protein, 1639 aa, Homo sapiens
MAQILPIRFQEHLQLQNLGINPANIGFSTLTMESDKFICIREKVGEQAQVVIIDMNDPSNPIRRPISADSAIMNPASKVIALKAGKTLQIFNIEMKSKMKAHTMTDDVTFWKWISLNTVALVTDNAVYHWSMEGESQPVKMFDRHSSLAGCQIINYRTDAKQKWLLLTGISAQQNRVVGAMQLYSVDRKVSQPIEGHAASFAQFKMEGNAEESTLFCFAVRGQAGGKLHIIEVGTPPTGNQPFPKKAVDVFFPPEAQNDFPVAMQISEKHDVVFLITKYGYIHLYDLETGTCIYMNRISGETIFVTAPHEATAGIIGVNRKGQVLSVCVEEENIIPYITNVLQNPDLALRMAVRNNLAGAEELFARKFNALFAQGNYSEAAKVAANAPKGILRTPDTIRRFQSVPAQPGQTSPLLQYFGILLDQGQLNKYESLELCRPVLQQGRKQLLEKWLKEDKLECSEELGDLVKSVDPTLALSVYLRANVPNKVIQCFAETGQVQKIVLYAKKVGYTPDWIFLLRNVMRISPDQGQQFAQMLVQDEEPLADITQIVDVFMEYNLIQQCTAFLLDALKNNRPSEGPLQTRLLEMNLMHAPQVADAILGNQMFTHYDRAHIAQLCEKAGLLQRALEHFTDLYDIKRAVVHTHLLNPEWLVNYFGSLSVEDSLECLRAMLSANIRQNLQICVQVASKYHEQLSTQSLIELFESFKSFEGLFYFLGSIVNFSQDPDVHFKYIQAACKTGQIKEVERICRESNCYDPERVKNFLKEAKLTDQLPLIIVCDRFDFVHDLVLYLYRNNLQKYIEIYVQKVNPSRLPVVIGGLLDVDCSEDVIKNLILVVRGQFSTDELVAEVEKRNRLKLLLPWLEARIHEGCEEPATHNALAKIYIDSNNNPERFLRENPYYDSRVVGKYCEKRDPHLACVAYERGQCDLELINVCNENSLFKSLSRYLVRRKDPELWGSVLLESNPYRRPLIDQVVQTALSETQDPEEVSVTVKAFMTADLPNELIELLEKIVLDNSVFSEHRNLQNLLILTAIKADRTRVMEYINRLDNYDAPDIANIAISNELFEEAFAIFRKFDVNTSAVQVLIEHIGNLDRAYEFAERCNEPAVWSQLAKAQLQKGMVKEAIDSYIKADDPSSYMEVVQAANTSGNWEELVKYLQMARKKARESYVETELIFALAKTNRLAELEEFINGPNNAHIQQVGDRCYDEKMYDAAKLLYNNVSNFGRLASTLVHLGEYQAAVDGARKANSTRTWKEVCFACVDGKEFRLAQMCGLHIVVHADELEELINYYQDRGYFEELITMLEAALGLERAHMGMFTELAILYSKFKPQKMREHLELFWSRVNIPKVLRAAEQAHLWAELVFLYDKYEEYDNAIITMMNHPTDAWKEGQFKDIITKVANVELYYRAIQFYLEFKPLLLNDLLMVLSPRLDHTRAVNYFSKVKQLPLVKPYLRSVQNHNNKSVNESLNNLFITEEDYQALRTSIDAYDNFDNISLAQRLEKHELIEFRRIAAYLFKGNNRWKQSVELCKKDSLYKDAMQYASESKDTELAEELLQWFLQEEKRECFGACLFTCYDLLRPDVVLETAWRHNIMDFAMPYFIQVMKEYLTKVDKLDASESLRKEEEQATETQPIVYGNLSL

SEQ ID NO: 14881 - protein, 131 aa, Homo sapiens
MGGKSAVRHQLVLDCPREAASSAPALRPLGAAATSRAAPLAPLPAPSPRWGLGCGRVRYPGPHPRRAVEPAAGPLSAPIIAGGHPAEAAAGSAKQQPRHSREVPRPPVPQHPSGNSRSALQEAKTEQTKTP

SEQ ID NO: 14882 - protein, 586 aa, Homo sapiens
MSVHQIRKHAVLPPIICRSDKEFLESVQRYIITETERLGCSEEGPADEYYIIYRNVFDKVIEHITAYKSILTSIKKEYDAFIETIKKDRRTTFCLHGKLKGLAAEPTALVYYRKRTIQLEAKMRIIESNSSKIQSQIDHIKQCRAEYDTKEVKYCTFSKDPSKPIPGMTLQESMNLDALTKYMKHLEDKYAEIKQAMLIKYVPAQRKADLDEEMIVLLKRRDVAENLNKKLQFCHQRLQIISQALSSWVKSDMSSPFQDFVEQIQKTKYLQGDQGIVEELMEDDPRRAKEAEIMLHYIERFNELISLGEYEKAACYAANSPRRILRNIGTMNTFKAVGKIRGKPLPLLLFFEALFITSHAFPCPVDAALTLEGIKCGLSEKRLDLVTNWVTQERLTFSEEAGDVICDYGEQDTYNKAKCLALAQIVYSECGLHKKAILCLCKQGQTHRVMEYIQQLKDFTTDDLLQLLMSCPQVELIQCLTKELNEKQPSLSFGLAILHLFSADMKKVGIKLLQEINKGGIDAVESLMINDSFCSIEKWQEVANICSQNGFDKLSNDITSILRSQAAVTEISEEDDAVNLMEHVFW

SEQ ID NO: 14883 - protein, 464 aa, Homo sapiens
MRIIESNSSKIQSQIDHIKQCRAEYDTKEVKYCTFSKDPSKPIPGMTLQESMNLDALTKYMKHLEDKYAEIKQAMLIKYVPAQRKADLDEEMIVLLKRRDVAENLNKKLQFCHQRLQIISQALSSWVKSDMSSPFQDFVEQIQKTKYLQGDQGIVEELMEDDPRRAKEAEIMLHYIERFNELISLGEYEKAACYAANSPRRILRNIGTMNTFKAVGKIRGKPLPLLLFFEALFITSHAFPCPVDAALTLEGIKCGLSEKRLDLVTNWVTQERLTFSEEAGDVICDYGEQDTYNKAKCLALAQIVYSECGLHKKAILCLCKQGQTHRVMEYIQQLKDFTTDDLLQLLMSCPQVELIQCLTKELNEKQPSLSFGLAILHLFSADMKKVGIKLLQEINKGGIDAVESLMINDSFCSIEKWQEVANICSQNGFDKLSNDITSILRSQAAVTEISEEDDAVNLMEHVFW

SEQ ID NO: 14884 - protein, 1745 aa, Homo sapiens
MGNRRDLGQPRAGLCLLLAALQLLPGTQADPVDVLKALGVQGGQAGVPEGPGFCPQRTPEGDRAFRIGQASTLGIPTWELFPEGHFPENFSLLITLRGQPANQSVLLSIYDERGARQLGLALGPALGLLGDPFRPLPQQVNLTDGRWHRVAVSIDGEMVTLVADCEAQPPVLGHGPRFISIAGLTVLGTQDLGEKTFEGDIQELLISPDPQAAFQACERYLPDCDNLAPAATVAPQGEPETPRPRRKGKGKGRKKGRGRKGKGRKKNKEIWTSSPPPDSAENQTSTDIPKTETPAPNLPPTPTPLVVTSTVTTGLNATILERSLDPDSGTELGTLETKAAREDEEGDDSTMGPDFRAAEYPSRTQFQIFPGAGEKGAKGEPAVIEKGQQFEGPPGAPGPQGVVGPSGPPGPPGFPGDPGPPGPAGLPGIPGIDGIRGPPGTVIMMPFQFAGGSFKGPPVSFQQAQAQAVLQQTQLSMKGPPGPVGLTGRPGPVGLPGHPGLKGEEGAEGPQGPRGLQGPHGPPGRVGKMGRPGADGARGLPGDTGPKGDRGFDGLPGLPGEKGQRGDFGHVGQPGPPGEDGERGAEGPPGPTGQAGEPGPRGLLGPRGSPGPTGRPGVTGIDGAPGAKGNVGPPGEPGPPGQQGNHGSQGLPGPQGLIGTPGEKGPPGNPGIPGLPGSDGPLGHPGHEGPTGEKGAQGPPGSAGPPGYPGPRGVKGTSGNRGLQGEKGEKGEDGFPGFKGDVGLKGDQGKPGAPGPRGEDGPEGPKGQAGQAGEEGPPGSAGEKGKLGVPGLPGYPGRPGPKGSIGFPGPLGPIGEKGKSGKTGQPGLEGERGPPGSRGERGQPGATGQPGPKGDVGQDGAPGIPGEKGLPGLQGPPGFPGPKGPPGHQGKDGRPGHPGQRGELGFQGQTGPPGPAGVLGPQGKTGEVGPLGERGPPGPPGPPGEQGLPGLEGREGAKGELGPPGPLGKEGPAGLRGFPGPKGGPGDPGPTGLKGDKGPPGPVGANGSPGERGPLGPAGGIGLPGQSGSEGPVGPAGKKGSRGERGPPGPTGKDGIPGPLGPLGPPGAAGPSGEEGDKGDVGAPGHKGSKGDKGDAGPPGQPGIRGPAGHPGPPGADGAQGRRGPPGLFGQKGDDGVRGFVGVIGPPGLQGLPGPPGEKGEVGDVGSMGPHGAPGPRGPQGPTGSEGTPGLPGGVGQPGAVGEKGERGDAGDPGPPGAPGIPGPKGDIGEKGDSGPSGAAGPPGKKGPPGEDGAKGSVGPTGLPGDLGPPGDPGVSGIDGSPGEKGDPGDVGGPGPPGASGEPGAPGPPGKRGPSGHMGREGREGEKGAKGEPGPDGPPGRTGPMGARGPPGRVGPEGLRGIPGPVGEPGLLGAPGQMGPPGPLGPSGLPGLKGDTGPKGEKGHIGLIGLIGPPGEAGEKGDQGLPGVQGPPGPKGDPGPPGPIGSLGHPGPPGVAGPLGQKGSKGSPGSMGPRGDTGPAGPPGPPGAPAELHGLRRRRRFVPVPLPVVEGGLEEVLASLTSLSLELEQLRRPPGTAERPGLVCHELHRNHPHLPDGEYWIDPNQGCARDSFRVFCNFTAGGETCLYPDKKFEIVKLASWSKEKPGGWYSTFRRGKKFSYVDADGSPVNVVQLNFLKLLSATARQNFTYSCQNAAAWLDEATGDYSHSARFLGTNGEELSFNQTTAATVSVPQDGCRLRKGQTKTLFEFSSSRAGFLPLWDVAATDFGQTNQKFGFELGPVCFSS

SEQ ID NO: 14885 - protein, 1538 aa, Homo sapiens
MEPRMESCLAQVLQKDVGKRLQVGQELIDYFSDKQKSADLEHDQTMLDKLVDGLATSWVNSSNYKVVLLGMDILSALVTRLQDRFKAQIGTVLPSLIDRLGDAKDSVREQDQTLLLKIMDQAANPQYVWDRMLGGFKHKNFRTREGICLCLIATLNASGAQTLTLSKIVPHICNLLGDPNSQVRDAAINSLVEIYRHVGERVRADLSKKGLPQSRLNVIFTKFDEVQKSGNMIQSANDKNFDDEDSVDGNRPSSASSTSSKAPPSSRRNVGMGTTRRLGSSTLGSKSSAAKEGAGAVDEEDFIKAFDDVPVVQIYSSRDLEESINKIREILSDDKHDWEQRVNALKKIRSLLLAGAAEYDNFFQHLRLLDGAFKLSAKDLRSQVVREACITLGHLSSVLGNKFDHGAEAIMPTIFNLIPNSAKIMATSGVVAVRLIIRHTHIPRLIPVITSNCTSKSVAVRRRCFEFLDLLLQEWQTHSLERHISVLAETIKKGIHDADSEARIEARKCYWGFHSHFSREAEHLYHTLESSYQKALQSHLKNSDSIVSLPQSDRSSSSSQESLNRPLSAKRSPTGSTTSRASTVSTKSVSTTGSLQRSRSDIDVNAAASAKSKVSSSSGTTPFSSAAALPPGSYASLGRIRTRRQSSGSATNVASTPDNRGRSRAKVVSQSQRSRSANPAGAGSRSSSPGKLLGSGYGGLTGGSSRGPPVTPSSEKRSKIPRSQGCSRETSPNRIGLARSSRIPRPSMSQGCSRDTSRESSRDTSPARGFPPLDRFGLGQPGRIPGSVNAMRVLSTSTDLEAAVADALKKPVRRRYEPYGMYSDDDANSDASSVCSERSYGSRNGGIPHYLRQTEDVAEVLNHCASSNWSERKEGLLGLQNLLKSQRTLSRVELKRLCEIFTRMFADPHSKRVFSMFLETLVDFIIIHKDDLQDWLFVLLTQLLKKMGADLLGSVQAKVQKALDVTRDSFPFDQQFNILMRFIVDQTQTPNLKVKVAILKYIESLARQMDPTDFVNSSETRLAVSRIITWTTEPKSSDVRKAAQIVLISLFELNTPEFTMLLGALPKTFQDGATKLLHNHLKNSSNTSVGSPSNTIGRTPSRHTSSRTSPLTSPTNCSHGGLSPSRLWGWSADGLAKHPPPFSQPNSIPTAPSHKALRRSYSPSMLDYDTENLNSEEIYSSLRGVTEAIEKFSFRSQEDLNEPIKRDGKKECDIVSRDGGAASPATEGRGGSEVEGGRTALDNKTSLLNTQPPRAFPGPRARDYNPYPYSDAINTYDKTALKEAVFDDDMEQLRDVPIDHSDLVADLLKELSNHNERVEERKGALLELLKITREDSLGVWEEHFKTILLLLLETLGDKDHSIRALALRVLREILRNQPARFKNYAELTIMKTLEAHKDSHKEVVRAAEEAASTLASSIHPEQCIKVLCPIIQTADYPINLAAIKMQTKVVERIAKESLLQLLVDIIPGLLQGYDNTESSVRKASVFCLVAIYSVIGEDLKPHLAQLTGSKMKLLNLYIKRAQTTNSNSSSSSDVSTHS

SEQ ID NO: 14886 - protein, 1471 aa, Homo sapiens
MEPRMESCLAQVLQKDVGKRLQVGQELIDYFSDKQKSADLEHDQTMLDKLVDGLATSWVNSSNYKVVLLGMDILSALVTRLQDRFKAQIGTVLPSLIDRLGDAKDSVREQDQTLLLKIMDQAANPQYVWDRMLGGFKHKNFRTREGICLCLIATLNASGAQTLTLSKIVPHICNLLGDPNSQVRDAAINSLVEIYRHVGERVRADLSKKGLPQSRLNVIFTKFDEVQKSGNMIQSANDKNFDDEDSVDGNRPSSASSTSSKAPPSSRRNVGMGTTRRLGSSTLGSKSSAAKEGAGAVDEEDFIKAFDDVPVVQIYSSRDLEESINKIREILSDDKHDWEQRVNALKKIRSLLLAGAAEYDNFFQHLRLLDGAFKLSAKDLRSQVVREACITLGHLSSVLGNKFDHGAEAIMPTIFNLIPNSAKIMATSGVVAVRLIIRHTHIPRLIPVITSNCTSKSVAVRRRCFEFLDLLLQEWQTHSLERHISVLAETIKKGIHDADSEARIEARKCYWGFHSHFSREAEHLYHTLESSYQKALQSHLKNSDSIVSLPQSDRSSSSSQESLNRPLSAKRSPTGSTTSRASTVSTKSVSTTGSLQRSRSDIDVNAAASAKSKVSSSSGTTPFSSAAALPPGSYASLGRIRTRRQSSGSATNVASTPDNRGRSRAKVVSQSQRSRSANPAGAGSRSSSPGKLLGSGYGGLTGGSSRGPPVTPSSEKRSKIPRSQGCSRETSPNRIGLDRFGLGQPGRIPGSVNAMRVLSTSTDLEAAVADALLLGDSRSKKKPVRRRYEPYGMYSDDDANSDASSVCSERSYGSRNGGIPHYLRQTEDVAEVLNHCASSNWSERKEGLLGLQNLLKSQRTLSRVELKRLCEIFTRMFADPHSKRVFSMFLETLVDFIIIHKDDLQDWLFVLLTQLLKKMGADLLGSVQAKVQKALDVTRDSFPFDQQFNILMRFIVDQTQTPNLKVKVAILKYIESLARQMDPTDFVNSSETRLAVSRIITWTTEPKSSDVRKAAQIVLISLFELNTPEFTMLLGALPKTFQDGATKLLHNHLKNSSNTSVGSPSNTIGRTPSRHTSSRTSPLTSPTNCSHGGLSPSMLDYDTENLNSEEIYSSLRGVTEAIEKFSFRSQEDLNEPIKRDGKKECDIVSRDGGAASPATEGRGGSEVEGGRTALDNKTSLLNTQPPRAFPGPRARDYNPYPYSDAINTYDKTALKEAVFDDDMEQLRDVPIDHSDLVADLLKELSNHNERVEERKGALLELLKITREDSLGVWEEHFKTILLLLLETLGDKDHSIRALALRVLREILRNQPARFKNYAELTIMKTLEAHKDSHKEVVRAAEEAASTLASSIHPEQCIKVLCPIIQTADYPINLAAIKMQTKVVERIAKESLLQLLVDIIPGLLQGYDNTESSVRKASVFCLVAIYSVIGEDLKPHLAQLTGSKMKLLNLYIKRAQTTNSNSSSSSDVSTHS

SEQ ID NO: 14887 - protein, 1494 aa, Homo sapiens
MEPRMESCLAQVLQKDVGKRLQVGQELIDYFSDKQKSADLEHDQTMLDKLVDGLATSWVNSSNYKVVLLGMDILSALVTRLQDRFKAQIGTVLPSLIDRLGDAKDSVREQDQTLLLKIMDQAANPQYVWDRMLGGFKHKNFRTREGICLCLIATLNASGAQTLTLSKIVPHICNLLGDPNSQVRDAAINSLVEIYRHVGERVRADLSKKGLPQSRLNVIFTKFDEVQKSGNMIQSANDKNFDDEDSVDGNRPSSASSTSSKAPPSSRRNVGMGTTRRLGSSTLGSKSSAAKEGAGAVDEEDFIKAFDDVPVVQIYSSRDLEESINKIREILSDDKHDWEQRVNALKKIRSLLLAGAAEYDNFFQHLRLLDGAFKLSAKDLRSQVVREACITLGHLSSVLGNKFDHGAEAIMPTIFNLIPNSAKIMATSGVVAVRLIIRHTHIPRLIPVITSNCTSKSVAVRRRCFEFLDLLLQEWQTHSLERHISVLAETIKKGIHDADSEARIEARKCYWGFHSHFSREAEHLYHTLESSYQKALQSHLKNSDSIVSLPQSDRSSSSSQESLNRPLSAKRSPTGSTTSRASTVSTKSVSTTGSLQRSRSDIDVNAAASAKSKVSSSSGTTPFSSAAALPPGSYASLGRIRTRRQSSGSATNVASTPDNRGRSRAKVVSQSQRSRSANPAGAGSRSSSPGKLLGSGYGGLTGGSSRGPPVTPSSEKRSKIPRSQGCSRETSPNRIGLDRFGLGQPGRIPGSVNAMRVLSTSTDLEAAVADALLLGDSRSKKKPVRRRYEPYGMYSDDDANSDASSVCSERSYGSRNGGIPHYLRQTEDVAEVLNHCASSNWSERKEGLLGLQNLLKSQRTLSRVELKRLCEIFTRMFADPHSKIADSEAECEDKEGNLFPSEVSCTRVFSMFLETLVDFIIIHKDDLQDWLFVLLTQLLKKMGADLLGSVQAKVQKALDVTRDSFPFDQQFNILMRFIVDQTQTPNLKVKVAILKYIESLARQMDPTDFVNSSETRLAVSRIITWTTEPKSSDVRKAAQIVLISLFELNTPEFTMLLGALPKTFQDGATKLLHNHLKNSSNTSVGSPSNTIGRTPSRHTSSRTSPLTSPTNCSHGGLSPSMLDYDTENLNSEEIYSSLRGVTEAIEKFSFRSQEDLNEPIKRDGKKECDIVSRDGGAASPATEGRGGSEVEGGRTALDNKTSLLNTQPPRAFPGPRARDYNPYPYSDAINTYDKTALKEAVFDDDMEQLRDVPIDHSDLVADLLKELSNHNERVEERKGALLELLKITREDSLGVWEEHFKTILLLLLETLGDKDHSIRALALRVLREILRNQPARFKNYAELTIMKTLEAHKDSHKEVVRAAEEAASTLASSIHPEQCIKVLCPIIQTADYPINLAAIKMQTKVVERIAKESLLQLLVDIIPGLLQGYDNTESSVRKASVFCLVAIYSVIGEDLKPHLAQLTGSKMKLLNLYIKRAQTTNSNSSSSSDVSTHS

SEQ ID NO: 14888 - protein, 1477 aa, Homo sapiens
MEPRMESCLAQVLQKDVGKRLQVGQELIDYFSDKQKSADLEHDQTMLDKLVDGLATSWVNSSNYKVVLLGMDILSALVTRLQDRFKAQIGTVLPSLIDRLGDAKDSVREQDQTLLLKIMDQAANPQYVWDRMLGGFKHKNFRTREGICLCLIATLNASGAQTLTLSKIVPHICNLLGDPNSQVRDAAINSLVEIYRHVGERVRADLSKKGLPQSRLNVIFTKFDEVQKSGNMIQSANDKNFDDEDSVDGNRPSSASSTSSKAPPSSRRNVGMGTTRRLGSSTLGSKSSAAKEGAGAVDEEDFIKAFDDVPVVQIYSSRDLEESINKIREILSDDKHDWEQRVNALKKIRSLLLAGAAEYDNFFQHLRLLDGAFKLSAKDLRSQVVREACITLGHLSSVLGNKFDHGAEAIMPTIFNLIPNSAKIMATSGVVAVRLIIRHTHIPRLIPVITSNCTSKSVAVRRRCFEFLDLLLQEWQTHSLERHISVLAETIKKGIHDADSEARIEARKCYWGFHSHFSREAEHLYHTLESSYQKALQSHLKNSDSIVSLPQSDRSSSSSQESLNRPLSAKRSPTGSTTSRASTVSTKSVSTTGSLQRSRSDIDVNAAASAKSKVSSSSGTTPFSSAAALPPGSYASLESRHMREDMEYIGLDSGRIRTRRQSSGSATNVASTPDNRGRSRAKVVSQSQPGSRSSSPGKLLGSGYGGLTGGSSRGPPVTPSSEKRSKIPRSQGCSRETSPNRIGLDRFGLGQPGRIPGSVNAMRVLSTSTDLEAAVADALLLGDSRSKKPVRRRYEPYGMYSDDDANSDASSVCSERSYGSRNGGIPHYLRQTEDVAEVLNHCASSNWSERKEGLLGLQNLLKSQRTLSRVELKRLCEIFTRMFADPHSKRVFSMFLETLVDFIIIHKDDLQDWLFVLLTQLLKKMGADLLGSVQAKVQKALDVTRDSFPFDQQFNILMRFIVDQTQTPNLKVKVAILKYIESLARQMDPTDFVNSSETRLAVSRIITWTTEPKSSDVRKAAQIVLISLFELNTPEFTMLLGALPKTFQDGATKLLHNHLKNSSNTSVGSPSNTIGRTPSRHTSSRTSPLTSPTNCSHGGLSPSMLDYDTENLNSEEIYSSLRGVTEAIEKFSFRSQEDLNEPIKRDGKKECDIVSRDGGAASPATEGRGGSEVEGGRTALDNKTSLLNTQPPRAFPGPRARDYNPYPYSDAINTYDKTALKEAVFDDDMEQLRDVPIDHSDLVADLLKELSNHNERVEERKGALLELLKITREDSLGVWEEHFKTILLLLLETLGDKDHSIRALALRVLREILRNQPARFKNYAELTIMKTLEAHKDSHKEVVRAAEEAASTLASSIHPEQCIKVLCPIIQTADYPINLAAIKMQTKVVERIAKESLLQLLVDIIPGLLQGYDNTESSVRKASVFCLVAIYSVIGEDLKPHLAQLTGSKMKLLNLYIKRAQTTNSNSSSSSDVSTHS

SEQ ID NO: 14889 - protein, 1479 aa, Homo sapiens
MEPRMESCLAQVLQKDVGKRLQVGQELIDYFSDKQKSADLEHDQTMLDKLVDGLATSWVNSSNYKVVLLGMDILSALVTRLQDRFKAQIGTVLPSLIDRLGDAKDSVREQDQTLLLKIMDQAANPQYVWDRMLGGFKHKNFRTREGICLCLIATLNASGAQTLTLSKIVPHICNLLGDPNSQVRDAAINSLVEIYRHVGERVRADLSKKGLPQSRLNVIFTKFDEVQKSGNMIQSANDKNFDDEDSVDGNRPSSASSTSSKAPPSSRRNVGMGTTRRLGSSTLGSKSSAAKEGAGAVDEEDFIKAFDDVPVVQIYSSRDLEESINKIREILSDDKHDWEQRVNALKKIRSLLLAGAAEYDNFFQHLRLLDGAFKLSAKDLRSQVVREACITLGHLSSVLGNKFDHGAEAIMPTIFNLIPNSAKIMATSGVVAVRLIIRHTHIPRLIPVITSNCTSKSVAVRRRCFEFLDLLLQEWQTHSLERHISVLAETIKKGIHDADSEARIEARKCYWGFHSHFSREAEHLYHTLESSYQKALQSHLKNSDSIVSLPQSDRSSSSSQESLNRPLSAKRSPTGSTTSRASTVSTKSVSTTGSLQRSRSDIDVNAAASAKSKVSSSSGTTPFSSAAALPPGSYASLDGTTTKAEGRIRTRRQSSGSATNVASTPDNRGRSRAKVVSQSQRSRSANPAGAGSRSSSPGKLLGSGYGGLTGGSSRGPPVTPSSEKRSKIPRSQGCSRETSPNRIGLDRFGLGQPGRIPGSVNAMRVLSTSTDLEAAVADALLLGDSRSKKKPVRRRYEPYGMYSDDDANSDASSVCSERSYGSRNGGIPHYLRQTEDVAEVLNHCASSNWSERKEGLLGLQNLLKSQRTLSRVELKRLCEIFTRMFADPHSKRVFSMFLETLVDFIIIHKDDLQDWLFVLLTQLLKKMGADLLGSVQAKVQKALDVTRDSFPFDQQFNILMRFIVDQTQTPNLKVKVAILKYIESLARQMDPTDFVNSSETRLAVSRIITWTTEPKSSDVRKAAQIVLISLFELNTPEFTMLLGALPKTFQDGATKLLHNHLKNSSNTSVGSPSNTIGRTPSRHTSSRTSPLTSPTNCSHGGLSPSMLDYDTENLNSEEIYSSLRGVTEAIEKFSFRSQEDLNEPIKRDGKKECDIVSRDGGAASPATEGRGGSEVEGGRTALDNKTSLLNTQPPRAFPGPRARDYNPYPYSDAINTYDKTALKEAVFDDDMEQLRDVPIDHSDLVADLLKELSNHNERVEERKGALLELLKITREDSLGVWEEHFKTILLLLLETLGDKDHSIRALALRVLREILRNQPARFKNYAELTIMKTLEAHKDSHKEVVRAAEEAASTLASSIHPEQCIKVLCPIIQTADYPINLAAIKMQTKVVERIAKESLLQLLVDIIPGLLQGYDNTESSVRKASVFCLVAIYSVIGEDLKPHLAQLTGSKMKLLNLYIKRAQTTNSNSSSSSDVSTHS

SEQ ID NO: 14890 - protein, 934 aa, Homo sapiens
MARRSVLYFILLNALINKGQACFCDHYAWTQWTSCSKTCNSGTQSRHRQIVVDKYYQENFCEQICSKQETRECNWQRCPINCLLGDFGPWSDCDPCIEKQSKVRSVLRPSQFGGQPCTAPLVAFQPCIPSKLCKIEEADCKNKFRCDSGRCIARKLECNGENDCGDNSDERDCGRTKAVCTRKYNPIPSVQLMGNGFHFLAGEPRGEVLDNSFTGGICKTVKSSRTSNPYRVPANLENVGFEVQTAEDDLKTDFYKDLTSLGHNENQQGSFSSQGGSSFSVPIFYSSKRSENINHNSAFKQAIQASHKKDSSFIRIHKVMKVLNFTTKAKDLHLSDVFLKALNHLPLEYNSALYSRIFDDFGTHYFTSGSLGGVYDLLYQFSSEELKNSGLTEEEAKHCVRIETKKRVLFAKKTKVEHRCTTNKLSEKHEGSFIQGAEKSISLIRGGRSEYGAALAWEKGSSGLEEKTFSEWLESVKENPAVIDFELAPIVDLVRNIPCAVTKRNNLRKALQEYAAKFDPCQCAPCPNNGRPTLSGTECLCVCQSGTYGENCEKQSPDYKSNAVDGQWGCWSSWSTCDATYKRSRTRECNNPAPQRGGKRCEGEKRQEEDCTFSIMENNGQPCINDDEEMKEVDLPEIEADSGCPQPVPPENGFIRNEKQLYLVGEDVEISCLTGFETVGYQYFRCLPDGTWRQGDVECQRTECIKPVVQEVLTITPFQRLYRIGESIELTCPKGFVVAGPSRYTCQGNSWTPPISNSLTCEKDTLTKLKGHCQLGQKQSGSECICMSPEEDCSHHSEDLCVFDTDSNDYFTSPACKFLAEKCLNNQQLHFLHIGSCQDGRQLEWGLERTRLSSNSTKKESCGYDTCYDWEKCSASTSKCVCLLPPQCFKGGNQLYCVKMGSSTSEKTLNICEVGTIRCANRKMEILHPGKCLA

SEQ ID NO: 14891 - protein, 2944 aa, Homo sapiens
MTLRLLVAALCAGILAEAPRVRAQHRERVTCTRLYAADIVFLLDGSSSIGRSNFREVRSFLEGLVLPFSGAASAQGVRFATVQYSDDPRTEFGLDALGSGGDVIRAIRELSYKGGNTRTGAAILHVADHVFLPQLARPGVPKVCILITDGKSQDLVDTAAQRLKGQGVKLFAVGIKNADPEELKRVASQPTSDFFFFVNDFSILRTLLPLVSRRVCTTAGGVPVTRPPDDSTSAPRDLVLSEPSSQSLRVQWTAASGPVTGYKVQYTPLTGLGQPLPSERQEVNVPAGETSVRLRGLRPLTEYQVTVIALYANSIGEAVSGTARTTALEGPELTIQNTTAHSLLVAWRSVPGATGYRVTWRVLSGGPTQQQELGPGQGSVLLRDLEPGTDYEVTVSTLFGRSVGPATSLMARTDASVEQTLRPVILGPTSILLSWNLVPEARGYRLEWRRETGLEPPQKVVLPSDVTRYQLDGLQPGTEYRLTLYTLLEGHEVATPATVVPTGPELPVSPVTDLQATELPGQRVRVSWSPVPGATQYRIIVRSTQGVERTLVLPGSQTAFDLDDVQAGLSYTVRVSARVGPREGSASVLTVRREPETPLAVPGLRVVVSDATRVRVAWGPVPGASGFRISWSTGSGPESSQTLPPDSTATDITGLQPGTTYQVAVSVLRGREEGPAAVIVARTDPLGPVRTVHVTQASSSSVTITWTRVPGATGYRVSWHSAHGPEKSQLVSGEATVAELDGLEPDTEYTVHVRAHVAGVDGPPASVVVRTAPEPVGRVSRLQILNASSDVLRITWVGVTGATAYRLAWGRSEGGPMRHQILPGNTDSAEIRGLEGGVSYSVRVTALVGDREGTPVSIVVTTPPEAPPALGTLHVVQRGEHSLRLRWEPVPRAQGFLLHWQPEGGQEQSRVLGPELSSYHLDGLEPATQYRVRLSVLGPAGEGPSAEVTARTESPRVPSIELRVVDTSIDSVTLAWTPVSRASSYILSWRPLRGPGQEVPGSPQTLPGISSSQRVTGLEPGVSYIFSLTPVLDGVRGPEASVTQTPVCPRGLADVVFLPHATQDNAHRAEATRRVLERLVLALGPLGPQAVQVGLLSYSHRPSPLFPLNGSHDLGIILQRIRDMPYMDPSGNNLGTAVVTAHRYMLAPDAPGRRQHVPGVMVLLVDEPLRGDIFSPIREAQASGLNVVMLGMAGADPEQLRRLAPGMDSVQTFFAVDDGPSLDQAVSGLATALCQASFTTQPRPEPCPVYCPKGQKGEPGEMGLRGQVGPPGDPGLPGRTGAPGPQGPPGSATAKGERGFPGADGRPGSPGRAGNPGTPGAPGLKGSPGLPGPRGDPGERGPRGPKGEPGAPGQVIGGEGPGLPGRKGDPGPSGPPGPRGPLGDPGPRGPPGLPGTAMKGDKGDRGERGPPGPGEGGIAPGEPGLPGLPGSPGPQGPVGPPGKKGEKGDSEDGAPGLPGQPGSPGEQGPRGPPGAIGPKGDRGFPGPLGEAGEKGERGPPGPAGSRGLPGVAGRPGAKGPEGPPGPTGRQGEKGEPGRPGDPAVVGPAVAGPKGEKGDVGPAGPRGATGVQGERGPPGLVLPGDPGPKGDPGDRGPIGLTGRAGPPGDSGPPGEKGDPGRPGPPGPVGPRGRDGEVGEKGDEGPPGDPGLPGKAGERGLRGAPGVRGPVGEKGDQGDPGEDGRNGSPGSSGPKGDRGEPGPPGPPGRLVDTGPGAREKGEPGDRGQEGPRGPKGDPGLPGAPGERGIEGFRGPPGPQGDPGVRGPAGEKGDRGPPGLDGRSGLDGKPGAAGPSGPNGAAGKAGDPGRDGLPGLRGEQGLPGPSGPPGLPGKPGEDGKPGLNGKNGEPGDPGEDGRKGEKGDSGASGREGRDGPKGERGAPGILGPQGPPGLPGPVGPPGQGFPGVPGGTGPKGDRGETGSKGEQGLPGERGLRGEPGSVPNVDRLLETAGIKASALREIVETWDESSGSFLPVPERRRGPKGDSGEQGPPGKEGPIGFPGERGLKGDRGDPGPQGPPGLALGERGPPGPSGLAGEPGKPGIPGLPGRAGGVGEAGRPGERGERGEKGERGEQGRDGPPGLPGTPGPPGPPGPKVSVDEPGPGLSGEQGPPGLKGAKGEPGSNGDQGPKGDRGVPGIKGDRGEPGPRGQDGNPGLPGERGMAGPEGKPGLQGPRGPPGPVGGHGDPGPPGAPGLAGPAGPQGPSGLKGEPGETGPPGRGLTGPTGAVGLPGPPGPSGLVGPQGSPGLPGQVGETGKPGAPGRDGASGKDGDRGSPGVPGSPGLPGPVGPKGEPGPTGAPGQAVVGLPGAKGEKGAPGGLAGDLVGEPGAKGDRGLPGPRGEKGEAGRAGEPGDPGEDGQKGAPGPKGFKGDPGVGVPGSPGPPGPPGVKGDLGLPGLPGAPGVVGFPGQTGPRGEMGQPGPSGERGLAGPPGREGIPGPLGPPGPPGSVGPPGASGLKGDKGDPGVGLPGPRGERGEPGIRGEDGRPGQEGPRGLTGPPGSRGERGEKGDVGSAGLKGDKGDSAVILGPPGPRGAKGDMGERGPRGLDGDKGPRGDNGDPGDKGSKGEPGDKGSAGLPGLRGLLGPQGQPGAAGIPGDPGSPGKDGVPGIRGEKGDVGFMGPRGLKGERGVKGACGLDGEKGDKGEAGPPGRPGLAGHKGEMGEPGVPGQSGAPGKEGLIGPKGDRGFDGQPGPKGDQGEKGERGTPGIGGFPGPSGNDGSAGPPGPPGSVGPRGPEGLQGQKGERGPPGERVVGAPGVPGAPGERGEQGRPGPAGPRGEKGEAALTEDDIRGFVRQEMSQHCACQGQFIASGSRPLPSYAADTAGSQLHAVPVLRVSHAEEEERVPPEDDEYSEYSEYSVEEYQDPEAPWDSDDPCSLPLDEGSCTAYTLRWYHRAVTGSTEACHPFVYGGCGGNANRFGTREACERRCPPRVVQSQGTGTAQD

SEQ ID NO: 14892 - protein, 2912 aa, Homo sapiens
MTLRLLVAALCAGILAEAPRVRAQHRERVTCTRLYAADIVFLLDGSSSIGRSNFREVRSFLEGLVLPFSGAASAQGVRFATVQYSDDPRTEFGLDALGSGGDVIRAIRELSYKGGNTRTGAAILHVADHVFLPQLARPGVPKVCILITDGKSQDLVDTAAQRLKGQGVKLFAVGIKNADPEELKRVASQPTSDFFFFVNDFSILRTLLPLVSRRVCTTAGGVPVTRPPDDSTSAPRDLVLSEPSSQSLRVQWTAASGPVTGYKVQYTPLTGLGQPLPSERQEVNVPAGETSVRLRGLRPLTEYQVTVIALYANSIGEAVSGTARTTALEGPELTIQNTTAHSLLVAWRSVPGATGYRVTWRVLSGGPTQQQELGPGQGSVLLRDLEPGTDYEVTVSTLFGRSVGPATSLMARTDASVEQTLRPVILGPTSILLSWNLVPEARGYRLEWRRETGLEPPQKVVLPSDVTRYQLDGLQPGTEYRLTLYTLLEGHEVATPATVVPTGPELPVSPVTDLQATELPGQRVRVSWSPVPGATQYRIIVRSTQGVERTLVLPGSQTAFDLDDVQAGLSYTVRVSARVGPREGSASVLTVRREPETPLAVPGLRVVVSDATRVRVAWGPVPGASGFRISWSTGSGPESSQTLPPDSTATDITGLQPGTTYQVAVSVLRGREEGPAAVIVARTDPLGPVRTVHVTQASSSSVTITWTRVPGATGYRVSWHSAHGPEKSQLVSGEATVAELDGLEPDTEYTVHVRAHVAGVDGPPASVVVRTAPEPVGRVSRLQILNASSDVLRITWVGVTGATAYRLAWGRSEGGPMRHQILPGNTDSAEIRGLEGGVSYSVRVTALVGDREGTPVSIVVTTPPEAPPALGTLHVVQRGEHSLRLRWEPVPRAQGFLLHWQPEGGQEQSRVLGPELSSYHLDGLEPATQYRVRLSVLGPAGEGPSAEVTARTESPRVPSIELRVVDTSIDSVTLAWTPVSRASSYILSWRPLRGPGQEVPGSPQTLPGISSSQRVTGLEPGVSYIFSLTPVLDGVRGPEASVTQTPVCPRGLADVVFLPHATQDNAHRAEATRRVLERLVLALGPLGPQAVQVGLLSYSHRPSPLFPLNGSHDLGIILQRIRDMPYMDPSGNNLGTAVVTAHRYMLAPDAPGRRQHVPGVMVLLVDEPLRGDIFSPIREAQASGLNVVMLGMAGADPEQLRRLAPGMDSVQTFFAVDDGPSLDQAVSGLATALCQASFTTQPRPEPCPVYCPKGQKGEPGEMGLRGQVGPPGDPGLPGRTGAPGPQGPPGSATAKGERGFPGADGRPGSPGRAGNPGTPGAPGLKGSPGLPGPRGDPGERGPRGPKGEPGAPGQVIGGEGPGLPGRKGDPGPSGPPGPRGPLGDPGPRGPPGLPGTAMKGDKGDRGERGPPGPGEGGIAPGEPGLPGLPGSPGPQGPVGPPGKKGEKGDSEDGAPGLPGQPGSPGEQGPRGPPGAIGPKGDRGFPGPLGEAGEKGERGPPGPAGSRGLPGVAGRPGAKGPEGPPGPTGRQGEKGEPGRPGDPAVVGPAVAGPKGEKGDVGPAGPRGATGVQGERGPPGLVLPGDPGPKGDPGDRGPIGLTGRAGPPGDSGPPGEKGDPGRPGPPGPVGPRGRDGEVGEKGDEGPPGDPGLPGKAGERGLRGAPGVRGPVGEKGDQGDPGEDGRNGSPGSSGPKGDRGEPGPPGPPGRLVDTGPGAREKGEPGDRGQEGPRGPKGDPGLPGAPGERGIEGFRGPPGPQGDPGVRGPAGEKGDRGPPGLDGRSGLDGKPGAAGPSGPNGAAGKAGDPGRDGLPGLRGEQGLPGPSGPPGLPGKPGEDGKPGLNGKNGEPGDPGEDGRKGEKGDSGASGREGFPGVPGGTGPKGDRGETGSKGEQGLPGERGLRGEPGSVPNVDRLLETAGIKASALREIVETWDESSGSFLPVPERRRGPKGDSGEQGPPGKEGPIGFPGERGLKGDRGDPGPQGPPGLALGERGPPGPSGLAGEPGKPGIPGLPGRAGGVGEAGRPGERGERGEKGERGEQGRDGPPGLPGTPGPPGPPGPKVSVDEPGPGLSGEQGPPGLKGAKGEPGSNGDQGPKGDRGVPGIKGDRGEPGPRGQDGNPGLPGERGMAGPEGKPGLQGPRGPPGPVGGHGDPGPPGAPGLAGPAGPQGPSGLKGEPGETGPPGRGLTGPTGAVGLPGPPGPSGLVGPQGSPGLPGQVGETGKPGAPGRDGASGKDGDRGSPGVPGSPGLPGPVGPKGEPGPTGAPGQAVVGLPGAKGEKGAPGGLAGDLVGEPGAKGDRGLPGPRGEKGEAGRAGEPGDPGEDGQKGAPGPKGFKGDPGVGVPGSPGPPGPPGVKGDLGLPGLPGAPGVVGFPGQTGPRGEMGQPGPSGERGLAGPPGREGIPGPLGPPGPPGSVGPPGASGLKGDKGDPGVGLPGPRGERGEPGIRGEDGRPGQEGPRGLTGPPGSRGERGEKGDVGSAGLKGDKGDSAVILGPPGPRGAKGDMGERGPRGLDGDKGPRGDNGDPGDKGSKGEPGDKGSAGLPGLRGLLGPQGQPGAAGIPGDPGSPGKDGVPGIRGEKGDVGFMGPRGLKGERGVKGACGLDGEKGDKGEAGPPGRPGLAGHKGEMGEPGVPGQSGAPGKEGLIGPKGDRGFDGQPGPKGDQGEKGERGTPGIGGFPGPSGNDGSAGPPGPPGSVGPRGPEGLQGQKGERGPPGERVVGAPGVPGAPGERGEQGRPGPAGPRGEKGEAALTEDDIRGFVRQEMSQHCACQGQFIASGSRPLPSYAADTAGSQLHAVPVLRVSHAEEEERVPPEDDEYSEYSEYSVEEYQDPEAPWDSDDPCSLPLDEGSCTAYTLRWYHRAVTGSTEACHPFVYGGCGGNANRFGTREACERRCPPRVVQSQGTGTAQD

SEQ ID NO: 14893 - protein, 684 aa, Homo sapiens
MAGPRACAPLLLLLLLGELLAAAGAQRVGLPGPPGPPGPPGKPGQDGIDGEAGPPGLPGPPGPKGAPGKPGKPGEAGLPGLPGVDGLTGRDGPPGPKGAPGERGSLGPPGPPGLGGKGLPGPPGEAGVSGPPGGIGLRGPPGPSGLPGLPGPPGPPGPPGHPGVLPEGATDLQCPSICPPGPPGPPGMPGFKGPTGYKGEQGEVGKDGEKGDPGPPGPAGLPGSVGLQGPRGLRGLPGPLGPPGDRGPIGFRGPPGIPGAPGKAGDRGERGPEGFRGPKGDLGRPGPKGTPGVAGPSGEPGMPGKDGQNGVPGLDGQKGEAGRNGAPGEKGPNGLPGLPGRAGSKGEKGERGRAGELGEAGPSGEPGVPGDAGMPGERGEAGHRGSAGALGPQGPPGAPGVRGFQGQKGSMGDPGLPGPQGLRGDVGDRGPGGAAGPKGDQGIAGSDGLPGDKGELGPSGLVGPKGESGSRGELGPKGTQGPNGTSGVQGVPGPPGPLGLQGVPGVPGITGKPGVPGKEASEQRIRELCGGMISEQIAQLAAHLRKPLAPGSIGRPGPAGPPGPPGPPGSIGHPGARGPPGYRGPTGELGDPGPRGNQGDRGDKGAAGAGLDGPEGDQGPQGPQGVPGTSKDGQDGAPGEPGPPGDPGLPGAIGAQGTPGICDTSACQGAVLGGVGEKSGSRSS

SEQ ID NO: 14894 - protein, 210 aa, Homo sapiens
MVADIKGNEQIEKYSWREACDTGSSRMDRKHGKYILNVEHSENQPPITHPNDQEAHSSICWCLPSNDITSDVSPNLTGVCVNPGILAHSRCLQSESCNTQVKEYCRNDWSMWKVFLACLLACVIMTAIGVLIICLVNNKGSANSSIVIQLSTNDGECVTVKPGTPSPACPPTMTTTSTVPASTATESTTSTATAATTSTEPITVAPTDHL

SEQ ID NO: 14895 - protein, 744 aa, Homo sapiens
MAVLPGPLQLLGVLLTISLSSIRLIQAGAYYGIKPLPPQIPPQMPPQIPQYQPLGQQVPHMPLAKDGLAMGKEMPHLQYGKEYPHLPQYMKEIQPAPRMGKEAVPKKGKEIPLASLRGEQGPRGEPGPRGPPGPPGLPGHGIPGIKGKPGPQGYPGVGKPGMPGMPGKPGAMGMPGAKGEIGQKGEIGPMGIPGPQGPPGPHGLPGIGKPGGPGLPGQPGPKGDRGPKGLPGPQGLRGPKGDKGFGMPGAPGVKGPPGMHGPPGPVGLPGVGKPGVTGFPGPQGPLGKPGAPGEPGPQGPIGVPGVQGPPGIPGIGKPGQDGIPGQPGFPGGKGEQGLPGLPGPPGLPGIGKPGFPGPKGDRGMGGVPGALGPRGEKGPIGAPGIGGPPGEPGLPGIPGPMGPPGAIGFPGPKGEGGIVGPQGPPGPKGEPGLQGFPGKPGFLGEVGPPGMRGLPGPIGPKGEAGQKGVPGLPGVPGLLGPKGEPGIPGDQGLQGPPGIPGIGGPSGPIGPPGIPGPKGEPGLPGPPGFPGIGKPGVAGLHGPPGKPGALGPQGQPGLPGPPGPPGPPGPPAVMPPTPPPQGEYLPDMGLGIDGVKPPHAYGAKKGKNGGPAYEMPAFTAELTAPFPPVGAPVKFNKLLYNGRQNYNPQTGIFTCEVPGVYYFAYHVHCKGGNVWVALFKNNEPVMYTYDEYKKGFLDQASGSAVLLLRPGDRVFLQMPSEQAAGLYAGQYVHSSFSGYLLYPM

SEQ ID NO: 14896 - protein, 260 aa, Homo sapiens
MRPEDRMFHIRAVILRALSLAFLLSLRGAGAIKADHVSTYAAFVQTHRPTGEFMFEFDEDEMFYVDLDKKETVWHLEEFGQAFSFEAQGGLANIAILNNNLNTLIQRSNHTQATNDPPEVTVFPKEPVELGQPNTLICHIDKFFPPVLNVTWLCNGELVTEGVAESLFLPRTDYSFHKFHYLTFVPSAEDFYDCRVEHWGLDQPLLKHWEAQEPIQMPETTETVLCALGLVLGLVGIIVGTVLIIKSLRSGHDPRAQGTL

SEQ ID NO: 14897 - protein, 674 aa, Homo sapiens
MWHEARKHERKLRGMMVDYKKRAERRREYYEKIKKDPAQFLQVHGRACKVHLDSAVALAAESPVNMMPWQGDTNNMIDRFDVRAHLDHIPDYTPPLLTTISPEQESDERKCNYERYRGLVQNDFAGISEEQCLYQIYIDELYGGLQRPSEDEKKKLAEKKASIGYTYEDSTVAKVEKAAEKPEEEESAAEEESNSDEDEVIPDIDVEVDVDELNQEQVADLNKQATTYGMADGDFVRMLRKDKEEAEAIKHAKALEEEKAMYSGRRSRRQRREFREKRLRGRKISPPSYARRDSPTYDPYKRSPSESSSESRSRSRSPTPGREEKITFITSFGGSDEEAAAAAAAAAASGVTTGKPPAPPQPGGPAPGRNASARRRSSSSSSSSSASRTSSSRSSSRSSSRSRRGGGYYRSGRHARSRSRSWSRSRSRSRRYSRSRSRGRRHSGGGSRDGHRYSRSPARRGGYGPRRRSRSRSHSGDRYRRGGRGLRHHSSSRSRSSWSLSPSRSRSLTRSRSHSPSPSQSRSRSRSRSQSPSPSPAREKLTRPAASPAVGEKLKKTEPAAGKETGAAKPKLTPQEKLKLRMQKALNRQFKADKKAAQEKMIQQEHERQEREDELRAMARKIRMKERERREKEREEWERQYSRQSRSPSPRYSREYSSSRRRSRSRSRSPHYRH

SEQ ID NO: 14898 - protein, 594 aa, Homo sapiens
MWHEARKHERKLRGMMVDYKKRAERRREYYEKIKKDPAQFLQVHGRACKVHLDSAVALAAESPVNMMPWQGDTNNMIDRFDVRAHLDHIPDYTPPLLTTISPEQESDERKCNYERYRGLVQNDFAGISEEQCLYQIYIDELYGGLQRPSEDEKKKLAEKKASIGYTYEDSTVAKVEKAAEKPEEEESAAEEESNSDEDEVIPDIDVEVDVDELNQEQVADLNKQATTYGMADGDFVRMLRKDKEEAEAIKHAKALEEEKAMYSGRRSRRQRREFREKRLRGRKISPPSYARRDSPTYDPYKRSPSESSSESRSRSRSPTPGREEKITFITSFGGSDEEAAAAAAAAAASGVTTGKPPAPPQPGGPAPGRNASARRRSSSSSSSSSASRTSSSRSSSRSSSRSRRGGGYYRSGRHARSRSRSWSRSRSRSRRYSRSRSRGRRHSGGGSRDGHRYSRSPARRGGYGPRRRSRSRSHSGDRYRRGGRGLRHHSSSRSRSSWSLSPSRSRSLTRSRSHSPSPSQSRSRSRSRSQSPSPSPAREKLTRPAASPAVGEKLKKTEPAAGKETGAAKVTQADASGEAETEDAEGAEQAVQGG

SEQ ID NO: 14899 - protein, 612 aa, Homo sapiens
MWHEARKHERKLRGMMVDYKKRAERRREYYEKIKKDPAQFLQESDERKCNYERYRGLVQNDFAGISEEQCLYQIYIDELYGGLQRPSEDEKKKLAEKKASIGYTYEDSTVAKVEKAAEKPEEEESAAEEESNSDEDEVIPDIDVEVDVDELNQEQVADLNKQATTYGMADGDFVRMLRKDKEEAEAIKHAKALEEEKAMYSGRRSRRQRREFREKRLRGRKISPPSYARRDSPTYDPYKRSPSESSSESRSRSRSPTPGREEKITFITSFGGSDEEAAAAAAAAAASGVTTGKPPAPPQPGGPAPGRNASARRRSSSSSSSSSASRTSSSRSSSRSSSRSRRGGGYYRSGRHARSRSRSWSRSRSRSRRYSRSRSRGRRHSGGGSRDGHRYSRSPARRGGYGPRRRSRSRSHSGDRYRRGGRGLRHHSSSRSRSSWSLSPSRSRSLTRSRSHSPSPSQSRSRSRSRSQSPSPSPAREKLTRPAASPAVGEKLKKTEPAAGKETGAAKPKLTPQEKLKLRMQKALNRQFKADKKAAQEKMIQQEHERQEREDELRAMARKIRMKERERREKEREEWERQYSRQSRSPSPRYSREYSSSRRRSRSRSRSPHYRH

SEQ ID NO: 14900 - protein, 591 aa, Homo sapiens
MKNSRTWAWRAPVELFLLCAALGCLSLPGSRGERPHSFGSNAVNKSFAKSRQMRSVDVTLMPIDCELSSWSSWTTCDPCQKKRYRYAYLLQPSQFHGEPCNFSDKEVEDCVTNRPCRSQVRCEGFVCAQTGRCVNRRLLCNGDNDCGDQSDEANCRRIYKKCQHEMDQYWGIGSLASGINLFTNSFEGPVLDHRYYAGGCSPHYILNTRFRKPYNVESYTPQTQGKYEFILKEYESYSDFERNVTEKMASKSGFSFGFKIPGIFELGISSQSDRGKHYIRRTKRFSHTKSVFLHARSDLEVAHYKLKPRSLMLHYEFLQRVKRLPLEYSYGEYRDLFRDFGTHYITEAVLGGIYEYTLVMNKEAMERGDYTLNNVHACAKNDFKIGGAIEEVYVSLGVSVGKCRGILNEIKDRNKRDTMVEDLVVLVRGGASEHITTLAYQELPTADLMQEWGDAVQYNPAIIKVKVEPLYELVTATDFAYSSTVRQNMKQALEEFQKEVSSCHCAPCQGNGVPVLKGSRCDCICPVGSQGLACEVSYRKNTPIDGKWNCWSNWSSCSGRRKTRQRQCNNPPPQNGGSPCSGPASETLDCS

SEQ ID NO: 14901 - protein, 1107 aa, Homo sapiens
MDGKRRPGPGPGVPPKRARGGLWDDDDAPRPSQFEEDLALMEEMEAEHRLQEQEEEELQSVLEGVADGQVPPSAIDPRWLRPTPPALDPQTEPLIFQQLEIDHYVGPAQPVPGGPPPSRGSVPVLRAFGVTDEGFSVCCHIHGFAPYFYTPAPPGFGPEHMGDLQRELNLAISRDSRGGRELTGPAVLAVELCSRESMFGYHGHGPSPFLRITVALPRLVAPARRLLEQGIRVAGLGTPSFAPYEANVDFEIRFMVDTDIVGCNWLELPAGKYALRLKEKATQCQLEADVLWSDVVSHPPEGPWQRIAPLRVLSFDIECAGRKGIFPEPERDPVIQICSLGLRWGEPEPFLRLALTLRPCAPILGAKVQSYEKEEDLLQAWSTFIRIMDPDVITGYNIQNFDLPYLISRAQTLKVQTFPFLGRVAGLCSNIRDSSFQSKQTGRRDTKVVSMVGRVQMDMLQVLLREYKLRSYTLNAVSFHFLGEQKEDVQHSIITDLQNGNDQTRRRLAVYCLKDAYLPLRLLERLMVLVNAVEMARVTGVPLSYLLSRGQQVKVVSQLLRQAMHEGLLMPVVKSEGGEDYTGATVIEPLKGYYDVPIATLDFSSLYPSIMMAHNLCYTTLLRPGTAQKLGLTEDQFIRTPTGDEFVKTSVRKGLLPQILENLLSARKRAKAELAKETDPLRRQVLDGRQLALKVSANSVYGFTGAQVGKLPCLEISQSVTGFGRQMIEKTKQLVESKYTVENGYSTSAKVVYGDTDSVMCRFGVSSVAEAMALGREAADWVSGHFPSPIRLEFEKVYFPYLLISKKRYAGLLFSSRPDAHDRMDCKGLEAVRRDNCPLVANLVTASLRRLLIDRDPEGAVAHAQDVISDLLCNRIDISQLVITKELTRAASDYAGKQAHVELAERMRKRDPGSAPSLGDRVPYVIISAAKGVAAYMKSEDPLFVLEHSLPIDTQYYLEQQLAKPLLRIFEPILGEGRAEAVLLRGDHTRCKTVLTGKVGGLLAFAKRRNCCIGCRTVLSHQGAVCEFCQPRESELYQKEVSHLNALEERFSRLWTQCQRCQGSLHEDVICTSRDCPIFYMRKKVRKDLEDQEQLLRRFGPPGPEAW

SEQ ID NO: 14902 - protein, 251 aa, Homo sapiens
MGRPLEGQPLRALDLYPEPAFLRSGKDPKSSPASSPSFAVLGPEVRSTGGQAGSRRRPSAPCSQDRAAAEGAPALLGGSPSSGSPGHPPGSAFGVEAGCRALNVSEHARGGFALGLPFGLSGGAYLFLLLDGAGDPKPTPEAPISSADGRAWFPSESSWQLPQLPAGSTSGSEPRARPGLGPRQLLTGPRDGAAGQGPGRGLTARLGREREIDCGPRQAGHGGTATDTGRAGSGARHRPPRDRGTPGLRTH

SEQ ID NO: 14903 - protein, 1142 aa, Homo sapiens
MRLTGPWKLWLWMSIFLLPASTSVTVRDKTEESCPILRIEGHQLTYDNINKLEVSGFDLGDSFSLRRAFCESDKTCFKLGSALLIRDTIKIFPKGLPEEYSVAAMFRVRRNAKKERWFLWQVLNQQNIPQISIVVDGGKKVVEFMFQATEGDVLNYIFRNRELRPLFDRQWHKLGISIQSQVISLYMDCNLIARRQTDEKDTVDFHGRTVIATRASDGKPVDIELHQLKIYCSANLIAQETCCEISDTKCPEQDGFGNIASSWVTAHASKMSSYLPAKQELKDQCQCIPNKGEAGLPGAPGSPGQKGHKGEPGENGLHGAPGFPGQKGEQGFEGSKGETGEKGEQGEKGDPALAGLNGENGLKGDLGPHGPPGPKGEKGDTGPPGPPALPGSLGIQGPQGPPGKEGQRGRRGKTGPPGKPGPPGPPGPPGIQGIHQTLGGYYNKDNKGNDEHEAGGLKGDKGETGLPGFPGSVGPKGQKGEPGEPFTKGEKGDRGEPGVIGSQGVKGEPGDPGPPGLIGSPGLKGQQGSAGSMGPRGPPGDVGLPGEHGIPGKQGIKGEKGDPGGIIGPPGLPGPKGEAGPPGKSLPGEPGLDGNPGAPGPRGPKGERGLPGVHGSPGDIGPQGIGIPGRTGAQGPAGEPGIQGPRGLPGLPGTPGTPGNDGVPGRDGKPGLPGPPGDPIALPLLGDIGALLKNFCGNCQASVPGLKSNKGEEGGAGEPGKYDSMARKGDIGPRGPPGIPGREGPKGSKGERGYPGIPGEKGDEGLQGIPGIPGAPGPTGPPGLMGRTGHPGPTGAKGEKGSDGPPGKPGPPGPPGIPFNERNGMSSLYKIKGGVNVPSYPGPPGPPGPKGDPGPVGEPGAMGLPGLEGFPGVKGDRGPAGPPGIAGMSGKPGAPGPPGVPGEPGERGPVGDIGFPGPEGPSGKPGINGKDGIPGAQGIMGKPGDRGPKGERGDQGIPGDRGSQGERGKPGLTGMKGAIGPMGPPGNKGSMGSPGHQGPPGSPGIPGIPADAVSFEEIKKYINQEVLRIFEERMAVFLSQLKLPAAMLAAQAYGRPGPPGKDGLPGPPGDPGPQGYRGQKGERGEPGIGLPGSPGLPGTSALGLPGSPGAPGPQGPPGPSGRCNPEDCLYPVSHAHQRTGGN

SEQ ID NO: 14904 - protein, 107 aa, Homo sapiens
MGRKRLITDSYPVVKRREGPAGHSKGELAPELGEEPQPRDEEEAELELLRQFDLAWQYGPCTGITRLQRWCRAKQMGLEPPPEVWQVLKTHPGDPRFQCSLWHLYPL

SEQ ID NO: 14905 - protein, 79 aa, Homo sapiens
MGRKRLITDSYPVVKRREGPAGHSKGELAPELGEEPQPRDEEEAELELLRQFDLAWQYGPCTVSGISIPYEAPRKTSCP

SEQ ID NO: 14906 - protein, 584 aa, Homo sapiens
MFAKAFRVKSNTAIKGSDRRKLRADVTTAFPTLGTDQVSELVPGKEELNIVKLYAHKGDAVTVYVSGGNPILFELEKNLYPTVYTLWSYPDLLPTFTTWPLVLEKLVGGADLMLPGLVMPPAGLPQVQKGDLCAISLVGNRAPVAIGVAAMSTAEMLTSGLKGRGFSVLHTYQDHLWRSGNKSSPPSIAPLALDSADLSEEKGSVQMDSTLQGDMRHMTLEGEEENGEVHQAREDKSLSEAPEDTSTRGLNQDSTDSKTLQEQMDELLQQCFLHALKCRVKKADLPLLTSTFLGSHMFSCCPEGRQLDIKKSSYKKLSKFLQQMQQEQIIQVKELSKGVESIVAVDWKHPRITSFVIPEPSPTSQTIQEGSREQPYHPPDIKPLYCVPASMTLLFQESGHKKGSFLEGSEVRTIVINYAKKNDLVDADNKNLVRLDPILCDCILEKNEQHTVMKLPWDSLLTRCLEKLQPAYQVTLPGQEPIVKKGRICPIDITLAQRASNKKVTVVRNLEAYGLDPYSVAAILQQRCQASTTVNPAPGAKDSLQVQIQGNQVHHLGWLLLEEYQLPRKHIQGLEKALKPGKKK

SEQ ID NO: 14907 - protein, 460 aa, Homo sapiens
MFAKAFRVKSNTAIKGSDRRKLRADVTTAFPTLGTDQVSELVPGKEELNIVKLYAHKGDAVTVYVSGGNPILFELEKNLYPTVYTLWSYPDLLPTFTTWPLVLEKLVGGADLMLPGLVMPPAGLPQVQKGDLCAISLVGNRAPVAIGVAAMSTAEMLTSGLKGRGFSVLHTYQDHLCPEGRQLDIKKSSYKKLSKFLQQMQQEQIIQVKELSKGVESIVAVDWKHPRITSFVIPEPSPTSQTIQEGSREQPYHPPDIKPLYCVPASMTLLFQESGHKKGSFLEGSEVRTIVINYAKKNDLVDADNKNLVRLDPILCDCILEKNEQHTVMKLPWDSLLTRCLEKLQPAYQVTLPGQEPIVKKGRICPIDITLAQRASNKKVTVVRNLEAYGLDPYSVAAILQQRCQASTTVNPAPGAKDSLQVQIQGNQVHHLGWLLLEEYQLPRKHIQGLEKALKPGKKK

SEQ ID NO: 14908 - protein, 1053 aa, Homo sapiens
MWQPRRPWPRVPWRWALALLALVGAGLCHAGPQPGYPARPSARNKNWCAYIVNKNVSCSVLEGSESFIQAQYNCAWNQMPCPSALVYRVNFRPRYVTRYKTVTQLEWRCCPGFRGGDCQEGPKDPVKTLRPTPARPRNSLKKATDNEPSQFSEPRKTLSPTGTAQPSWGVDPKEGPQELQEKKIQVLEEKVLRLTRTVLDLQSSLAGVSENLKHATQDDASRTRAPGLSSQHPKPDTTVSGDTETGQSPGVFNTKESGMKDIKSELAEVKDTLKNKSDKLEELDGKVKGYEGQLRQLQEAAQGPTVTMTTNELYQAYVDSKIDALREELMEGMDRKLADLKNSCEYKLTGLQQQCDDYGSSYLGVIELIGEKETSLRKEINNLRARLQEPSAQANCCDSEKNGDIGQQIKTLDQKIERVAEATRMLNGRLDNEFDRLIVPEPDVDFDAKWNELDARINVTEKNAEEHCFYIEETLRGAINGEVGDLKQLVDQKIQSLEDRLGSVLLQMTNNTGAELSPPGAAALPGVSGSGDERVMMELNHLKDKVQVVEDICLLNIQGKPHGMEGALPNREDRAVRDSLHLLKSLNDTMHRKFQETEQTIQKLQQDFSFLYSQLNHTENDVTHLQKEMSNCRAGENAGMGRFTKVGEQERTVDTLPSPQHPVAHCCSQLEERWQRLQSQVISELDACKECTQGVQREVSMVEGRVSHMEKTCSKLDSISGNLQRIKEGLNKHVSSLWNCVRQMNGTLRSHSRDISGLKNSVQQFYSHVFQISTDLQDLVKFQPSAKAPSPPPPAEAPKEPLQPEPAPPRPSGPATAEDPGRRPVLPQRPPEERPPQPPGSTGVIAETGQAGPPAGAGVSGRGLPRGVDGQTGSGTVPGAEGFAGAPGYPKSPPVASPGAPVPSLVSFSAGLTQKPFPSDGGVVLFNKVLVNDGDVYNPSTGVFTAPYDGRYLITATLTPERDAYVEAVLSVSNASVAQLHTAGYRREFLEYHRPPGALHTCGGPGAFHLIVHLKAGDAVNVVVTGGKLAHTDFDEMYSTFSGVFLYPFLSHL

SEQ ID NO: 14909 - protein, 490 aa, Homo sapiens
MALLLLLFLGLLGLWGLLCACAQDPSPAARWPPGPRPLPLVGNLHLLRLSQQDRSLMELSERYGPVFTVHLGRQKTVVLTGFEAVKEALAGPGQELADRPPIAIFQLIQRGGGIFFSSGARWRAARQFTVRALHSLGVGREPVADKILQELKCLSGQLDGYRGRPFPLALLGWAPSNITFALLFGRRFDYRDPVFVSLLGLIDEVMVLLGSPGLQLFNVYPWLGALLQLHRPVLRKIEEVRAILRTLLEARRPHVCPGDPVCSYVDALIQQGQGDDPEGLFAEANAVACTLDMVMAGTETTSATLQWAALLMGRHPDVQGRVQEELDRVLGPGRTPRLEDQQALPYTSAVLHEVQRFITLLPHVPRCTAADTQLGGFLLPKGTPVIPLLTSVLLDETQWQTPGQFNPGHFLDANGHFVKREAFLPFSAGRRVCVGERLARTELFLLFAGLLQRYRLLPPPGVSPASLDTTPARAFTMRPRAQALCAVPRP

SEQ ID NO: 14910 - protein, 121 aa, Homo sapiens
MMLPQWLLLLFLLFFFLFLLTRGSLSPTKYNLLELKESCIRNQDCETGCCQRAPDNCESHCAEKGSEGSLCQTQVFFGQYRACPCLRNLTCIYSKNEKWLSIAYGRCQKIGRQKLAKKMFF

SEQ ID NO: 14911 - protein, 3063 aa, Homo sapiens
MRSRLPPALAALGAALLLSSIEAEVDPPSDLNFKIIDENTVHMSWAKPVDPIVGYRITVDPTTDGPTKEFTLSASTTETLLSELVPETEYVVTITSYDEVEESVPVIGQLTIQTGSSTKPVEKKPGKTEIQKCSVSAWTDLVFLVDGSWSVGRNNFKYILDFIAALVSAFDIGEEKTRVGVVQYSSDTRTEFNLNQYYQRDELLAAIKKIPYKGGNTMTGDAIDYLVKNTFTESAGARVGFPKVAIIITDGKSQDEVEIPARELRNVGVEVFSLGIKAADAKELKQIASTPSLNHVFNVANFDAIVDIQNEIISQVCSGVDEQLGELVSGEEVVEPPSNLIAMEVSSKYVKLNWNPSPSPVTGYKVILTPMTAGSRQHALSVGPQTTTLSVRDLSADTEYQISVSAMKGMTSSEPISIMEKTQPMKVQVECSRGVDIKADIVFLVDGSYSIGIANFVKVRAFLEVLVKSFEISPNRVQISLVQYSRDPHTEFTLKKFTKVEDIIEAINTFPYRGGSTNTGKAMTYVREKIFVPSKGSRSNVPKVMILITDGKSSDAFRDPAIKLRNSDVEIFAVGVKDAVRSELEAIASPPAETHVFTVEDFDAFQRISFELTQSICLRIEQELAAIKKKAYVPPKDLSFSEVTSYGFKTNWSPAGENVFSYHITYKEAAGDDEVTVVEPASSTSVVLSSLKPETLYLVNVTAEYEDGFSIPLAGEETTEEVKGAPRNLKVTDETTDSFKITWTQAPGRVLRYRIIYRPVAGGESREVTTPPNQRRRTLENLIPDTKYEVSVIPEYFSGPGTPLTGNAATEEVRGNPRDLRVSDPTTSTMKLSWSGAPGKVKQYLVTYTPVAGGETQEVTVRGDTTNTVLQGLKEGTQYALSVTALYASGAGDALFGEGTTLEERGSPQDLVTKDITDTSIGAYWTSAPGMVRGYRVSWKSLYDDVDTGEKNLPEDAIHTMIENLQPETKYRISVFATYSSGEGEPLTGDATTELSQDSKTLKVDEETENTMRVTWKPAPGKVVNYRVVYRPHGRGKQMVAKVPPTVTSTVLKRLQPQTTYDITVLPIYKMGEGKLRQGSGTTASRFKSPRNLKTSDPTMSSFRVTWEPAPGEVKGYKVTFHPTGDDRRLGELVVGPYDNTVVLEELRAGTTYKVNVFGMFDGGESSPLVGQEMTTLSDTTVMPILSSGMECLTRAEADIVLLVDGSWSIGRANFRTVRSFISRIVEVFDIGPKRVQIALAQYSGDPRTEWQLNAHRDKKSLLQAVANLPYKGGNTLTGMALNFIRQQNFRTQAGMRPRARKIGVLITDGKSQDDVEAPSKKLKDEGVELFAIGIKNADEVELKMIATDPDDTHAYNVADFESLSRIVDDLTINLCNSVKGPGDLEAPSNLVISERTHRSFRVSWTPPSDSVDRYKVEYYPVSGGKRQEFYVSRMETSTVLKDLKPETEYVVNVYSVVEDEYSEPLKGTEKTLPVPVVSLNIYDVGPTTMHVQWQPVGGATGYILSYKPVKDTEPTRPKEVRLGPTVNDMQLTDLVPNTEYAVTVQAVLHDLTSEPVTVREVTLPLPRPQDLKLRDVTHSTMNVFWEPVPGKVRKYIVRYKTPEEDVKEVEVDRSETSTSLKDLFSQTLYTVSVSAVHDEGESPPVTAQETTRPVPAPTNLKITEVTSEGFRGTWDHGASDVSLYRITWAPFGSSDKMETILNGDENTLVFENLNPNTIYEVSITAIYPDESESDDLIGSERTLPILTTQAPKSGPRNLQVYNATSNSLTVKWDPASGRVQKYRITYQPSTGEGNEQTTTIGGRQNSVVLQKLKPDTPYTITVSSLYPDGEGGRMTGRGKTKPLNTVRNLRVYDPSTSTLNVRWDHAEGNPRQYKLFYAPAAGGPEELVPIPGNTNYAILRNLQPDTSYTVTVVPVYTEGDGGRTSDTGRTLMRGLARNVQVYNPTPNSLDVRWDPAPGPVLQYRVVYSPVDGTRPSESIVVPGNTRMVHLERLIPDTLYSVNLVALYSDGEGNPSPAQGRTLPRSGPRNLRVFGETTNSLSVAWDHADGPVQQYRIIYSPTVGDPIDEYTTVPGRRNNVILQPLQPDTPYKITVIAVYEDGDGGHLTGNGRTVGLLPPQNIHISDEWYTRFRVSWDPSPSPVLGYKIVYKPVGSNEPMEAFVGEMTSYTLHNLNPSTTYDVNVYAQYDSGLSVPLTDQGTTLYLNVTDLKTYQIGWDTFCVKWSPHRAATSYRLKLSPADGTRGQEITVRGSETSHCFTGLSPDTDYGVTVFVQTPNLEGPGVSVKEHTTVKPTEAPTEPPTPPPPPTIPPARDVCKGAKADIVFLTDASWSIGDDNFNKVVKFIFNTVGGFDEISPAGIQVSFVQYSDEVKSEFKLNTYNDKALALGALQNIRYRGGNTRTGKALTFIKEKVLTWESGMRKNVPKVLVVVTDGRSQDEVKKAALVIQQSGFSVFVVGVADVDYNELANIASKPSERHVFIVDDFESFEKIEDNLITFVCETATSSCPLIYLDGYTSPGFKMLEAYNLTEKNFASVQGVSLESGSFPSYSAYRIQKNAFVNQPTADLHPNGLPPSYTIILLFRLLPETPSDPFAIWQITDRDYKPQVGVIADPSSKTLSFFNKDTRGEVQTVTFDTEEVKTLFYGSFHKVHIVVTSKSVKIYIDCYEIIEKDIKEAGNITTDGYEILGKLLKGERKSAAFQIQSFDIVCSPVWTSRDRCCDIPSRRDEGKCPAFPNSCTCTQDSVGPPGPPGPAGGPGAKGPRGERGISGAIGPPGPRGDIGPPGPQGPPGPQGPNGLSIPGEQGRQGMKGDAGEPGLPGRTGTPGLPGPPGPMGPPGDRGFTGKDGAMGPRGPPGPPGSPGSPGVTGPSGKPGKPGDHGRPGPSGLKGEKGDRGDIASQNMMRAVARQVCEQLISGQMNRFNQMLNQIPNDYQSSRNQPGPPGPPGPPGSAGARGEPGPGGRPGFPGTPGMQGPPGERGLPGEKGERGTGSSGPRGLPGPPGPQGESRTGPPGSTGSRGPPGPPGRPGNSGIRGPPGPPGYCDSSQCASIPYNGQGYPGSG

SEQ ID NO: 14912 - protein, 1899 aa, Homo sapiens
MRSRLPPALAALGAALLLSSIEAEGMECLTRAEADIVLLVDGSWSIGRANFRTVRSFISRIVEVFDIGPKRVQIALAQYSGDPRTEWQLNAHRDKKSLLQAVANLPYKGGNTLTGMALNFIRQQNFRTQAGMRPRARKIGVLITDGKSQDDVEAPSKKLKDEGVELFAIGIKNADEVELKMIATDPDDTHAYNVADFESLSRIVDDLTINLCNSVKGPGDLEAPSNLVISERTHRSFRVSWTPPSDSVDRYKVEYYPVSGGKRQEFYVSRMETSTVLKDLKPETEYVVNVYSVVEDEYSEPLKGTEKTLPVPVVSLNIYDVGPTTMHVQWQPVGGATGYILSYKPVKDTEPTRPKEVRLGPTVNDMQLTDLVPNTEYAVTVQAVLHDLTSEPVTVREVTLPLPRPQDLKLRDVTHSTMNVFWEPVPGKVRKYIVRYKTPEEDVKEVEVDRSETSTSLKDLFSQTLYTVSVSAVHDEGESPPVTAQETTRPVPAPTNLKITEVTSEGFRGTWDHGASDVSLYRITWAPFGSSDKMETILNGDENTLVFENLNPNTIYEVSITAIYPDESESDDLIGSERTLPILTTQAPKSGPRNLQVYNATSNSLTVKWDPASGRVQKYRITYQPSTGEGNEQTTTIGGRQNSVVLQKLKPDTPYTITVSSLYPDGEGGRMTGRGKTKPLNTVRNLRVYDPSTSTLNVRWDHAEGNPRQYKLFYAPAAGGPEELVPIPGNTNYAILRNLQPDTSYTVTVVPVYTEGDGGRTSDTGRTLMRGLARNVQVYNPTPNSLDVRWDPAPGPVLQYRVVYSPVDGTRPSESIVVPGNTRMVHLERLIPDTLYSVNLVALYSDGEGNPSPAQGRTLPRSGPRNLRVFGETTNSLSVAWDHADGPVQQYRIIYSPTVGDPIDEYTTVPGRRNNVILQPLQPDTPYKITVIAVYEDGDGGHLTGNGRTVGLLPPQNIHISDEWYTRFRVSWDPSPSPVLGYKIVYKPVGSNEPMEAFVGEMTSYTLHNLNPSTTYDVNVYAQYDSGLSVPLTDQGTTLYLNVTDLKTYQIGWDTFCVKWSPHRAATSYRLKLSPADGTRGQEITVRGSETSHCFTGLSPDTDYGVTVFVQTPNLEGPGVSVKEHTTVKPTEAPTEPPTPPPPPTIPPARDVCKGAKADIVFLTDASWSIGDDNFNKVVKFIFNTVGGFDEISPAGIQVSFVQYSDEVKSEFKLNTYNDKALALGALQNIRYRGGNTRTGKALTFIKEKVLTWESGMRKNVPKVLVVVTDGRSQDEVKKAALVIQQSGFSVFVVGVADVDYNELANIASKPSERHVFIVDDFESFEKIEDNLITFVCETATSSCPLIYLDGYTSPGFKMLEAYNLTEKNFASVQGVSLESGSFPSYSAYRIQKNAFVNQPTADLHPNGLPPSYTIILLFRLLPETPSDPFAIWQITDRDYKPQVGVIADPSSKTLSFFNKDTRGEVQTVTFDTEEVKTLFYGSFHKVHIVVTSKSVKIYIDCYEIIEKDIKEAGNITTDGYEILGKLLKGERKSAAFQIQSFDIVCSPVWTSRDRCCDIPSRRDEGKCPAFPNSCTCTQDSVGPPGPPGPAGGPGAKGPRGERGISGAIGPPGPRGDIGPPGPQGPPGPQGPNGLSIPGEQGRQGMKGDAGEPGLPGRTGTPGLPGPPGPMGPPGDRGFTGKDGAMGPRGPPGPPGSPGSPGVTGPSGKPGKPGDHGRPGPSGLKGEKGDRGDIASQNMMRAVARQVCEQLISGQMNRFNQMLNQIPNDYQSSRNQPGPPGPPGPPGSAGARGEPGPGGRPGFPGTPGMQGPPGERGLPGEKGERGTGSSGPRGLPGPPGPQGESRTGPPGSTGSRGPPGPPGRPGNSGIRGPPGPPGYCDSSQCASIPYNGQGYPGSG

SEQ ID NO: 14913 - protein, 2987 aa, Homo sapiens
MRSRLPPALAALGAALLLSSIEAEVDPPSDLNFKIIDENTVHMSWAKPVDPIVGYRITVDPTTDGPTKEFTLSASTTETLLSELVPETEYVVTITSYDEVEESVPVIGQLTIQTGSSTKPVEKKPGKTEIQKCSVSAWTDLVFLVDGSWSVGRNNFKYILDFIAALVSAFDIGEEKTRVGVVQYSSDTRTEFNLNQYYQRDELLAAIKKIPYKGGNTMTGDAIDYLVKNTFTESAGARVGFPKVAIIITDGKSQDEVEIPARELRNVGVEVFSLGIKAADAKELKQIASTPSLNHVFNVANFDAIVDIQNEIISQVCSGVDEQLGELVSGEEVVEPPSNLIAMEVSSKYVKLNWNPSPSPVTGYKVILTPMTAGSRQHALSVGPQTTTLSVRDLSADTEYQISVSAMKGMTSSEPISIMEKTQPMKVQVECSRGVDIKADIVFLVDGSYSIGIANFVKVRAFLEVLVKSFEISPNRVQISLVQYSRDPHTEFTLKKFTKVEDIIEAINTFPYRGGSTNTGKAMTYVREKIFVPSKGSRSNVPKVMILITDGKSSDAFRDPAIKLRNSDVEIFAVGVKDAVRSELEAIASPPAETHVFTVEDFDAFQRISFELTQSICLRIEQELAAIKKKAYVPPKDLSFSEVTSYGFKTNWSPAGENVFSYHITYKEAAGDDEVTVVEPASSTSVVLSSLKPETLYLVNVTAEYEDGFSIPLAGEETTEEVKGAPRNLKVTDETTDSFKITWTQAPGRVLRYRIIYRPVAGGESREVTTPPNQRRRTLENLIPDTKYEVSVIPEYFSGPGTPLTGNAATEEVRGNPRDLRVSDPTTSTMKLSWSGAPGKVKQYLVTYTPVAGGETQEVTVRGDTTNTVLQGLKEGTQYALSVTALYASGAGDALFGEGTTLEERGSPQDLVTKDITDTSIGAYWTSAPGMVRGYRVSWKSLYDDVDTGEKNLPEDAIHTMIENLQPETKYRISVFATYSSGEGEPLTGDATTELSQDSKTLKVDEETENTMRVTWKPAPGKVVNYRVVYRPHGRGKQMVAKVPPTVTSTVLKRLQPQTTYDITVLPIYKMGEGKLRQGSGTTASRFKSPRNLKTSDPTMSSFRVTWEPAPGEVKGYKVTFHPTGDDRRLGELVVGPYDNTVVLEELRAGTTYKVNVFGMFDGGESSPLVGQEMTTLSDTTVMPILSSGMECLTRAEADIVLLVDGSWSIGRANFRTVRSFISRIVEVFDIGPKRVQIALAQYSGDPRTEWQLNAHRDKKSLLQAVANLPYKGGNTLTGMALNFIRQQNFRTQAGMRPRARKIGVLITDGKSQDDVEAPSKKLKDEGVELFAIGIKNADEVELKMIATDPDDTHAYNVADFESLSRIVDDLTINLCNSVKGPGDLEAPSNLVISERTHRSFRVSWTPPSDSVDRYKVEYYPVSGGKRQEFYVSRMETSTVLKDLKPETEYVVNVYSVVEDEYSEPLKGTEKTLPVPVVSLNIYDVGPTTMHVQWQPVGGATGYILSYKPVKDTEPTRPKEVRLGPTVNDMQLTDLVPNTEYAVTVQAVLHDLTSEPVTVREVTLPLPRPQDLKLRDVTHSTMNVFWEPVPGKVRKYIVRYKTPEEDVKEVEVDRSETSTSLKDLFSQTLYTVSVSAVHDEGESPPVTAQETTRPVPAPTNLKITEVTSEGFRGTWDHGASDVSLYRITWAPFGSSDKMETILNGDENTLVFENLNPNTIYEVSITAIYPDESESDDLIGSERTLPILTTQAPKSGPRNLQVYNATSNSLTVKWDPASGRVQKYRITYQPSTGEGNEQTTTIGGRQNSVVLQKLKPDTPYTITVSSLYPDGEGGRMTGRGKTKPLNTVRNLRVYDPSTSTLNVRWDHAEGNPRQYKLFYAPAAGGPEELVPIPGNTNYAILRNLQPDTSYTVTVVPVYTEGDGGRTSDTGRTLMRGLARNVQVYNPTPNSLDVRWDPAPGPVLQYRVVYSPVDGTRPSESIVVPGNTRMVHLERLIPDTLYSVNLVALYSDGEGNPSPAQGRTLPRSGPRNLRVFGETTNSLSVAWDHADGPVQQYRIIYSPTVGDPIDEYTTVPGRRNNVILQPLQPDTPYKITVIAVYEDGDGGHLTGNGRTVGLLPPQNIHISDEWYTRFRVSWDPSPSPVLGYKIVYKPVGSNEPMEAFVGEMTSYTLHNLNPSTTYDVNVYAQYDSGLSVPLTDQGTTLYLNVTDLKTYQIGWDTFCVKWSPHRAATSYRLKLSPADGTRGQEITVRGSETSHCFTGLSPDTDYGVTVFVQTPNLEGPGVSVKEHTTVKPTEAPTEPPTPPPPPTIPPARDVCKGAKADIVFLTDASWSIGDDNFNKVVKFIFNTVGGFDEISPAGIQVSFVQYSDEVKSEFKLNTYNDKALALGALQNIRYRGGNTRTGKALTFIKEKVLTWESGMRKNVPKVLVVVTDGRSQDEVKKAALVIQQSGFSVFVVGVADVDYNELANIASKPSERHVFIVDDFESFEKIEDNLITFVCETATSSCPLIYLDGYTSPGFKMLEAYNLTEKNFASVQGVSLESGSFPSYSAYRIQKNAFVNQPTADLHPNGLPPSYTIILLFRLLPETPSDPFAIWQITDRDYKPQVGVIADPSSKTLSFFNKDTRGEVQTVTFDTEEVKTLFYGSFHKRDEGKCPAFPNSCTCTQDSVGPPGPPGPAGGPGAKGPRGERGISGAIGPPGPRGDIGPPGPQGPPGPQGPNGLSIPGEQGRQGMKGDAGEPGLPGRTGTPGLPGPPGPMGPPGDRGFTGKDGAMGPRGPPGPPGSPGSPGVTGPSGKPGKPGDHGRPGPSGLKGEKGDRGDIASQNMMRAVARQVCEQLISGQMNRFNQMLNQIPNDYQSSRNQPGPPGPPGPPGSAGARGEPGPGGRPGFPGTPGMQGPPGERGLPGEKGERGTGSSGPRGLPGPPGPQGESRTGPPGSTGSRGPPGPPGRPGNSGIRGPPGPPGYCDSSQCASIPYNGQGYPGSG

SEQ ID NO: 14914 - protein, 836 aa, Homo sapiens
MARLGNCSLTWAALIILLLPGSLEECGHISVSAPIVHLGDPITASCIIKQNCSHLDPEPQILWRLGAELQPGGRQQRLSDGTQESIITLPHLNHTQAFLSCCLNWGNSLQILDQVELRAGYPPAIPHNLSCLMNLTTSSLICQWEPGPETHLPTSFTLKSFKSRGNCQTQGDSILDCVPKDGQSHCCIPRKHLLLYQNMGIWVQAENALGTSMSPQLCLDPMDVVKLEPPMLRTMDPSPEAAPPQAGCLQLCWEPWQPGLHINQKCELRHKPQRGEASWALVGPLPLEALQYELCGLLPATAYTLQIRCIRWPLPGHWSDWSPSLELRTTERAPTVRLDTWWRQRQLDPRTVQLFWKPVPLEEDSGRIQGYVVSWRPSGQAGAILPLCNTTELSCTFHLPSEAQEVALVAYNSAGTSRPTPVVFSESRGPALTRLHAMARDPHSLWVGWEPPNPWPQGYVIEWGLGPPSASNSNKTWRMEQNGRATGFLLKENIRPFQLYEIIVTPLYQDTMGPSQHVYAYSQEMAPSHAPELHLKHIGKTWAQLEWVPEPPELGKSPLTHYTIFWTNAQNQSFSAILNASSRGFVLHGLEPASLYHIHLMAASQAGATNSTVLTLMTLTPEGSELHIILGLFGLLLLLTCLCGTAWLCCSPNRKNPLWPSVPDPAHSSLGSWVPTIMEEDAFQLPGLGTPPITKLTVLEEDEKKPVPWESHNSSETCGLPTLVQTYVLQGDPRAVSTQPQSQSGTSDQVLYGQLLGSPTSPGPGHYLRCDSTQPLLAGLTPSPKSYENLWFQASPLGTLVTPAPSQEDDCVFGPLLNFPLLQGIRVHGMEALGSF

SEQ ID NO: 14915 - protein, 771 aa, Homo sapiens
MARLGNCSLTWAALIILLLPGSLEECGHISVSAPIVHLGDPITASCIIKQNCSHLDPEPQILWRLGAELQPGGRQQRLSDGTQESIITLPHLNHTQAFLSCCLNWGNSLQILDQVELRAGYPPAIPHNLSCLMNLTTSSLICQWEPGPETHLPTSFTLKSFKSRGNCQTQGDSILDCVPKDGQSHCCIPRKHLLLYQNMGIWVQAENALGTSMSPQLCLDPMDVVKLEPPMLRTMDPSPEAAPPQAGCLQLCWEPWQPGLHINQKCELRHKPQRGEASWALVGPLPLEALQYELCGLLPATAYTLQIRCIRWPLPGHWSDWSPSLELRTTERAPTVRLDTWWRQRQLDPRTVQLFWKPVPLEEDSGRIQGYVVSWRPSGQAGAILPLCNTTELSCTFHLPSEAQEVALVAYNSAGTSRPTPVVFSESRGPALTRLHAMARDPHSLWVGWEPPNPWPQGYVIEWGLGPPSASNSNKTWRMEQNGRATGFLLKENIRPFQLYEIIVTPLYQDTMGPSQHVYAYSQEMAPSHAPELHLKHIGKTWAQLEWVPEPPELGKSPLTHYTIFWTNAQNQSFSAILNASSRGFVLHGLEPASLYHIHLMAASQAGATNSTVLTLMTLTPAPTGRIPSGQVSQTQLTAAWAPGCPQSWRRMPSSCPALARHPSPSSQCWRRMKRSRCPGSPITAQRPVASPLWSRPMCSRGTQEQFPPSPNPSLAPAIRSFMGSCWAAPQAQGQGTISAVTPLSPSWRASPPAPSPMRTSGSRPAPWGPW

SEQ ID NO: 14916 - protein, 863 aa, Homo sapiens
MARLGNCSLTWAALIILLLPGSLEECGHISVSAPIVHLGDPITASCIIKQNCSHLDPEPQILWRLGAELQPGGRQQRLSDGTQESIITLPHLNHTQAFLSCCLNWGNSLQILDQVELRAGYPPAIPHNLSCLMNLTTSSLICQWEPGPETHLPTSFTLKSFKSRGNCQTQGDSILDCVPKDGQSHCCIPRKHLLLYQNMGIWVQAENALGTSMSPQLCLDPMDVVKLEPPMLRTMDPSPEAAPPQAGCLQLCWEPWQPGLHINQKCELRHKPQRGEASWALVGPLPLEALQYELCGLLPATAYTLQIRCIRWPLPGHWSDWSPSLELRTTERAPTVRLDTWWRQRQLDPRTVQLFWKPVPLEEDSGRIQGYVVSWRPSGQAGAILPLCNTTELSCTFHLPSEAQEVALVAYNSAGTSRPTPVVFSESRGPALTRLHAMARDPHSLWVGWEPPNPWPQGYVIEWGLGPPSASNSNKTWRMEQNGRATGFLLKENIRPFQLYEIIVTPLYQDTMGPSQHVYAYSQEMAPSHAPELHLKHIGKTWAQLEWVPEPPELGKSPLTHYTIFWTNAQNQSFSAILNASSRGFVLHGLEPASLYHIHLMAASQAGATNSTVLTLMTLTPEGSELHIILGLFGLLLLLTCLCGTAWLCCSPNRKNPLWPSVPDPAHSSLGSWVPTIMEELPGPRQGQWLGQTSEMSRALTPHPCVQDAFQLPGLGTPPITKLTVLEEDEKKPVPWESHNSSETCGLPTLVQTYVLQGDPRAVSTQPQSQSGTSDQVLYGQLLGSPTSPGPGHYLRCDSTQPLLAGLTPSPKSYENLWFQASPLGTLVTPAPSQEDDCVFGPLLNFPLLQGIRVHGMEALGSF

SEQ ID NO: 14917 - protein, 783 aa, Homo sapiens
MARLGNCSLTWAALIILLLPGSLEECGHISVSAPIVHLGDPITASCIIKQNCSHLDPEPQILWRLGAELQPGGRQQRLSDGTQESIITLPHLNHTQAFLSCCLNWGNSLQILDQVELRAGYPPAIPHNLSCLMNLTTSSLICQWEPGPETHLPTSFTLKSFKSRGNCQTQGDSILDCVPKDGQSHCCIPRKHLLLYQNMGIWVQAENALGTSMSPQLCLDPMDVVKLEPPMLRTMDPSPEAAPPQAGCLQLCWEPWQPGLHINQKCELRHKPQRGEASWALVGPLPLEALQYELCGLLPATAYTLQIRCIRWPLPGHWSDWSPSLELRTTERAPTVRLDTWWRQRQLDPRTVQLFWKPVPLEEDSGRIQGYVVSWRPSGQAGAILPLCNTTELSCTFHLPSEAQEVALVAYNSAGTSRPTPVVFSESRGPALTRLHAMARDPHSLWVGWEPPNPWPQGYVIEWGLGPPSASNSNKTWRMEQNGRATGFLLKENIRPFQLYEIIVTPLYQDTMGPSQHVYAYSQEMAPSHAPELHLKHIGKTWAQLEWVPEPPELGKSPLTHYTIFWTNAQNQSFSAILNASSRGFVLHGLEPASLYHIHLMAASQAGATNSTVLTLMTLTPEGSELHIILGLFGLLLLLTCLCGTAWLCCSPNRKNPLWPSVPDPAHSSLGSWVPTIMEEDAFQLPGLGTPPITKLTVLEEDEKKPVPWESHNSSETCGLPTLVQTYVLQGDPRAVSTQPQSQSGTSDQAGPPRRSAYFKDQIMLHPAPPNGLLCLFPITSVL

SEQ ID NO: 14918 - protein, 684 aa, Homo sapiens
MSAIPAEESDQLLIRPLGAGQEVGRSCIILEFKGRKIMLDCGIHPGLEGMDALPYIDLIDPAEIDLLLISHFHLDHCGALPWFLQKTSFKGRTFMTHATKAIYRWLLSDYVKVSNISADDMLYTETDLEESMDKIETINFHEVKEVAGIKFWCYHAGHVLGAAMFMIEIAGVKLLYTGDFSRQEDRHLMAAEIPNIKPDILIIESTYGTHIHEKREEREARFCNTVHDIVNRGGRGLIPVFALGRAQELLLILDEYWQNHPELHDIPIYYASSLAKKCMAVYQTYVNAMNDKIRKQININNPFVFKHISNLKSMDHFDDIGPSVVMASPGMMQSGLSRELFESWCTDKRNGVIIAGYCVEGTLAKHIMSEPEEITTMSGQKLPLKMSVDYISFSAHTDYQQTSEFIRALKPPHVILVHGEQNEMARLKAALIREYEDNDEVHIEVHNPRNTEAVTLNFRGEKLAKVMGFLADKKPEQGQRVSGILVKRNFNYHILSPCDLSNYTDLAMSTVKQTQAIPYTGPFNLLCYQLQKLTGDVEELEIQEKPALKVFKNITVIQEPGMVVLEWLANPSNDMYADTVTTVILEVQSNPKIRKGAVQKVSKKLEMHVYSKRLEIMLQDIFGEDCVSVKDDSILSVTVDGKTANLNLETRTVECEEGSEDDESLREMVELAAQRLYEALTPVH

SEQ ID NO: 14919 - protein, 81 aa, Homo sapiens
MDGGQPIPSSLVPLGNESADSSMSLEQKMTFVFVILLFIFLGILIVRCFRILLDPYRSMPTSTWADGLEGLEKGQFDHALA

SEQ ID NO: 14920 - protein, 74 aa, Homo sapiens
MERAQCLRKGILSFERSLEQRSLILSPRLEYSGAITAHCSLDLLDSTNPPASAFWVVETTDTEDEREKKREITE

SEQ ID NO: 14921 - protein, 563 aa, Homo sapiens
MDVGELLSYQPNRGTKRPRDDEEEEQKMRRKQTGTRERGRYREEEMTVVEEADDDKKRLLQIIDRDGEEEEEEEEPLDESSVKKMILTFEKRSYKNQELRIKFPDNPEKFMESELDLNDIIQEMHVVATMPDLYHLLVELNAVQSLLGLLGHDNTDVSIAVVDLLQELTDIDTLHESEEGAEVLIDALVDGQVVALLVQNLERLDESVKEEADGVHNTLAIVENMAEFRPEMCTEGAQQGLLQWLLKRLKAKMPFDANKLYCSEVLAILLQDNDENRELLGELDGIDVLLQQLSVFKRHNPSTAEEQEMMENLFDSLCSCLMLSSNRERFLKGEGLQLMNLMLREKKISRSSALKVLDHAMIGPEGTDNCHKFVDILGLRTIFPLFMKSPRKIKKVGTTEKEHEEHVCSILASLLRNLRGQQRTRLLNKFTENDSEKVDRLMELHFKYLGAMQVADKKIEGEKHDMVRRGEIIDNDTEEEFYLRRLDAGLFVLQHICYIMAEICNANVPQIRQRVHQILNMRGSSIKIVRHIIKEYAENIGDGRSPEFRENEQKRILGLLENF

SEQ ID NO: 14922 - protein, 376 aa, Homo sapiens
MVDGQVVALLVQNLERLDESVKEEADGVHNTLAIVENMAEFRPEMCTEGAQQGLLQWLLKRLKAKMPFDANKLYCSEVLAILLQDNDENRELLGELDGIDVLLQQLSVFKRHNPSTAEEQEMMENLFDSLCSCLMLSSNRERFLKGEGLQLMNLMLREKKISRSSALKVLDHAMIGPEGTDNCHKFVDILGLRTIFPLFMKSPRKIKKVGTTEKEHEEHVCSILASLLRNLRGQQRTRLLNKFTENDSEKVDRLMELHFKYLGAMQVADKKIEGEKHDMVRRGEIIDNDTEEEFYLRRLDAGLFVLQHICYIMAEICNANVPQIRQRVHQILNMRGSSIKIVRHIIKEYAENIGDGRSPEFRENEQKRILGLLENF

SEQ ID NO: 14923 - protein, 311 aa, Homo sapiens
MPFDANKLYCSEVLAILLQDNDENRELLGELDGIDVLLQQLSVFKRHNPSTAEEQEMMENLFDSLCSCLMLSSNRERFLKGEGLQLMNLMLREKKISRSSALKVLDHAMIGPEGTDNCHKFVDILGLRTIFPLFMKSPRKIKKVGTTEKEHEEHVCSILASLLRNLRGQQRTRLLNKFTENDSEKVDRLMELHFKYLGAMQVADKKIEGEKHDMVRRGEIIDNDTEEEFYLRRLDAGLFVLQHICYIMAEICNANVPQIRQRVHQILNMRGSSIKIVRHIIKEYAENIGDGRSPEFRENEQKRILGLLENF

SEQ ID NO: 14924 - protein, 536 aa, Homo sapiens
MRRKQTGTRERGRYREEEMTVVEEADDDKKRLLQIIDRDGEEEEEEEEPLDESSVKKMILTFEKRSYKNQELRIKFPDNPEKFMESELDLNDIIQEMHVVATMPDLYHLLVELNAVQSLLGLLGHDNTDVSIAVVDLLQELTDIDTLHESEEGAEVLIDALVDGQVVALLVQNLERLDESVKEEADGVHNTLAIVENMAEFRPEMCTEGAQQGLLQWLLKRLKAKMPFDANKLYCSEVLAILLQDNDENRELLGELDGIDVLLQQLSVFKRHNPSTAEEQEMMENLFDSLCSCLMLSSNRERFLKGEGLQLMNLMLREKKISRSSALKVLDHAMIGPEGTDNCHKFVDILGLRTIFPLFMKSPRKIKKVGTTEKEHEEHVCSILASLLRNLRGQQRTRLLNKFTENDSEKVDRLMELHFKYLGAMQVADKKIEGEKHDMVRRGEIIDNDTEEEFYLRRLDAGLFVLQHICYIMAEICNANVPQIRQRVHQILNMRGSSIKIVRHIIKEYAENIGDGRSPEFRENEQKRILGLLENF

SEQ ID NO: 14925 - protein, 223 aa, Homo sapiens
MSWMFLRDLLSGVNKYSTGTGWIWLAVVFVFRLLVYMVAAEHVWKDEQKEFECNSRQPGCKNVCFDDFFPISQVRLWALQLIMVSTPSLLVVLHVAYHEGREKRHRKKLYVSPGTMDGGLWYAYLISLIVKTGFEIGFLVLFYKLYDGFSVPYLIKCDLKPCPNTVDCFISKPTEKTIFILFLVITSCLCIVLNFIELSFLVLKCFIKCCLQKYLKKPQVLSV

SEQ ID NO: 14926 - protein, 119 aa, Homo sapiens
MKVLISSLLLLLPLMLMSMVSSSLNPGVARGHRDRGQASRRWLQEGGQECECKDWFLRAPRRKFMTVSGLPKKQCPCDHFKGNVKKTRHQRHHRKPNKHSRACQQFLKQCQLRSFALPL

SEQ ID NO: 14927 - protein, 189 aa, Homo sapiens
MTDKTEKVAVDPETVFKRPRECDSPSYQKRQRMALLARKQGAGDSLIAGSAMSKEKKLMTGHAIPPSQLDSQIDDFTGFSKDGMMQKPGSNAPVGGNVTSSFSGDDLECRETASSPKSQREINADIKRKLVKELRCVGQKYEKIFEMLEGVQGPTAVRKRFFESIIKEAARCMRRDFVKHLKKKLKRMI

SEQ ID NO: 14928 - protein, 189 aa, Homo sapiens
MTDKTEKVAVDPETVFKRPRECDSPSYQKRQRMALLARKQGAGDSLIAGSAMSKEKKLMTGHAIPPSQLDSQIDDFTGFSKDRMMQKPGSNAPVGGNVTSSFSGDDLECRETAFSPKSQQEINADIKRQLVKELRCVGQKYEKIFEMLEGVQGPTAVRKRFFESIIKEAARCMRRDFVKHLKKKLKRMI

SEQ ID NO: 14929 - protein, 194 aa, Homo sapiens
MFPRPVLNSRAQAILLPQPPNMLDHRQWPPRLASFPFTKTGMLSRATSVLAGLTAHLWDLGGGAGRRTSKAQRVHPQPSHQRQPPPPQHPGPYQERIWVGGEGWGEVGGLRLSKVGRRDREVGRGLRAPAGRGRAMGGMPRMGTVGDFGQALSSLAWTSTCFQDFCLPSLPGKLPAPLISKQQFLSNSSRSLFN

SEQ ID NO: 14930 - protein, 483 aa, Homo sapiens
MAGFAELGLSSWLVEQCRQLGLKQPTPVQLGCIPAILEGRDCLGCAKTGSGKTAAFVLPILQKLSEDPYGIFCLVLTPTRELAYQIAEQFRVLGKPLGLKDCIIVGGMDMVAQALELSRKPHVVIATPGRLADHLRSSNTFSIKKIRFLVMDEADRLLEQGCTDFTVDLEAILAAVPARRQTLLFSATLTDTLRELQGLATNQPFFWEAQAPVSTVEQLDQRYLLVPEKVKDAYLVHLIQRFQDEHEDWSIIIFTNTCKTCQILCMMLRKFSFPTVALHSMMKQKERFAALAKFKSSIYRILIATDVASRGLDIPTVQVVINHNTPGLPKIYIHRVGRTARAGRQGQAITLVTQYDIHLVHAIEEQIKKKLEEFSVEEAEVLQILTQVNVVRRECEIKLEAAHFDEKKEINKRKQLILEGKDPDLEAKRKAELAKIKQKNRRFKEKVEETLKRQKAGRAGHKGRPPRTPSGSHSGPVPSQGLV

SEQ ID NO: 14931 - protein, 254 aa, Homo sapiens
MDMVAQALELSRKPHVVIATPGRLADHLRSSNTFSIKKIRFLVMDEADRLLEQGCTDFTVDLEAILAAVPARRQTLLFSATLTDTLRELQGLATNQPFFWEAQAPVSTVEQLDQRYLLVPEKVKDAYLVHLIQRFQDEHEDWSIIIFTNTCKTCQILCMMLRKFSFPTVALHSMMKQKERFAALAKFKSSIYRILIATDVASRGADQPPLPPGAWTSLRYRWSSTTTPPGSPRSTSTESAGRPVQGGRVRPSRW

SEQ ID NO: 14932 - protein, 357 aa, Homo sapiens
MAAAELADTQLMLGVGLIEKDTNGEVLWVWCYPSTTATLRNLLLRKCCLTDENKLLHPFVFGQYRRTWFYITIIEVPDSSILKKVTHFSIVLTAKDFNPEKYAAFTRILCRMYLKHGSPVKMMESYIAVLTKGICQSEENGSFLSKDFDARKAYPAGSIKDIVSQFGMETVILHTALMLKKRIVVYHPKIEAVQEFTRTLPALVWHRQDWTILHSYVHLNADELEALQMCTGYVAGFVDLEVSNRPDLYDVFVNLAESEITIAPLAKEAMAMGKLHKEMGQLIVQSAEDPEKSESQVIQDIALKTREIFTNLAPFSEVSADGEKRVLNLEALKQKRFPPATENFLYHLAAAEQMLKI

SEQ ID NO: 14933 - protein, 715 aa, Homo sapiens
MVPGARGGGALARAAGRGLLALLLAVSAPLRLQAEELGDGCGHLVTYQDSGTMTSKNYPGTYPNHTVCEKTITVPKGKRLILRLGDLDIESQTCASDYLLFTSSSDQYGPYCGSMTVPKELLLNTSEVTVRFESGSHISGRGFLLTYASSDHPDLITCLERASHYLKTEYSKFCPAGCRDVAGDISGNMVDGYRDTSLLCKAAIHAGIIADELGGQISVLQRKGISRYEGILANGVLSRDGSLSDKRFLFTSNGCSRSLSFEPDGQIRASSSWQSVNESGDQVHWSPGQARLQDQGPSWASGDSSNNHKPREWLEIDLGEKKKITGIRTTGSTQSNFNFYVKSFVMNFKNNNSKWKTYKGIVNNEEKVFQGNSNFRDPVQNNFIPPIVARYVRVVPQTWHQRIALKVELIGCQITQGNDSLVWRKTSQSTSVSTKKEDETITRPIPSEETSTGINITTVAIPLVLLVVLVFAGMGIFAAFRKKKKKGSPYGSAEAQKTDCWKQIKYPFARHQSAEFTISYDNEKEMTQKLDLITSDMADYQQPLMIGTGTVTRKGSTFRPMDTDAEEAGVSTDAGGHYDCPQRAGRHEYALPLAPPEPEYATPIVERHVLRAHTFSAQSGYRVPGPQPGHKHSLSSGGFSPVAGVGAQDGDYQRPHSAQPADRGYDRPKAVSALATESGHPDSQKPPTHPGTSDSYSAPRDCLTPLNQTAMTALL

SEQ ID NO: 14934 - protein, 539 aa, Homo sapiens
MVPGARGGGALARAAGRGLLALLLAVSAPLRLQAEELGDGCGHLVTYQDSGTMTSKNYPGTYPNHTVCEKTITVPKGKRLILRLGDLDIESQTCASDYLLFTSSSDQYGPYCGSMTVPKELLLNTSEVTVRFESGSHISGRGFLLTYASSDHPDLITCLERASHYLKTEYSKFCPAGCRDVAGDISGNMVDGYRDTSLLCKAAIHAGIIADELGGQISVLQRKGISRYEGILANGVLSRDGSLSDKRFLFTSNGCSRSLSFEPDGQIRASSSWQSVNESGDQVHWSPGQARLQDQGPSWASGDSSNNHKPREWLEIDLGEKKKITGIRTTGSTQSNFNFYVKSFVMNFKNNNSKWKTYKGIVNNEEKVFQGNSNFRDPVQNNFIPPIVARYVRVVPQTWHQRIALKVELIGCQITQGNDSLVWRKTSQSTSVSTKKEDETITRPIPSEETSTGINITTVAIPLVLLVVLVFAGMGIFAAFRKKKKKGSPYGSAEAQKTDCWKQIKYPFARHQSAEFTISYDNEKEMTQKLDLITSDMAG

SEQ ID NO: 14935 - protein, 244 aa, Homo sapiens
MELFLAGRRVLVTGAGKGIGRGTVQALHATGARVVAVSRTQADLDSLVRECPGIEPVCVDLGDWEATERALGSVGPVDLLVNNAAVALLQPFLEVTKEAFDRSFEVNLRAVIQVSQIVARGLIARGVPGAIVNVSSQCSQRAVTNHSVYCSTKGALDMLTKVMALELGPHKIRVNAVNPTVVMTSMGQATWSDPHKAKTMLNRIPLGKFAEVEHVVNAILFLLSDRSGMTTGSTLPVEGGFWAC

SEQ ID NO: 14936 - protein, 293 aa, Homo sapiens
MDAPHSKAALDSINELPENILLELFTHVPARQLLLNCRLVCSLWRDLIDLMTLWKRKCLREGFITKDWDQPVADWKIFYFLRSLHRNLLRNPCAEEDMFAWQIDFNGGDRWKVESLPGAHGTDFPDPKVKKYFVTSYEMCLKSQLVDLVAEGYWEELLDTFRPDIVVKDWFAARADCGCTYQLKVQLASADYFVLASFEPPPVTIQQWNNATWTEVSYTFSDYPRGVRYILFQHGGRDTQYWAGWYGPRVTNSSIVVSPKMTRNQASSEAQPGQKHGQEEAAQSPYRAVVQIF

SEQ ID NO: 14937 - protein, 333 aa, Homo sapiens
MKMDVSVRAAGCSDDLSSGEADVDPKLLELTADEEKCRSIRRQYRQLMYCVRQNREDIVSSANNSLTEALEEANVLFDGVSRTREAALDARFLVMASDLGKEKAKQLNSDMNFFNQLAFCDFLFLFVGLNWMEGDPDKLSDCDDSIALSFWKAIEKEATSWMVKAETFHFVFGSFKLERSAPKPRLEHQKKVRKMEENGNMPTKLQKLDLSSYPEATEKNVERILGLLQTYFRKYPDTPVSYFEFVIDPNSFSRTVENIFYVSFIVRDGFARIRLDEDRLPILEPMNVNQMGEGNDSSCHGRKQGVISLTLQEWKNIVAAFEISEAMITYSSY

SEQ ID NO: 14938 - protein, 380 aa, Homo sapiens
MGGLSARPTAGRTDPAGTCWGQDPGSKMATVIPGPLSLGEDFYREAIEHCRSYNARLCAERSLRLPFLDSQTGVAQNNCYIWMEKTHRGPGLAPGQIYTYPARCWRKKRRLNILEDPRLRPCEYKIDCEAPLKKEGGLPEGPVLEALLCAETGEKKIELKEEETIMDCQKQQLLEFPHDLEVEDLEDDIPRRKNRAKGKAYGIGGLRKRQDTASLEDRDKPYVCDKFYKELAWVPEAQRKHTAKKAPDGTVIPNGYCDFCLGGSKKTGCPEDLISCADCGRSGHPSCLQFTVNMTAAVRTYRWQCIECKSCSLCGTSENDGASWAGLTPQDQLLFCDDCDRGYHMYCLSPPMAEPPEGSWSCHLCLRHLKEKASAYITLT

SEQ ID NO: 14939 - protein, 414 aa, Homo sapiens
MGGLSARPTAGRTDPAGTCWGQDPGSKMATVIPGPLSLGEDFYREAIEHCRSYNARLCAERSLRLPFLDSQTGVAQNNCYIWMEKTHRGPGLAPGQIYTYPARCWRKKRRLNILEDPRLRPCEYKIDCEAPLKKEGGLPEGPVLEALLCAETGEKKIELKEEETIMDCQKQQLLEFPHDLEVEDLEDDIPRRKNRAKGKAYGIGGLRKRQDTASLEDRDKPYVCDICGKRYKNRPGLSYHYTHTHLAEEEGEENAERHALPFHRKNNHKQFYKELAWVPEAQRKHTAKKAPDGTVIPNGYCDFCLGGSKKTGCPEDLISCADCGRSGHPSCLQFTVNMTAAVRTYRWQCIECKSCSLCGTSENDDQLLFCDDCDRGYHMYCLSPPMAEPPEGSWSCHLCLRHLKEKASAYITLT

SEQ ID NO: 14940 - protein, 332 aa, Homo sapiens
MEKTHRGPGLAPGQIYTYPARCWRKKRRLNILEDPRLRPCEYKIDCEAPLKKEGGLPEGPVLEALLCAETGEKKIELKEEETIMDCQKQQLLEFPHDLEVEDLEDDIPRRKNRAKGKAYGIGGLRKRQDTASLEDRDKPYVCDICGKRYKNRPGLSYHYTHTHLAEEEGEENAERHALPFHRKNNHKQFYKELAWVPEAQRKHTAKKAPDGTVIPNGYCDFCLGGSKKTGCPEDLISCADCGRSGHPSCLQFTVNMTAAVRTYRWQCIECKSCSLCGTSENDDQLLFCDDCDRGYHMYCLSPPMAEPPEGSWSCHLCLRHLKEKASAYITLT

SEQ ID NO: 14941 - protein, 585 aa, Homo sapiens
MAPSTPLLTVRGSEGLYMVNGPPHFTESTVFPRESGKNCKVCIFSKDGTLFAWGNGEKVNIISVTNKGLLHSFDLLKAVCLEFSPKNTVLATWQPYTTSKDGTAGIPNLQLYDVKTGTCLKSFIQKKMQNWCPSWSEDETLCARNVNNEVHFFENNNFNTIANKLHLQKINDFVLSPGPQPYKVAVYVPGSKGAPSFVRLYQYPNFAGPHAALANKSFFKADKVTMLWNKKATAVLVIASTDVDKTGASYYGEQTLHYIATNGESAVVQLPKNGPIYDVVWNSSSTEFCAVYGFMPAKATIFNLKCDPVFDFGTGPRNAAYYSPHGHILVLAGFGNLRGQMEVWDVKNYKLISKPVASDSTYFAWCPDGEHILTATCAPRLRVNNGYKIWHYTGSILHKYDVPSNAELWQVSWQPFLDGIFPAKTITYQAVPSEVPNEEPKVATAYRPPALRNKPITNSKLHEEEPPQNMKPQSGNDKPLSKTALKNQRKHEAKKAAKQEARSDKSPDLAPTPAPQSTPRNTVSQSISGDPEIDKKIKNLKKKLKAIEQLKEQAATGKQLEKNQLEKIQKETALLQELEDLELGI

SEQ ID NO: 14942 - protein, 371 aa, Homo sapiens
MFQEVKADKVTMLWNKKATAVLVIASTDVDKTGASYYGEQTLHYIATNGESAVVQLPKNGPIYDVVWNSSSTEFCAVYGFMPAKATIFNLKCDPVFDFGTGPRNAAYYSPHGHILVLAGFGNLRGQMEVWDVKNYKLISKPVASDSTYFAWCPDGEHILTATCAPRLRVNNGYKIWHYTGSILHKYDVPSNAELWQVSWQPFLDGIFPAKTITYQAVPSEVPNEEPKVATAYRPPALRNKPITNSKLHEEEPPQNMKPQSGNDKPLSKTALKNQRKHEAKKAAKQEARSDKSPDLAPTPAPQSTPRNTVSQSISGDPEIDKKIKNLKKKLKAIEQLKEQAATGKQLEKNQLEKIQKETALLQELEDLELGI

SEQ ID NO: 14943 - protein, 560 aa, Homo sapiens
MAPSTPLLTVRGSEGLYMVNGPPHFTESTVFPRVNIISVTNKGLLHSFDLLKAVCLEFSPKNTVLATWQPYTTSKDGTAGIPNLQLYDVKTGTCLKSFIQKKMQNWCPSWSEDETLCARNVNNEVHFFENNNFNTIANKLHLQKINDFVLSPGPQPYKVAVYVPGSKGAPSFVRLYQYPNFAGPHAALANKSFFKADKVTMLWNKKATAVLVIASTDVDKTGASYYGEQTLHYIATNGESAVVQLPKNGPIYDVVWNSSSTEFCAVYGFMPAKATIFNLKCDPVFDFGTGPRNAAYYSPHGHILVLAGFGNLRGQMEVWDVKNYKLISKPVASDSTYFAWCPDGEHILTATCAPRLRVNNGYKIWHYTGSILHKYDVPSNAELWQVSWQPFLDGIFPAKTITYQAVPSEVPNEEPKVATAYRPPALRNKPITNSKLHEEEPPQNMKPQSGNDKPLSKTALKNQRKHEAKKAAKQEARSDKSPDLAPTPAPQSTPRNTVSQSISGDPEIDKKIKNLKKKLKAIEQLKEQAATGKQLEKNQLEKIQKETALLQELEDLELGI

SEQ ID NO: 14944 - protein, 524 aa, Homo sapiens
MAPSTPLLTVRGSEGLYMVNGPPHFTESTVFPRESGKNCKVCIFSKDGTLFAWGNGEKVNIISVTNKGLLHSFDLLKAVCLEFSPKNTVLATWQPYTNTIANKLHLQKINDFVLSPGPQPYKVAVYVPGSKGAPSFVRLYQYPNFAGPHAALANKSFFKADKVTMLWNKKATAVLVIASTDVDKTGASYYGEQTLHYIATNGESAVVQLPKNGPIYDVVWNSSSTEFCAVYGFMPAKATIFNLKCDPVFDFGTGPRNAAYYSPHGHILVLAGFGNLRGQMEVWDVKNYKLISKPVASDSTYFAWCPDGEHILTATCAPRLRVNNGYKIWHYTGSILHKYDVPSNAELWQVSWQPFLDGIFPAKTITYQAVPSEVPNEEPKVATAYRPPALRNKPITNSKLHEEEPPQNMKPQSGNDKPLSKTALKNQRKHEAKKAAKQEARSDKSPDLAPTPAPQSTPRNTVSQSISGDPEIDKKIKNLKKKLKAIEQLKEQAATGKQLEKNQLEKIQKETALLQELEDLELGI

SEQ ID NO: 14945 - protein, 250 aa, Homo sapiens
MALRAGLVLGFHTLMTLLSPQEAGATKADHMGSYGPAFYQSYGASGQFTHEFDEEQLFSVDLKKSEAVWRLPEFGDFARFDPQGGLAGIAAIKAHLDILVERSNRSRAINVPPRVTVLPKSRVELGQPNILICIVDNIFPPVINITWLRNGQTVTEGVAQTSFYSQPDHLFRKFHYLPFVPSAEDVYDCQVEHWGLDAPLLRHWELQVPIPPPDAMETLVCALGLAIGLVGFLVGTVLIIMGTYVSSVPR

SEQ ID NO: 14946 - protein, 2186 aa, Homo sapiens
MAGERTRRFTRSLLRPGQAAELRHSAASAAAVAVSSRQQQRQEKPRLLEPLDYETVIEELEKTYRNDPLQDLLFFPSDDFSAATVSWDIRTLYSTVPEDAEHKAENLLVKEACKFYSSQWHVVNYKYEQYSGDIRQLPRAEYKPEKLPSHSFEIDHEDADKDEDTTSHSSSKGGGGAGGTGVFKSGWLYKGNFNSTVNNTVTVRSFKKRYFQLTQLPDNSYIMNFYKDEKISKEPKGCIFLDSCTGVVQNNRLRKYAFELKMNDLTYFVLAAETESDMDEWIHTLNRILQISPEGPLQGRRSTELTDLGLDSLDNSVTCECTPEETDSSENNLHADFAKYLTETEDTVKTTRNMERLNLFSLDPDIDTLKLQKKDLLEPESVIKPFEEKAAKRIMIICKALNSNLQGCVTENENDPITNIEPFFVSVALYDLRDSRKISADFHVDLNHAAVRQMLLGASVALENGNIDTITPRQSEEPHIKGLPEEWLKFPKQAVFSVSNPHSEIVLVAKIEKVLMGNIASGAEPYIKNPDSNKYAQKILKSNRQFCSKLGKYRMPFAWAVRSVFKDNQGNVDRDSRFSPLFRQESSKISTEDLVKLVSDYRRADRISKMQTIPGSLDIAVDNVPLEHPNCVTSSFIPVKPFNMMAQTEPTVEVEEFVYDSTKYCRPYRVYKNQIYIYPKHLKYDSQKCFNKARNITVCIEFKNSDEESAKPLKCIYGKPGGPLFTSAAYTAVLHHSQNPDFSDEVKIELPTQLHEKHHILFSFYHVTCDINAKANAKKKEALETSVGYAWLPLMKHDQIASQEYNIPIATSLPPNYLSFQDSASGKHGGSDIKWVDGGKPLFKVSTFVVSTVNTQDPHVNAFFQECQKREKDMSQSPTSNFIRSCKNLLNVEKIHAIMSFLPIILNQLFKVLVQNEEDEITTTVTRVLTDIVAKCHEEQLDHSVQSYIKFVFKTRACKERTVHEELAKNVTGLLKSNDSTTVKHVLKHSWFFFAIILKSMAQHLIDTNKIQLPRPQRFPESYQNELDNLVMVLSDHVIWKYKDALEETRRANHSVARFLKRCFTFMDRGYVFKMVNNYISMFSSGDLKTLCQYKFDFLQEVCQHEHFIPLCLPIRSANIPDPLTPSESTQELHASDMPEYSVTNEFCRKHFLIGILLREVGFALQEDQDVRHLALAVLKNLMAKHSFDDRYREPRKQAQIASLYMPLYGMLLDNMPRIYLKDLYPFTVNTSNQGSRDDLSTNGGFQSQTAIKHANSVDTSFSKDVLNSIAAFSSIAISTVNHADSRASLASLDSNPSTNEKSSEKTDNCEKIPRPLSLIGSTLRFDKLDQAETRSLLMCFLHIMKTISYETLIAYWQRAPSPEVSDFFSILDVCLQNFRYLGKRNIIRKIAAAFKFVQSTQNNGTLKGSNPSCQTSGLLSQWMHSTSSHEGHKQHRSQTLPIIRGKNALSNPKLLQMLDNTMTSNSNEIDIVHHVDTEANIATEVCLTILDLLSLFTQTHQRQLQQCDCQNSLMKRVFDTYMLFFQVNQSATALKHVFASLRLFVCKFPSAFFQGPADLCGSFCYEVLKCCNHRSRSTQTEASALLYFFMRKNFEFNKQKSIVRSHLQLIKAVSQLIADAGIGGSRFQHSLAITNNFANGDKQMKNSNFPAEVKDLTKRIRTVLMATAQMKEHEKDPEMLVDLQYSLANSYASTPELRRTWLESMAKIHARNGDLSEAAMCYIHIAALIAEYLKRKGYWKVEKICTASLLSEDTHPCDSNSLLTTPSGGSMFSMGWPAFLSITPNIKEEGAMKEDSGMQDTPYNENILVEQLYMCVEFLWKSERYELIADVNKPIIAVFEKQRDFKKLSDLYYDIHRSYLKVAEVVNSEKRLFGRYYRVAFYGQGFFEEEEGKEYIYKEPKLTGLSEISQRLLKLYADKFGADNVKIIQDSNKVNPKDLDPKYAYIQVTYVTPFFEEKEIEDRKTDFEMHHNINRFVFETPFTLSGKKHGGVAEQCKRRTILTTSHLFPYVKKRIQVISQSSTELNPIEVAIDEMSKKVSELNQLCTMEEVDMIRLQLKLQGSVSVKVNAGPMAYARAFLEETNAKKYPDNQVKLLKEIFRQFADACGQALDVNERLIKEDQLEYQEELRSHYKDMLSELSTVMNEQITGRDDLSKRGVDQTCTRVISKATPALPTVSISSSAEV

SEQ ID NO: 14947 - protein, 593 aa, Homo sapiens
MAGERTRRFTRSLLRPGQAAELRHSAASAAAVAVSSRQQQRQEKPRLLEPLDYETVIEELEKTYRNDPLQDLLFFPSDDFSAATVSWDIRTLYSTVPEDAEHKAENLLVKEACKFYSSQWHVVNYKYEQYSGDIRQLPRAEYKPEKLPSHSFEIDHEDADKDEDTTSHSSSKGGGGAGGTGVFKSGWLYKGNFNSTVNNTVTVRSFKKRYFQLTQLPDNSYIMNFYKDEKISKEPKGCIFLDSCTGVVQNNRLRKYAFELKMNDLTYFVLAAETESDMDEWIHTLNRILQISPEGPLQGRRSTELTDLGLDSLDNSVTCECTPEETDSSENNLHADFAKYLTETEDTVKTTRNMERLNLFSLDPDIDTLKLQKKDLLEPESVIKPFEEKAAKRIMIICKALNSNLQGCVTENENDPITNIEPFFVSVALYDLRDSRKISADFHVDLNHAAVRQMLLGASVALENGNIDTITPRQSEEPHIKGLPEEWLKFPKQAVFSVSNPHSEIVLVAKIEKVLMGNIASGAEPYIKNPDSNKYAQKILKSNRQFCSKLGKYRMPFAWAVRSVDSCSQQTRNTFNGGIGSFSFERFCVAYYF

SEQ ID NO: 14948 - protein, 2180 aa, Homo sapiens
MSFRGKVFKREPSEFWKKRRTVRRVNQEEIHRFSSQEKPRLLEPLDYETVIEELEKTYRNDPLQDLLFFPSDDFSAATVSWDIRTLYSTVPEDAEHKAENLLVKEACKFYSSQWHVVNYKYEQYSGDIRQLPRAEYKPEKLPSHSFEIDHEDADKDEDTTSHSSSKGGGGAGGTGVFKSGWLYKGNFNSTVNNTVTVRSFKKRYFQLTQLPDNSYIMNFYKDEKISKEPKGCIFLDSCTGVVQNNRLRKYAFELKMNDLTYFVLAAETESDMDEWIHTLNRILQISPEGPLQGRRSTELTDLGLDSLDNSVTCECTPEETDSSENNLHADFAKYLTETEDTVKTTRNMERLNLFSLDPDIDTLKLQKKDLLEPESVIKPFEEKAAKRIMIICKALNSNLQGCVTENENDPITNIEPFFVSVALYDLRDSRKISADFHVDLNHAAVRQMLLGASVALENGNIDTITPRQSEEPHIKGLPEEWLKFPKQAVFSVSNPHSEIVLVAKIEKVLMGNIASGAEPYIKNPDSNKYAQKILKSNRQFCSKLGKYRMPFAWAVRSVFKDNQGNVDRDSRFSPLFRQESSKISTEDLVKLVSDYRRADRISKMQTIPGSLDIAVDNVPLEHPNCVTSSFIPVKPFNMMAQTEPTVEVEEFVYDSTKYCRPYRVYKNQIYIYPKHLKYDSQKCFNKARNITVCIEFKNSDEESAKPLKCIYGKPGGPLFTSAAYTAVLHHSQNPDFSDEVKIELPTQLHEKHHILFSFYHVTCDINAKANAKKKEALETSVGYAWLPLMKHDQIASQEYNIPIATSLPPNYLSFQDSASGKHGGSDIKWVDGGKPLFKVSTFVVSTVNTQDPHVNAFFQECQKREKDMSQSPTSNFIRSCKNLLNVEKIHAIMSFLPIILNQLFKVLVQNEEDEITTTVTRVLTDIVAKCHEEQLDHSVQSYIKFVFKTRACKERTVHEELAKNVTGLLKSNDSTTVKHVLKHSWFFFAIILKSMAQHLIDTNKIQLPRPQRFPESYQNELDNLVMVLSDHVIWKYKDALEETRRANHSVARFLKRCFTFMDRGYVFKMVNNYISMFSSGDLKTLCQYKFDFLQEVCQHEHFIPLCLPIRSANIPDPLTPSESTQELHASDMPEYSVTNEFCRKHFLIGILLREVGFALQEDQDVRHLALAVLKNLMAKHSFDDRYREPRKQAQIASLYMPLYGMLLDNMPRIYLKDLYPFTVNTSNQGSRDDLSTNGGFQSQTAIKHANSVDTSFSKDVLNSIAAFSSIAISTVNHADSRASLASLDSNPSTNEKSSEKTDNCEKIPRPLSLIGSTLRFDKLDQAETRSLLMCFLHIMKTISYETLIAYWQRAPSPEVSDFFSILDVCLQNFRYLGKRNIIRKIAAAFKFVQSTQNNGTLKGSNPSCQTSGLLSQWMHSTSSHEGHKQHRSQTLPIIRGKNALSNPKLLQMLDNTMTSNSNEIDIVHHVDTEANIATEVCLTILDLLSLFTQTHQRQLQQCDCQNSLMKRVFDTYMLFFQVNQSATALKHVFASLRLFVCKFPSAFFQGPADLCGSFCYEVLKCCNHRSRSTQTEASALLYFFMRKNFEFNKQKSIVRSHLQLIKAVSQLIADAGIGGSRFQHSLAITNNFANGDKQMKNSNFPAEVKDLTKRIRTVLMATAQMKEHEKDPEMLVDLQYSLANSYASTPELRRTWLESMAKIHARNGDLSEAAMCYIHIAALIAEYLKRKGYWKVEKICTASLLSEDTHPCDSNSLLTTPSGGSMFSMGWPAFLSITPNIKEEGAMKEDSGMQDTPYNENILVEQLYMCVEFLWKSERYELIADVNKPIIAVFEKQRDFKKLSDLYYDIHRSYLKVAEVVNSEKRLFGRYYRVAFYGQGFFEEEEGKEYIYKEPKLTGLSEISQRLLKLYADKFGADNVKIIQDSNKVNPKDLDPKYAYIQVTYVTPFFEEKEIEDRKTDFEMHHNINRFVFETPFTLSGKKHGGVAEQCKRRTILTTSHLFPYVKKRIQVISQSSTELNPIEVAIDEMSKKVSELNQLCTMEEVDMIRLQLKLQGSVSVKVNAGPMAYARAFLEETNAKKYPDNQVKLLKEIFRQFADACGQALDVNERLIKEDQLEYQEELRSHYKDMLSELSTVMNEQITGRDDLSKRGVDQTCTRVISKATPALPTVSISSSAEV

SEQ ID NO: 14949 - protein, 400 aa, Homo sapiens
MRGRRGDRMTINIQEHMAINVCPGPIRPIRQISDYFPRGPGPEGGGGGGGEAPAHLVPLALAPPAALLGATTPEDGAEVDSYDSDDATALGTLEFDLLYDRASCTLHCSILRAKGLKPMDFNGLADPYVKLHLLPGACKANKLKTKTQRNTLNPVWNEDLTYSGITDDDITHKVLRIAVCDEDKLSHNEFIGEIRVPLRRLKPSQKKHFNICLERQVPLASPSSMSAALRGISCYLKELEQAEQGQGLLEERGRILLSLSYSSRRRGLLVGILRCAHLAAMDVNGYSDPYVKTYLRPDVDKKSKHKTCVKKKTLNPEFNEEFFYEIELSTLATKTLEVTVWDYDIGKSNDFIGGVSLGPGARGEARKHWSDCLQQPDAALERWHTLTSELPPAAGALSSA

SEQ ID NO: 14950 - protein, 163 aa, Homo sapiens
MDFNGLADPYVKLHLLPGACKANKLKTKTQRNTLNPVWNEDLTYSGITDDDITHKVLRIAVCDEDKLSHNEFIGEIRVPLRRLKPSQKKHFNICLERQVPLASPSSMSAALRGISCYLKELEQAEQGQGLLEERGRILLSLSYSSRRRGLLVPEARCGQEIQA

SEQ ID NO: 14951 - protein, 359 aa, Homo sapiens
METQLSNGPTCNNTANGPTTINNNCSSPVDSGNTEDSKTNLIVNYLPQNMTQEELKSLFGSIGEIESCKLVRDKITGQSLGYGFVNYIDPKDAEKAINTLNGLRLQTKTIKVSYARPSSASIRDANLYVSGLPKTMTQKELEQLFSQYGRIITSRILVDQVTGISRGVGFIRFDKRIEAEEAIKGLNGQKPPGATEPITVKFANNPSQKTNQAILSQLYQSPNRRYPGPLAQQAQRFRLDNLLNMAYGVKRFSPMTIDGMTSLAGINIPGHPGTGWCIFVYNLAPDADESILWQMFGPFGAVTNVKVIRDFNTNKCKGFGFVTMTNYDEAAMAIASLNGYRLGDRVLQVSFKTNKTHKA

SEQ ID NO: 14952 - protein, 346 aa, Homo sapiens
METQLSNGPTCNNTANGPTTINNNCSSPVDSGNTEDSKTNLIVNYLPQNMTQEELKSLFGSIGEIESCKLVRDKITGQSLGYGFVNYIDPKDAEKAINTLNGLRLQTKTIKVSYARPSSASIRDANLYVSGLPKTMTQKELEQLFSQYGRIITSRILVDQVTGISRGVGFIRFDKRIEAEEAIKGLNGQKPPGATEPITVKFANNPSQKTNQAILSQLYQSPNRRYPGPLAQQAQRFRFSPMTIDGMTSLAGINIPGHPGTGWCIFVYNLAPDADESILWQMFGPFGAVTNVKVIRDFNTNKCKGFGFVTMTNYDEAAMAIASLNGYRLGDRVLQVSFKTNKTHKA

SEQ ID NO: 14953 - protein, 983 aa, Homo sapiens
MDCQLSILLLLSCSVLDSFGELIPQPSNEVNLLDSKTIQGELGWISYPSHGWEEISGVDEHYTPIRTYQVCNVMDHSQNNWLRTNWVPRNSAQKIYVELKFTLRDCNSIPLVLGTCKETFNLYYMESDDDHGVKFREHQFTKIDTIAADESFTQMDLGDRILKLNTEIREVGPVNKKGFYLAFQDVGACVALVSVRVYFKKCPFTVKNLAMFPDTVPMDSQSLVEVRGSCVNNSKEEDPPRMYCSTEGEWLVPIGKCSCNAGYEERGFMCQACRPGFYKALDGNMKCAKCPPHSSTQEDGSMNCRCENNYFRADKDPPSMACTRPPSSPRNVISNINETSVILDWSWPLDTGGRKDVTFNIICKKCGWNIKQCEPCSPNVRFLPRQFGLTNTTVTVTDLLAHTNYTFEIDAVNGVSELSSPPRQFAAVSITTNQAAPSPVLTIKKDRTSRNSISLSWQEPEHPNGIILDYEVKYYEKQEQETSYTILRARGTNVTISSLKPDTIYVFQIRARTAAGYGTNSRKFEFETSPDSFSISGESSQVVMIAISAAVAIILLTVVIYVLIGRFCGYKSKHGADEKRLHFGNGHLKLPGLRTYVDPHTYEDPTQAVHEFAKELDATNISIDKVVGAGEFGEVCSGRLKLPSKKEISVAIKTLKVGYTEKQRRDFLGEASIMGQFDHPNIIRLEGVVTKSKPVMIVTEYMENGSLDSFLRKHDAQFTVIQLVGMLRGIASGMKYLSDMGYVHRDLAARNILINSNLVCKVSDFGLSRVLEDDPEAAYTTRGGKIPIRWTSPEAIAYRKFTSASDVWSYGIVLWEVMSYGERPYWEMSNQDVIKAVDEGYRLPPPMDCPAALYQLMLDCWQKDRNNRPKFEQIVSILDKLIRNPGSLKIITSAAARPSNLLLDQSNVDITTFRTTGDWLNGVWTAHCKEIFTGVEYSSCDTIAKISTDDMKKVGVTVVGPQKKIISSIKALETQSKNGPVPV

SEQ ID NO: 14954 - protein, 539 aa, Homo sapiens
MDCQLSILLLLSCSVLDSFGELIPQPSNEVNLLDSKTIQGELGWISYPSHGWEEISGVDEHYTPIRTYQVCNVMDHSQNNWLRTNWVPRNSAQKIYVELKFTLRDCNSIPLVLGTCKETFNLYYMESDDDHGVKFREHQFTKIDTIAADESFTQMDLGDRILKLNTEIREVGPVNKKGFYLAFQDVGACVALVSVRVYFKKCPFTVKNLAMFPDTVPMDSQSLVEVRGSCVNNSKEEDPPRMYCSTEGEWLVPIGKCSCNAGYEERGFMCQACRPGFYKALDGNMKCAKCPPHSSTQEDGSMNCRCENNYFRADKDPPSMACTRPPSSPRNVISNINETSVILDWSWPLDTGGRKDVTFNIICKKCGWNIKQCEPCSPNVRFLPRQFGLTNTTVTVTDLLAHTNYTFEIDAVNGVSELSSPPRQFAAVSITTNQAAPSPVLTIKKDRTSRNSISLSWQEPEHPNGIILDYEVKYYEKQEQETSYTILRARGTNVTISSLKPDTIYVFQIRARTAAGYGTNSRKFEFETSPDCMYYFNAV

SEQ ID NO: 14955 - protein, 984 aa, Homo sapiens
MALDYLLLLLLASAVAAMEETLMDTRTATAELGWTANPASGWEEVSGYDENLNTIRTYQVCNVFEPNQNNWLLTTFINRRGAHRIYTEMRFTVRDCSSLPNVPGSCKETFNLYYYETDSVIATKKSAFWSEAPYLKVDTIAADESFSQVDFGGRLMKVNTEVRSFGPLTRNGFYLAFQDYGACMSLLSVRVFFKKCPSIVQNFAVFPETMTGAESTSLVIARGTCIPNAEEVDVPIKLYCNGDGEWMVPIGRCTCKPGYEPENSVACKACPAGTFKASQEAEGCSHCPSNSRSPAEASPICTCRTGYYRADFDPPEVACTSVPSGPRNVISIVNETSIILEWHPPRETGGRDDVTYNIICKKCRADRRSCSRCDDNVEFVPRQLGLTECRVSISSLWAHTPYTFDIQAINGVSSKSPFPPQHVSVNITTNQAAPSTVPIMHQVSATMRSITLSWPQPEQPNGIILDYEIRYYEKEHNEFNSSMARSQTNTARIDGLRPGMVYVVQVRARTVAGYGKFSGKMCFQTLTDDDYKSELREQLPLIAGSAAAGVVFVVSLVAISIVCSRKRAYSKEAVYSDKLQHYSTGRGSPGMKIYIDPFTYEDPNEAVREFAKEIDVSFVKIEEVIGAGEFGEVYKGRLKLPGKREIYVAIKTLKAGYSEKQRRDFLSEASIMGQFDHPNIIRLEGVVTKSRPVMIITEFMENGALDSFLRQNDGQFTVIQLVGMLRGIAAGMKYLAEMNYVHRDLAARNILVNSNLVCKVSDFGLSRYLQDDTSDPTYTSSLGGKIPVRWTAPEAIAYRKFTSASDVWSYGIVMWEVMSFGERPYWDMSNQDVINAIEQDYRLPPPMDCPAALHQLMLDCWQKDRNSRPRFAEIVNTLDKMIRNPASLKTVATITAVPSQPLLDRSIPDFTAFTTVDDWLSAIKMVQYRDSFLTAGFTSLQLVTQMTSEDLLRIGITLAGHQKKILNSIHSMRVQISQSPTAMA

SEQ ID NO: 14956 - protein, 545 aa, Homo sapiens
MHQVSATMRSITLSWPQPEQPNGIILDYEIRYYEKEHNEFNSSMARSQTNTARIDGLRPGMVYVVQVRARTVAGYGKFSGKMCFQTLTDDDYKSELREQLPLIAGSAAAGVVFVVSLVAISIVCSRKRAYSKEAVYSDKLQHYSTGRGSPGMKIYIDPFTYEDPNEAVREFAKEIDVSFVKIEEVIGAGEFGEVYKGRLKLPGKREIYVAIKTLKAGYSEKQRRDFLSEASIMGQFDHPNIIRLEGVVTKSRPVMIITEFMENGALDSFLRQNDGQFTVIQLVGMLRGIAAGMKYLAEMNYVHRDLAARNILVNSNLVCKVSDFGLSRYLQDDTSDPTYTSSLGGKIPVRWTAPEAIAYRKFTSASDVWSYGIVMWEVMSFGERPYWDMSNQDVINAIEQDYRLPPPMDCPAALHQLMLDCWQKDRNSRPRFAEIVNTLDKMIRNPASLKTVATITAVPSQPLLDRSIPDFTAFTTVDDWLSAIKMVQYRDSFLTAGFTSLQLVTQMTSEDLLRIGITLAGHQKKILNSIHSMRVQISQSPTAMA

SEQ ID NO: 14957 - protein, 242 aa, Homo sapiens
MALDYLLLLLLASAVAAMEETLMDTRTATAELGWTANPASGWEEVSGYDENLNTIRTYQVCNVFEPNQNNWLLTTFINRRGAHRIYTEMRFTVRDCSSLPNVPGSCKETFNLYYYETDSVIATKKSAFWSEAPYLKVDTIAADESFSQVDFGGRLMKLALQGHSRPARKLKAAPTAPPTAAPLQRRLPSAPVGPVITERTLTLQKWHALASHQVPAMLSPSSMRRPSFWSGTLQGRQVGGMM

SEQ ID NO: 14958 - protein, 1011 aa, Homo sapiens
METSSMLSSLNDECKSDNYIEPHYKEWYRVAIDILIEHGLEAYQEFLVQERVSDFLAEEEINYILKNVQKVAQSTAHGTDDSCDDTLSSGTYWPVESDVEAPNLDLGWPYVMPGLLGGTHIDLLFHPPRAHLLTIKETIRKMIKEARKVIALVMDIFTDVDIFKEIVEASTRGVSVYILLDESNFNHFLNMTEKQGCSVQRLRNIRVRTVKGQDYLSKTGAKFHGKMEQKFLLVDCQKVMYGSYSYMWSFEKAHLSMVQIITGQLVESFDEEFRTLYARSCVPSSFAQEESARVKHGKALWENGTYQHSVSSLASVSSQRNLFGRQDKIHKLDSSYFKNRGIYTLNEHDKYNIRSHGYKPHFVPNFNGPNAIRQFQPNQINENWKRHSYAGEQPETVPYLLLNRALNRTNNPPGNWKKPSDSLSVASSSREGYVSHHNTPAQSFANRLAQRKTTNLADRNSNVRRSFNGTDNHIRFLQQRMPTLEHTTKSFLRNWRIESYLNDHSEATPDSNGSALGDRFEGYDNPENLKANALYTHSRLRSSLVFKPTLPEQKEVNSCTTGSSNSTIIGSQGSETPKEVPDTPTNVQHLTDKPLPESIPKLPLQSEAPKMHTLQVPENHSVALNQTTNGHTESNNYIYKTLGVNKQTENLKNQQTENLLKRRSFPLFDNSKANLDPGNSKHYVYSTLTRNRVRQPEKPKEDLLKSSKSMHNVTHNLEEDEEEVTKRNSPSGTTTKSVSIAALLDVNKEESNKELASKKEVKGSPSFLKKGSQKLRSLLSLTPDKKENLSKNKAPAFYRLCSSSDTLVSEGEENQKPKKSDTKVDSSPRRKHSSSSNSQGSIHKSKEDVTVSPSQEINAPPDENKRTPSPGPVESKFLERAGDASAPRFNTEQIQYRDSREINAVVTPERRPTSSPRPTSSELLRSHSTDRRVYSRFEPFCKIESSIQPTSNMPNTSINRPEIKSATMGNSYGRSSPLLNYNTGVYRSYQPNENKFRGFMQKFGNFIHKNK

SEQ ID NO: 14959 - protein, 499 aa, Homo sapiens
MELSEPIVENGETEMSPEESWEHKEEISEAEPGGGSLGDGRPPEESAHEMMEEEEEIPKPKSVVAPPGAPKKEHVNVVFIGHVDAGKSTIGGQIMYLTGMVDKRTLEKYEREAKEKNRETWYLSWALDTNQEERDKGKTVEVGRAYFETEKKHFTILDAPGHKSFVPNMIGGASQADLAVLVISARKGEFETGFEKGGQTREHAMLAKTAGVKHLIVLINKMDDPTVNWSNERYEECKEKLVPFLKKVGFNPKKDIHFMPCSGLTGANLKEQSDFCPWYIGLPFIPYLDNLPNFNRSVDGPIRLPIVDKYKDMGTVVLGKLESGSICKGQQLVMMPNKHNVEVLGILSDDVETDTVAPGENLKIRLKGIEEEEILPGFILCDPNNLCHSGRTFDAQIVIIEHKSIICPGYNAVLHIHTCIEEVEITALICLVDKKSGEKSKTRPRFVKQDQVCIARLRTAGTICLETFKDFPQMGRFTLRDEGKTIAIGKVLKLVPEKD

SEQ ID NO: 14960 - protein, 636 aa, Homo sapiens
MDPGSGGGGGGGGGGGSSSGSSSSDSAPDCWDQADMEAPGPGPCGGGGSLAAAAEAQRENLSAAFSRQLNVNAKPFVPNVHAAEFVPSFLRGPAAPPPPVGGAANNHGAGSGAGGRAAPVESSQEEQSLCEGSNSAVSMELSEPIENGETEMSPEESWEHKEEISEAEPGGGSLGDGRPPEESAHEMMEEEEEIPKPKSVVAPPGAPKKEHVNVVFIGHVDAGKSTIGGQIMYLTGMVDKRTLEKYEREAKEKNRETWYLSWALDTNQEERDKGKTVEVGRAYFETEKKHFTILDAPGHKSFVPNMIGGASQADLAVLVISARKGEFETGFEKGGQTREHAMLAKTAGVKHLIVLINKMDDPTVNWSNERYEECKEKLVPFLKKVGFNPKKDIHFMPCSGLTGANLKEQSDFCPWYIGLPFIPYLDNLPNFNRSVDGPIRLPIVDKYKDMGTVVLGKLESGSICKGQQLVMMPNKHNVEVLGILSDDVETDTVAPGENLKIRLKGIEEEEILPGFILCDPNNLCHSGRTFDAQIVIIEHKSIICPGYNAVLHIHTCIEEVEITALICLVDKKSGEKSKTRPRFVKQDQVCIARLRTAGTICLETFKDFPQMGRFTLRDEGKTIAIGKVLKLVPEKD

SEQ ID NO: 14961 - protein, 637 aa, Homo sapiens
MDPGSGGGGGGGGGGGSSSGSSSSDSAPDCWDQADMEAPGPGPCGGGGSLAAAAEAQRENLSAAFSRQLNVNAKPFVPNVHAAEFVPSFLRGPAAPPPPVGGAANNHGAGSGAGGRAAPVESSQEEQSLCEGSNSAVSMELSEPIVENGETEMSPEESWEHKEEISEAEPGGGSLGDGRPPEESAHEMMEEEEEIPKPKSVVAPPGAPKKEHVNVVFIGHVDAGKSTIGGQIMYLTGMVDKRTLEKYEREAKEKNRETWYLSWALDTNQEERDKGKTVEVGRAYFETEKKHFTILDAPGHKSFVPNMIGGASQADLAVLVISARKGEFETGFEKGGQTREHAMLAKTAGVKHLIVLINKMDDPTVNWSNERYEECKEKLVPFLKKVGFNPKKDIHFMPCSGLTGANLKEQSDFCPWYIGLPFIPYLDNLPNFNRSVDGPIRLPIVDKYKDMGTVVLGKLESGSICKGQQLVMMPNKHNVEVLGILSDDVETDTVAPGENLKIRLKGIEEEEILPGFILCDPNNLCHSGRTFDAQIVIIEHKSIICPGYNAVLHIHTCIEEVEITALICLVDKKSGEKSKTRPRFVKQDQVCIARLRTAGTICLETFKDFPQMGRFTLRDEGKTIAIGKVLKLVPEKD

SEQ ID NO: 14962 - protein, 539 aa, Homo sapiens
MPPAGGPRAPRPAALPRSLSRLRECPGRSRIVLALGATQMALGCLIVAVSFAALALTTSARVRHSCPFWAGFSVLLSGLIGVVSWKRPLSLVITFFMLLSAVCVMLNLAGSILSCQNAQLVNSLEGCQLIKFDSVEVCVCCELQHQSSGCSNLGETLKLNPLQENCNAVRLTLKDLLFSVCALNVLSTIVCALATAMCCMQMVSSDVLQMFLPQRSHPANPTCVTPHGTVLHQTLDFDEFIPPLPPPPYYPPEYTCTPSTEAQRGLHLDFAPSPFGTLYDVAINSPGLLYPAELPPPYEAVVGQPPASQVTSIGQQVAESSSGDPNTSAGFSTPVPADSTSLLVSEGTATPGSSPSPDGPVGAPAPSEPALPPGHVSPEDPGMGSQVQPGPGRVSRSTSDPTLCTSSMAGDASSHRPSCSQDLEAGLSEAVPGSASMSRSATAACRAQLSPAGDPDTWKTDQRPTPEPFPATSKERPRSLVDSKAYADARVLVAKFLEHSHCALPTEAQHMVGAMRLAVTNEERLEEEAVFGADVLDQV

SEQ ID NO: 14963 - protein, 343 aa, Homo sapiens
MCCMQMVSSDVLQMFLPQRSHPANPTCVTPHGTVLHQTLDFDEFIPPLPPPPYYPPEYTCTPSTEAQRGLHLDFAPSPFGTLYDVAINSPGLLYPAELPPPYEAVVGQPPASQVTSIGQQVAESSSGDPNTSAGFSTPVPADSTSLLVSEGTATPGSSPSPDGPVGAPAPSEPALPPGHVSPEDPGMGSQVQPGPGRVSRSTSDPTLCTSSMAGDASSHRPSCSQDLEAGLSEAVPGSASMSRSATAACRAQLSPAGDPDTWKTDQRPTPEPFPATSKERPRSLVDSKAYADARVLVAKFLEHSHCALPTEAQHMVGAMRLAVTNEERLEEEAVFGADVLDQV

SEQ ID NO: 14964 - protein, 128 aa, Homo sapiens
MAFTGKFEMESEKNYDEFMKLLGISSDVIEKARNFKIVTEVQQDGQDFTWSQHYSGGHTMTNKFTVGKESNIQTMGGKTFKATVQMEGGKLVVNFPNYHQTSEIVGDKLVEVSTIGGVTYERVSKRLA

SEQ ID NO: 14965 - protein, 177 aa, Homo sapiens
MKTVTMMMVVEMQALTQVLRAVLSACTWVSRKGDLQRMKQTHKGKPPSSMAFTGKFEMESEKNYDEFMKLLGISSDVIEKARNFKIVTEVQQDGQDFTWSQHYSGGHTMTNKFTVGKESNIQTMGGKTFKATVQMEGGKLVVNFPNYHQTSEIVGDKLVEVSTIGGVTYERVSKRLA

SEQ ID NO: 14966 - protein, 520 aa, Homo sapiens
MPLELTQSRVQKIWVPVDHRPSLPRSCGPKLTNSPTVIVMVGLPARGKTYISKKLTRYLNWIGVPTKVFNVGEYRREAVKQYSSYNFFRPDNEEAMKVRKQCALAALRDVKSYLAKEGGQIAVFDATNTTRERRHMILHFAKENDFKAFFIESVCDDPTVVASNIMEVKISSPDYKDCNSAEAMDDFMKRISCYEASYQPLDPDKCDRDLSLIKVIDVGRRFLVNRVQDHIQSRIVYYLMNIHVQPRTIYLCRHGENEHNLQGRIGGDSGLSSRGKKFASALSKFVEEQNLKDLRVWTSQLKSTIQTAEALRLPYEQWKALNEIDAGVCEELTYEEIRDTYPEEYALREQDKYYYRYPTGESYQDLVQRLEPVIMELERQENVLVICHQAVLRCLLAYFLDKSAEEMPYLKCPLHTVLKLTPVAYGCRVESIYLNVESVCTHRERSEDAKKGPNPLMRRNSVTPLASPEPTKKPRINSFEEHVASTSAALPSCLPPEVPTQLPGQNMKGSRSSADSSRKH

SEQ ID NO: 14967 - protein, 514 aa, Homo sapiens
MPLELTQSRVQKIWVPVDHRPSLPRSCGPKLTNSPTVIVMVGLPARGKTYISKKLTRYLNWIGVPTKVFNVGEYRREAVKQYSSYNFFRPDNEEAMKVRKQCALAALRDVKSYLAKEGGQIAVFDATNTTRERRHMILHFAKENDFKAFFIESVCDDPTVVASNIMEVKISSPDYKDCNSAEAMDDFMKRISCYEASYQPLDPDKCDRDLSLIKVIDVGRRFLVNRVQDHIQSRIVYYLMNIHVQPRTIYLCRHGENEHNLQGRIGGDSGLSSRGKKFASALSKFVEEQNLKDLRVWTSQLKSTIQTAEALRLPYEQWKALNEIDAGVCEELTYEEIRDTYPEEYALREQDKYYYRYPTGESYQDLVQRLEPVIMELERQENVLVICHQAVLRCLLAYFLDKSAEEMPYLKCPLHTVLKLTPVAYGCRVESIYLNVESVCTHRERSEDAKKGPNPLMRRNSVTPLASPEPTKKPRINSFEEHVASTSAALPSCLPPEVPTQLPGQPLLGQACLT

SEQ ID NO: 14968 - protein, 500 aa, Homo sapiens
MPFRKACGPKLTNSPTVIVMVGLPARGKTYISKKLTRYLNWIGVPTKVFNVGEYRREAVKQYSSYNFFRPDNEEAMKVRKQCALAALRDVKSYLAKEGGQIAVFDATNTTRERRHMILHFAKENDFKAFFIESVCDDPTVVASNIMEVKISSPDYKDCNSAEAMDDFMKRISCYEASYQPLDPDKCDRDLSLIKVIDVGRRFLVNRVQDHIQSRIVYYLMNIHVQPRTIYLCRHGENEHNLQGRIGGDSGLSSRGKKFASALSKFVEEQNLKDLRVWTSQLKSTIQTAEALRLPYEQWKALNEIDAGVCEELTYEEIRDTYPEEYALREQDKYYYRYPTGESYQDLVQRLEPVIMELERQENVLVICHQAVLRCLLAYFLDKSAEEMPYLKCPLHTVLKLTPVAYGCRVESIYLNVESVCTHRERSEDAKKGPNPLMRRNSVTPLASPEPTKKPRINSFEEHVASTSAALPSCLPPEVPTQLPGQNMKGSRSSADSSRKH

SEQ ID NO: 14969 - protein, 534 aa, Homo sapiens
MGEGGQKEGDSQQAGALPLLCQLDTFSPKATVFGVSINPACGPKLTNSPTVIVMVGLPARGKTYISKKLTRYLNWIGVPTKVFNVGEYRREAVKQYSSYNFFRPDNEEAMKVRKQCALAALRDVKSYLAKEGGQIAVFDATNTTRERRHMILHFAKENDFKAFFIESVCDDPTVVASNIMEVKISSPDYKDCNSAEAMDDFMKRISCYEASYQPLDPDKCDRDLSLIKVIDVGRRFLVNRVQDHIQSRIVYYLMNIHVQPRTIYLCRHGENEHNLQGRIGGDSGLSSRGKKFASALSKFVEEQNLKDLRVWTSQLKSTIQTAEALRLPYEQWKALNEIDAGVCEELTYEEIRDTYPEEYALREQDKYYYRYPTGESYQDLVQRLEPVIMELERQENVLVICHQAVLRCLLAYFLDKSAEEMPYLKCPLHTVLKLTPVAYGCRVESIYLNVESVCTHRERSEDAKKGPNPLMRRNSVTPLASPEPTKKPRINSFEEHVASTSAALPSCLPPEVPTQLPGQNMKGSRSSADSSRKH

SEQ ID NO: 14970 - protein, 214 aa, Homo sapiens
MSVPQIHVEEVGAEEGAGAAAPPDDHLRSLKALTEKLRLETRRPSYLEWQARLEEHTWPFPRPAAEPQASLEEGERGGQEPLLPLREAGQHPPSARSASQGARPLSTGKLEGFQSIDEAIAWLRKELTEMRLQDQQLARQLMRLRGDINKLKIEHTCRLHRRMLNDATYELEERDELADLFCDSPLASSFSLSTPLKLIGVTKMNINSRRFSLC

SEQ ID NO: 14971 - protein, 296 aa, Homo sapiens
MAPEENAGTELLLQGFERRFLAVRTLRSFPWQSLEAKLRDSSDSELLRDILQKTVRHPVCVKHPPSVKYAWCFLSELIKKSSGGSVTLSKSTAIISHGTTGLVTWDAALYLAEWAIENPAAFINRTVLELGSGAGLTGLAICKMCRPRAYIFSDPHSRVLEQLRGNVLLNGLSLEADITGNLDSPRVTVAQLDWDVAMVHQLSAFQPDVVIAADVLYCPEAIVSLVGVLQRLAACREHKRAPEVYVAFTVRNPETCQLFTTELGRDGIRWEAEAHHDQKLFPYGEHLEMAMLNLTL

SEQ ID NO: 14972 - protein, 153 aa, Homo sapiens
MAPEENAGTELLLQGFERRFLAVRTLRSFPWQSLEAKLRDSSDSELLRDILQKTVRHPVCVKHPPSVKYAWCFLSELIKKSSGGSVTLSKSTAIISHGTTGLVTWDAALYLAEWAIENPAAFINRRAVLPRSHRVAGRGPAEAGCLPGAQAGS

SEQ ID NO: 14973 - protein, 119 aa, Homo sapiens
MPAVFMLASSSALQCGRGVPRFPRTEVGAGHSVNEETKAEKVGNQTSVIPATSRQAALGTSWTQRRTQPLQERSHWHPRGNNASGMGGHRMFPGPLRGPAAQVLENECGSLGRAAEGRS

SEQ ID NO: 14974 - protein, 349 aa, Homo sapiens
MEDPQSKEPAGEAVALALLESPRPEGGEEPPRPSPEETQQCKFDGQETKGSKFITSSASDFSDPVYKEIAITNGCINRMSKEELRAKLSEFKLETRGVKDVLKKRLKNYYKKQKLMLKESNFADSYYDYICIIDFEATCEEGNPPEFVHEIIEFPVVLLNTHTLEIEDTFQQYVRPEINTQLSDFCISLTGITQDQVDRADTFPQVLKKVIDWMKLKELGTKYKYSLLTDGSWDMSKFLNIQCQLSRLKYPPFAKKWINIRKSYGNFYKVPRSQTKLTIMLEKLGMDYDGRPHCGLDDSKNIARIAVRMLQDGCELRINEKMHAGQLMSVSSSLPIEGTPPPQMPHFRK

SEQ ID NO: 14975 - protein, 691 aa, Homo sapiens
MATKRLARQLGLIRRKSIAPANGNLGRSKSKQLFDYLIVIDFESTCWNDGKHHHSQEIIEFPAVLLNTSTGQIDSEFQAYVQPQEHPILSEFCMELTGIKQAQVDEGVPLKICLSQFCKWIHKIQQQKNIIFATGISEPSASEVKLCAFVTWSDWDLGVCLEYECKRKQLLKPVFLNSWIDLRATYKLFYRRKPKGLSGALQEVGIEFSGREHSGLDDSRNTALLAWKMIRDGCVMKITRSLNKVPTKKNFSILARNLNTIQVEEMSACNISIQGPSIYNKEPKNIINPHEKVQMKSICANSPIKAQQDQLQVKNNIKASLHNVKSSLPLFNTKSSTSVGQLQSPTLNSPIYMQKQGKNEHLAFNTKSKASTVGSELVLVSTTVPTVHHVSDLEMSSTLDCLPVLADWEDVVLLPASQPEENVDCTVPISDSDLEISFNSGERLMVLKELEMSSHENFGDIEETPQKSETSKSIVYKSPHTTIYNVKEAKDPGSDISAFKLPEHKSSTFNRVNANMSHPLVLGKHPLLSGGTKRNPCSPQAFPPAKKQPFTIHEEKPTSSDCSPVRSSSWRRLPSILTSTVNLQEPWKSGKMTPPLCKCGRRSKRLVVSNNGPNHGKVFYCCPIGKYQENRKCCGYFKWEQTLQKERANSMVPSHSTGGLTFSSPETSHICDRNLSISTKNSLRLRPSMRN

SEQ ID NO: 14976 - protein, 598 aa, Homo sapiens
MELTGIKQAQVDEGVPLKICLSQFCKWIHKIQQQKNIIFATGISEPSASEVKLCAFVTWSDWDLGVCLEYECKRKQLLKPVFLNSWIDLRATYKLFYRRKPKGLSGALQEVGIEFSGREHSGLDDSRNTALLAWKMIRDGCVMKITRSLNKVPTKKNFSILARNLNTIQVEEMSACNISIQGPSIYNKEPKNIINPHEKVQMKSICANSPIKAQQDQLQVKNNIKASLHNVKSSLPLFNTKSSTSVGQLQSPTLNSPIYMQKQGKNEHLAFNTKSKASTVGSELVLVSTTVPTVHHVSDLEMSSTLDCLPVLADWEDVVLLPASQPEENVDCTVPISDSDLEISFNSGERLMVLKELEMSSHENFGDIEETPQKSETSKSIVYKSPHTTIYNVKEAKDPGSDISAFKLPEHKSSTFNRVNANMSHPLVLGKHPLLSGGTKRNPCSPQAFPPAKKQPFTIHEEKPTSSDCSPVRSSSWRRLPSILTSTVNLQEPWKSGKMTPPLCKCGRRSKRLVVSNNGPNHGKVFYCCPIGKYQENRKCCGYFKWEQTLQKERANSMVPSHSTGGLTFSSPETSHICDRNLSISTKNSLRLRPSMRN

SEQ ID NO: 14977 - protein, 279 aa, Homo sapiens
MATKRLARQLGLIRRKSIAPANGNLGRSKSKQLFDYLIVIDFESTCWNDGKHHHSQEIIEFPAVLLNTSTGQIDSEFQAYVQPQEHPILSEFCMELTGIKQAQVDEGVPLKICLSQFCKWIHKIQQQKNIIFATGISEPSASEVKLCAFVTWSDWDLGVCLEYECKRKQLLKPVFLNSWIDLRATYKLFYRRKPKGLSGALQEVGIEFSGREHSGLDDSRNTALLAWKMIRDGCVMKITRSLNKVVPKGIHAVPKLSHQQKNNPSLFMKKSLHHLIAPQ

SEQ ID NO: 14978 - protein, 328 aa, Homo sapiens
MATKRLARQLGLIRRKSIAPANGNLGRSKSKQLFDYLIVIDFESTCWNDGKHHHSQEIIEFPAVLLNTSTGQIDSEFQAYVQPQEHPILSEFCMELTGIKQAQVDEGVPLKICLSQFCKWIHKIQQQKNIIFATGISEPSASEVKLCAFVTWSDWDLGVCLEYECKRKQLLKPVFLNSWIDLRATYKLFYRRKPKGLSGALQEVGIEFSGREHSGLDDSRNTALLAWKMIRDGCVMKITRSLNKGPFLLPSWTWNSDLASGDQHAFLQQEFGCGTYRTLLQKPNMSKQEKGNILWLTMVWLSLACLQRKNYNDCMLNTASQTVTTEKF

SEQ ID NO: 14979 - protein, 1530 aa, Homo sapiens
MSHSHPAGLLAAYNSLMDKHLAGYFNNTRIRRHLLRSGLITRSGRILSEKEYKLNMMKRDHQKYIRECLAQAIFHKVLDMERYHQLEIKKKLETLARKERIQRFKGEHTRRSVENNMPILSPHPPVGPKSNRGHSVLVDEGHSSPLALTAPRPYTAPGNMQPPIRLQPLPSNPAVETVPKVTSRSRSKTSLLENEALFPIGGKKAVMKFRNSIGNSQRMNSYQLPNINSYMMPIPPPLPPTGKITRENRSETWRRRRFRPTTAPNGLEPLLTKDSRRIHKTSLHSNAAITMIYLGKNVHLSSDNPDFRDEIKVYQQHCGGENLCVYKGKLLEKETFQFISKRHHGFPFSLTFFLNGMQVNRLSSCCEYKHRKGSRLGGKRGYFGFVCVERSSPCYKCIIAMGLDKKPSLPKSRKEKSTEKGEELKKAEGKVRKEREYVIPKRNEIKENKTSVSAKFSAQEIKTGLKEVVTAVEEMTSKGKPGQEVLEDDQENTLKYEYEEDFEVDEEKQGEKSNEEGQADVQMNGIPQSPLDDKKDNLDPEKESETSSQKAPDARDNVKDENDGCSESELEEDKQDMKTASSTSSRSHPYSSDSEDESAVGDREAHTDSSTDESARRSSSQELSENDKPRKSHLPIEESLEIEIEDQEITKADVETKPMPIDESFENVLKEGTEKGTQEIAEGLSEKSGKHVSAEEKEKDKSKLWEESTAQVKDKKAGLPGLEEGGKDSLPLAYVLALGAPTMNFMVDETAAINSNKESQQLVQKTYTLEKKEAMEEDEAPQHRDADIVQGKGEAALWGEAGAVHEAPLRAWKPTAEQPELAEEFTEKREIPPGIERGAEGAAEAEGVRRLGEGGSDPIGQAAAKDAVGLSKDEAPEKQALMLTVLETDKAASEGEQGLEKAVLANEAAALNLEHLHEVAALREAATSEEGEAEGGVAVSDVGESEEEASIDLEDTGPMEDTASKREDGSEEAILGGEEPAKERKEVMRTETRLSPFTGEAEASRMQVSEGSPEEGSLAKEAFLCKEDVEGEEMVTEAEANREDDRKEILPKELDLARERRKAERPKTSLRKTDSEREEVTRANALKDEDAFKEEQKLKAEEGETETEVRAEEETKAPPNEMGSDAENEAPVEASELSDNPGLLGEDSLKETVVPIFEATPGFEKSLENITALRKEGGGERLSEARDTEHKDREELSSRENRALKEGHRQDGEGALAAPEAEPAGKVQAPEGLIPATGQAEELAAKDHDSCAGLEGRAEGQGGVDVVLRTQEAVAEEDPIMAEKFREEAVDEDPEEEEDKECTLETEAMQDRNSEGDGDMEGEGNTQKNEGMGGGRVVAVEVLHGGGETAETAAEEREVLAGSETAEEKTIANKASSFSDVAEEETWHQQDELVGKTAAAGKVVVEELARSGEEVPAAEEMTVTYTTEAGVGTPGALERKTSGLGQEQEEGSEGQEAATGSGDGRQETGAAEKFRLGLSREGERELSPESLQAMATLPVKPDFTETREKQQHMVQGESETADVSPNNVQV

SEQ ID NO: 14980 - protein, 788 aa, Homo sapiens
MNFMVDETAAINSNKESQQLVQKTYTLEKKEAMEEDEAPQHRDADIVQGKGEAALWGEAGAVHEAPLRAWKPTAEQPELAEEFTEKREIPPGIERGAEGAAEAEGVRRLGEGGSDPIGQAAAKDAVGLSKDEAPEKQALMLTVLETDKAASEGEQGLEKAVLANEAAALNLEHLHEVAALREAATSEEGEAEGGVAVSDVGESEEEASIDLEDTGPMEDTASKREDGSEEAILGGEEPAKERKEVMRTETRLSPFTGEAEASRMQVSEGSPEEGSLAKEAFLCKEDVEGEEMVTEAEANREDDRKEILPKELDLARERRKAERPKTSLRKTDSEREEVTRANALKDEDAFKEEQKLKAEEGETETEVRAEEETKAPPNEMGSDAENEAPVEASELSDNPGLLGEDSLKETVVPIFEATPGFEKSLENITALRKEGGGERLSEARDTEHKDREELSSRENRALKEGHRQDGEGALAAPEAEPAGKVQAPEGLIPATGQAEELAAKDHDSCAGLEGRAEGQGGVDVVLRTQEAVAEEDPIMAEKFREEAVDEDPEEEEDKECTLETEAMQDRNSEGDGDMEGEGNTQKNEGMGGGRVVAVEVLHGGGETAETAAEEREVLAGSETAEEKTIANKASSFSDVAEEETWHQQDELVGKTAAAGKVVVEELARSGEEVPAAEEMTVTYTTEAGVGTPGALERKTSGLGQEQEEGSEGQEAATGSGDGRQETGAAEKFRLGLSREGERELSPESLQAMATLPVKPDFTETREKQQHMVQGESETADVSPNNVQV

SEQ ID NO: 14981 - protein, 533 aa, Homo sapiens
MLAKGKKAVMKFRNSIGNSQRMNSYQLPNINSYMMPIPPPLPPTGKITRENRSETWRRRRFRPTTAPNGLEPLLTKDSRRIHKTSLHSNAAITMIYLGKNVHLSSDNPDFRDEIKVYQQHCGGENLCVYKGKLLEKETFQFISKRHHGFPFSLTFFLNGMQVNRLSSCCEYKHRKGSRLGGKRGYFGFVCVERSSPCYKCIIAMGLDKKPSLPKSRKEKSTEKGEELKKAEGKVRKEREYVIPKRNEIKENKTSVSAKFSAQEIKTGLKEVVTAVEEMTSKGKPGQEVLEDDQENTLKYEYEEDFEVDEEKQGEKSNEEGQADVQMNGIPQSPLDDKKDNLDPEKESETSSQKAPDARDNVKDENDGCSESELEEDKQDMKTASSTSSRSHPYSSDSEDESAVGDREAHTDSSTDESARRSSSQELSENDKPRKSHLPIEESLEIEIEDQEITKADVETKPMPIDESFENVLKEGTEKGTQEIAEGLSEKSGKHVSAEEKEKDKSKLWEESTAQVKDKKAGLPGLEEGGKYGR

SEQ ID NO: 14982 - protein, 458 aa, Homo sapiens
MDSVELCLPESFSLHYEEELLCRMSNKDRHIDSSCSSFIKTEPSSPASLTDSVNHHSPGGSSDASGSYSSTMNGHQNGLDSPPLYPSAPILGGSGPVRKLYDDCSSTIVEDPQTKCEYMLNSMPKRLCLVCGDIASGYHYGVASCEACKAFFKRTIQGNIEYSCPATNECEITKRRRKSCQACRFMKCLKVGMLKEGVRLDRVRGGRQKYKRRIDAENSPYLNPQLVQPAKKPYNKIVSHLLVAEPEKIYAMPDPTVPDSDIKALTTLCDLADRELVVIIGWAKHIPGFSTLSLADQMSLLQSAWMEILILGVVYRSLSFEDELVYADDYIMDEDQSKLAGLLDLNNAILQLVKKYKSMKLEKEEFVTLKAIALANSDSMHIEDVEAVQKLQDVLHEALQDYEAGQHMEDPRRAGKMLMTLPLLRQTSTKAVQHFYNIKLEGKVPMHKLFLEMLEAKV

SEQ ID NO: 14983 - protein, 435 aa, Homo sapiens
MSNKDRHIDSSCSSFIKTEPSSPASLTDSVNHHSPGGSSDASGSYSSTMNGHQNGLDSPPLYPSAPILGGSGPVRKLYDDCSSTIVEDPQTKCEYMLNSMPKRLCLVCGDIASGYHYGVASCEACKAFFKRTIQGNIEYSCPATNECEITKRRRKSCQACRFMKCLKVGMLKEGVRLDRVRGGRQKYKRRIDAENSPYLNPQLVQPAKKPYNKIVSHLLVAEPEKIYAMPDPTVPDSDIKALTTLCDLADRELVVIIGWAKHIPGFSTLSLADQMSLLQSAWMEILILGVVYRSLSFEDELVYADDYIMDEDQSKLAGLLDLNNAILQLVKKYKSMKLEKEEFVTLKAIALANSDSMHIEDVEAVQKLQDVLHEALQDYEAGQHMEDPRRAGKMLMTLPLLRQTSTKAVQHFYNIKLEGKVPMHKLFLEMLEAKV

SEQ ID NO: 14984 - protein, 442 aa, Homo sapiens
MSNKDRHIDSSCSSFIKTEPSSPASLTDSVNHHSPGGSSDASGSYSSTMNGHQNGLDSPPLYPSAPILGGSGPVRKLYDDCSSTIVEDPQTKCEYMLNSMPKRLCLVCGDIASGYHYGVASCEACKAFFKRTIQGNIEYSCPATNECEITKRRRKSCQACRFMKCLKVGMLKEGVRLDRVRGGRQKYKRRIDAENSPYLNPQLVQPAKKPLLWSDPADNKIVSHLLVAEPEKIYAMPDPTVPDSDIKALTTLCDLADRELVVIIGWAKHIPGFSTLSLADQMSLLQSAWMEILILGVVYRSLSFEDELVYADDYIMDEDQSKLAGLLDLNNAILQLVKKYKSMKLEKEEFVTLKAIALANSDSMHIEDVEAVQKLQDVLHEALQDYEAGQHMEDPRRAGKMLMTLPLLRQTSTKAVQHFYNIKLEGKVPMHKLFLEMLEAKV

SEQ ID NO: 14985 - protein, 396 aa, Homo sapiens
MSNKDRHIDSSCSSFIKTEPSSPASLTDSVNHHSPGGSSDASGSYSSTMNGHQNGLDSPPLYPSAPILGGSGPVRKLYDDCSSTIVEDPQTKCEYMLNSMPKRLCLVCGDIASGYHYGVASCEACKAFFKRTIQGVRLDRVRGGRQKYKRRIDAENSPYLNPQLVQPAKKPYNKIVSHLLVAEPEKIYAMPDPTVPDSDIKALTTLCDLADRELVVIIGWAKHIPGFSTLSLADQMSLLQSAWMEILILGVVYRSLSFEDELVYADDYIMDEDQSKLAGLLDLNNAILQLVKKYKSMKLEKEEFVTLKAIALANSDSMHIEDVEAVQKLQDVLHEALQDYEAGQHMEDPRRAGKMLMTLPLLRQTSTKAVQHFYNIKLEGKVPMHKLFLEMLEAKV

SEQ ID NO: 14986 - protein, 470 aa, Homo sapiens
MWRECDWGLGAVKSDLACVPSAKRLLCRMSNKDRHIDSSCSSFIKTEPSSPASLTDSVNHHSPGGSSDASGSYSSTMNGHQNGLDSPPLYPSAPILGGSGPVRKLYDDCSSTIVEDPQTKCEYMLNSMPKRLCLVCGDIASGYHYGVASCEACKAFFKRTIQGNIEYSCPATNECEITKRRRKSCQACRFMKCLKVGMLKEGVRLDRVRGGRQKYKRRIDAENSPYLNPQLVQPAKKPLLWSDPADNKIVSHLLVAEPEKIYAMPDPTVPDSDIKALTTLCDLADRELVVIIGWAKHIPGFSTLSLADQMSLLQSAWMEILILGVVYRSLSFEDELVYADDYIMDEDQSKLAGLLDLNNAILQLVKKYKSMKLEKEEFVTLKAIALANSDSMHIEDVEAVQKLQDVLHEALQDYEAGQHMEDPRRAGKMLMTLPLLRQTSTKAVQHFYNIKLEGKVPMHKLFLEMLEAKV

SEQ ID NO: 14987 - protein, 138 aa, Homo sapiens
MDILPYLHMSHGKCPLLVRGKGEMEGEALLSCLAMNSLGEQEACLDLGSKTPSLEISSNNQERPTNREETGIICPERLFIYSSKDSSKRLPGGLCIKNKTTCVPVQLHPSSFPKCQEAIVSPQARVKLLNKIKMDTAL

SEQ ID NO: 14988 - protein, 258 aa, Homo sapiens
MTPPKLRASLSPSLLLLLSGCLLAAARREKGAASNVAEPVPGPTGGSSGRFLSPEQHACSWQLLLPAPEAAAGSELALRCQSPDGARHQCAYRGHPERCAAYAARRAHFWKQVLGGLRKKRRPCHDPAPLQARLCAGKKGHGAELRLVPRASPPARPTVAGFAGESKPRARNRGRTRERASGPAAGTPPPQSAPPKENPSERKTNEGKRKAALVPNEERPMGTGPDPDGLDGNAELTETYCAEKWHSLCNFFVNFWNG

SEQ ID NO: 14989 - protein, 605 aa, Homo sapiens
MDPAEAVLQEKALKFMCSMPRSLWLGCSSLADSMPSLRCLYNPGTGALTAFQNSSEREDCNNGEPPRKIIPEKNSLRQTYNSCARLCLNQETVCLASTAMKTENCVAKTKLANGTSSMIVPKQRKLSASYEKEKELCVKYFEQWSESDQVEFVEHLISQMCHYQHGHINSYLKPMLQRDFITALPARGLDHIAENILSYLDAKSLCAAELVCKEWYRVTSDGMLWKKLIERMVRTDSLWRGLAERRGWGQYLFKNKPPDGNAPPNSFYRALYPKIIQDIETIESNWRCGRHSLQRIHCRSETSKGVYCLQYDDQKIVSGLRDNTIKIWDKNTLECKRILTGHTGSVLCLQYDERVIITGSSDSTVRVWDVNTGEMLNTLIHHCEAVLHLRFNNGMMVTCSKDRSIAVWDMASPTDITLRRVLVGHRAAVNVVDFDDKYIVSASGDRTIKVWNTSTCEFVRTLNGHKRGIACLQYRDRLVVSGSSDNTIRLWDIECGACLRVLEGHEELVRCIRFDNKRIVSGAYDGKIKVWDLVAALDPRAPAGTLCLRTLVEHSGRVFRLQFDEFQIVSSSHDDTILIWDFLNDPAAQAEPPRSPSRTYTYISR

SEQ ID NO: 14990 - protein, 569 aa, Homo sapiens
MDPAEAVLQEKALKFMNSSEREDCNNGEPPRKIIPEKNSLRQTYNSCARLCLNQETVCLASTAMKTENCVAKTKLANGTSSMIVPKQRKLSASYEKEKELCVKYFEQWSESDQVEFVEHLISQMCHYQHGHINSYLKPMLQRDFITALPARGLDHIAENILSYLDAKSLCAAELVCKEWYRVTSDGMLWKKLIERMVRTDSLWRGLAERRGWGQYLFKNKPPDGNAPPNSFYRALYPKIIQDIETIESNWRCGRHSLQRIHCRSETSKGVYCLQYDDQKIVSGLRDNTIKIWDKNTLECKRILTGHTGSVLCLQYDERVIITGSSDSTVRVWDVNTGEMLNTLIHHCEAVLHLRFNNGMMVTCSKDRSIAVWDMASPTDITLRRVLVGHRAAVNVVDFDDKYIVSASGDRTIKVWNTSTCEFVRTLNGHKRGIACLQYRDRLVVSGSSDNTIRLWDIECGACLRVLEGHEELVRCIRFDNKRIVSGAYDGKIKVWDLVAALDPRAPAGTLCLRTLVEHSGRVFRLQFDEFQIVSSSHDDTILIWDFLNDPAAQAEPPRSPSRTYTYISR

SEQ ID NO: 14991 - protein, 802 aa, Homo sapiens
MRLLLALLGVLLSVPGPPVLSLEASEEVELEPCLAPSLEQQEQELTVALGQPVRLCCGRAERGGHWYKEGSRLAPAGRVRGWRGRLEIASFLPEDAGRYLCLARGSMIVLQNLTLITGDSLTSSNDDEDPKSHRDPSNRHSYPQQAPYWTHPQRMEKKLHAVPAGNTVKFRCPAAGNPTPTIRWLKDGQAFHGENRIGGIRLRHQHWSLVMESVVPSDRGTYTCLVENAVGSIRYNYLLDVLERSPHRPILQAGLPANTTAVVGSDVELLCKVYSDAQPHIQWLKHIVINGSSFGADGFPYVQVLKTADINSSEVEVLYLRNVSAEDAGEYTCLAGNSIGLSYQSAWLTVLPEEDPTWTAAAPEARYTDIILYASGSLALAVLLLLAGLYRGQALHGRHPRPPATVQKLSRFPLARQFSLESGSSGKSSSSLVRGVRLSSSGPALLAGLVSLDLPLDPLWEFPRDRLVLGKPLGEGCFGQVVRAEAFGMDPARPDQASTVAVKMLKDNASDKDLADLVSEMEVMKLIGRHKNIINLLGVCTQEGPLYVIVECAAKGNLREFLRARRPPGPDLSPDGPRSSEGPLSFPVLVSCAYQVARGMQYLESRKCIHRDLAARNVLVTEDNVMKIADFGLARGVHHIDYYKKTSNGRLPVKWMAPEALFDRVYTHQSDVWSFGILLWEIFTLGGSPYPGIPVEELFSLLREGHRMDRPPHCPPELYGLMRECWHAAPSQRPTFKQLVEALDKVLLAVSEEYLDLRLTFGPYSPSGGDASSTCSSSDSVFSHDPLPLGSSSFPFGSGVQT

SEQ ID NO: 14992 - protein, 762 aa, Homo sapiens
MRLLLALLGVLLSVPGPPVLSLEASEEVELEPCLAPSLEQQEQELTVALGQPVRLCCGRAERGGHWYKEGSRLAPAGRVRGWRGRLEIASFLPEDAGRYLCLARGSMIVLQNLTLITGDSLTSSNDDEDPKSHRDPSNRHSYPQQAPYWTHPQRMEKKLHAVPAGNTVKFRCPAAGNPTPTIRWLKDGQAFHGENRIGGIRLRHQHWSLVMESVVPSDRGTYTCLVENAVGSIRYNYLLDVLERSPHRPILQAGLPANTTAVVGSDVELLCKVYSDAQPHIQWLKHIVINGSSFGADGFPYVQVLKTADINSSEVEVLYLRNVSAEDAGEYTCLAGNSIGLSYQSAWLTVLPGTGRIPHLTCDSLTPAGRTKSPTLQFSLESGSSGKSSSSLVRGVRLSSSGPALLAGLVSLDLPLDPLWEFPRDRLVLGKPLGEGCFGQVVRAEAFGMDPARPDQASTVAVKMLKDNASDKDLADLVSEMEVMKLIGRHKNIINLLGVCTQEGPLYVIVECAAKGNLREFLRARRPPGPDLSPDGPRSSEGPLSFPVLVSCAYQVARGMQYLESRKCIHRDLAARNVLVTEDNVMKIADFGLARGVHHIDYYKKTSNGRLPVKWMAPEALFDRVYTHQSDVWSFGILLWEIFTLGGSPYPGIPVEELFSLLREGHRMDRPPHCPPELYGLMRECWHAAPSQRPTFKQLVEALDKVLLAVSEEYLDLRLTFGPYSPSGGDASSTCSSSDSVFSHDPLPLGSSSFPFGSGVQT

SEQ ID NO: 14993 - protein, 592 aa, Homo sapiens
MESVVPSDRGTYTCLVENAVGSIRYNYLLDVLERSPHRPILQAGLPANTTAVVGSDVELLCKVYSDAQPHIQWLKHIVINGSSFGADGFPYVQVLKTADINSSEVEVLYLRNVSAEDAGEYTCLAGNSIGLSYQSAWLTVLPEEDPTWTAAAPEARYTDIILYASGSLALAVLLLLAGLYRGQALHGRHPRPPATVQKLSRFPLARQFSLESGSSGKSSSSLVRGVRLSSSGPALLAGLVSLDLPLDPLWEFPRDRLVLGKPLGEGCFGQVVRAEAFGMDPARPDQASTVAVKMLKDNASDKDLADLVSEMEVMKLIGRHKNIINLLGVCTQEGPLYVIVECAAKGNLREFLRARRPPGPDLSPDGPRSSEGPLSFPVLVSCAYQVARGMQYLESRKCIHRDLAARNVLVTEDNVMKIADFGLARGVHHIDYYKKTSNGRLPVKWMAPEALFDRVYTHQSDVWSFGILLWEIFTLGGSPYPGIPVEELFSLLREGHRMDRPPHCPPELYGLMRECWHAAPSQRPTFKQLVEALDKVLLAVSEEYLDLRLTFGPYSPSGGDASSTCSSSDSVFSHDPLPLGSSSFPFGSGVQT

SEQ ID NO: 14994 - protein, 1114 aa, Homo sapiens
MAPTLLQKLFNKRGSSGSSAAASAQGRAPKEGPAFSWSCSEFDLNEIRLIVYQDCDRRGRQVLFDSKAVQKIEEVTAQKTEDVPIKISAKCCQGSSSVSSSSSSSISSHSSSGGSSHHAKEQLPKYQYTRPASDVNMLGEMMFGSVAMSYKGSTLKIHYIRSPPQLMISKVFSARMGSFCGSTNNLQDSFEYINQDPNLGKLNTNQNSLGPCRTGSNLAHSTPVDMPSRGQNEDRDSGIARSASLSSLLITPFPSPSSSTSSSSSYQRRWLRSQTTSLENGIIPRRSTDETFSLAEETCSSNPAMVRRKKIAISIIFSLCEKEEAQRNFQDFFFSHFPLFESHMNRLKSAIEKAMISCRKIAESSLRVQFYVSRLMEALGEFRGTIWNLYSVPRIAEPVWLTMMSGTLEKNQLCQRFLKEFTLLIEQINKNQFFAALLTAVLTYHLAWVPTVMPVDHPPIKAFSEKRTSQSVNMLAKTHPYNPLWAQLGDLYGAIGSPVRLTRTVVVGKQKDLVQRILYVLTYFLRCSELQENQLTWSGNHGEGDQVLNGSKIITALEKGEVEESEYVVITVRNEPALVPPILPPTAAERHNPWPTGFPECPEGTDSRDLGLKPDKEANRRPEQGSEACSAGCLGPASDASWKPQNAFCGDEKNKEAPQDGSSRLPSCEVLGAGMKMDQQAVCELLKVEMPTRLPDRSVAWPCPDRHLREKPSLEKVTFQIGSFASPESDFESRMKKMEERVKACGPSLEASEAADVAQDPQVSRSPFKPGFQENVCCPQNRLSEGDEGESDKGFAEDRGSRNDMAADIAGQLSHAADLGTASHGAGGTGGRRLEATRGLYVKAAEGPVLEPVAPRCVQRGPGLVAGANIPCGDDNKKANFRTEGDIPRNESSDSALGDSDDEACASAMLDLGHGGDRTGGSLEVELPLPRSQSISTQNVRNFGRSLLAGYCPTYMPDLVLHGTGSDEKLKQCLVADLVHTVHHPVLDEPIAEAVCIIADTDKWSVQVATSQRKVTDNMKLGQDVLVSSQVSSLLQSILQLYKLHLPADFCIMHLEDRLQEMYLKSKMLSEYLRGHTRVHVKELGVVLGIESNDLPLLTAIASTHSPYVAQILL

SEQ ID NO: 14995 - protein, 1137 aa, Homo sapiens
MCGGTANTTNQPESWQDSARCVSDAVPGAGRIYRALLCTKIKKHTGVDRSTDHTELDNSWSCSEFDLNEIRLIVYQDCDRRGRQVLFDSKAVQKIEEVTAQKTEDVPIKISAKCCQGSSSVSSSSSSSISSHSSSGGSSHHAKEQLPKYQYTRPASDVNMLGEMMFGSVAMSYKGSTLKIHYIRSPPQLMISKVFSARMGSFCGSTNNLQDSFEYINQDPNLGKLNTNQNSLGPCRTGSNLAHSTPVDMPSRGQNEDRDSGIARSASLSSLLITPFPSPSSSTSSSSSYQRRWLRSQTTSLENGIIPRRSTDETFSLAEETCSSNPAMVRRKKIAISIIFSLCEKEEAQRNFQDFFFSHFPLFESHMNRLKSAIEKAMISCRKIAESSLRVQFYVSRLMEALGEFRGTIWNLYSVPRIAEPVWLTMMSGTLEKNQLCQRFLKEFTLLIEQINKNQFFAALLTAVLTYHLAWVPTVMPVDHPPIKAFSEKRTSQSVNMLAKTHPYNPLWAQLGDLYGAIGSPVRLTRTVVVGKQKDLVQRILYVLTYFLRCSELQENQLTWSGNHGEGDQVLNGSKIITALEKGEVEESEYVVITVRNEPALVPPILPPTAAERHNPWPTGFPECPEGTDSRDLGLKPDKEANRRPEQGSEACSAGCLGPASDASWKPQNAFCGDEKNKEAPQDGSSRLPSCEVLGAGMKMDQQAVCELLKVEMPTRLPDRSVAWPCPDRHLREKPSLEKVTFQIGSFASPESDFESRMKKMEERVKACGPSLEASEAADVAQDPQVSRSPFKPGFQENVCCPQNRLSEGDEGESDKGFAEDRGSRNDMAADIAGQLSHAADLGTASHGAGGTGGRRLEATRGLYVKAAEGPVLEPVAPRCVQRGPGLVAGANIPCGDDNKKANFRTEGDIPRNESSDSALGDSDDEACASAMLDLGHGGDRTGGSLEVELPLPRSQSISTQNVRNFGRSLLAGYCPTYMPDLVLHGTGSDEKLKQCLVADLVHTVHHPVLDEPIAEAVCIIADTDKWSVQVATSQRKVTDNMKLGQDVLVSSQVSSLLQSILQLYKLHLPADFCIMHLEDRLQEMYLKSKMLSEYLRGHTRVHVKELGVVLGIESNDLPLLTAIASTHSPYVAQILL

SEQ ID NO: 14996 - protein, 257 aa, Homo sapiens
MAPAMESPTLLCVALLFFAPDGVLAVPQKPKVSLNPPWNRIFKGENVTLTCNGNNFFEVSSTKWFHNGSLSEETNSSLNIVNAKFEDSGEYKCQHQQVNESEPVYLEVFSDWLLLQASAEVVMEGQPLFLRCHGWRNWDVYKVIYYKDGEALKYWYENHNISITNATVEDSGTYYCTGKVWQLDYESEPLNITVIKAPREKYWLQFFIPLLVVILFAVDTGLFISTQQQVTFLLKIKRTRKGFRLLNPHPKPNPKNN

SEQ ID NO: 14997 - protein, 287 aa, Homo sapiens
MDPKQTTLLCLVLCLGQRIQAQEGDFPMPFISAKSSPVIPLDGSVKIQCQAIREAYLTQLMIIKNSTYREIGRRLKFWNETDPEFVIDHMDANKAGRYQCQYRIGHYRFRYSDTLELVVTGLYGKPFLSADRGLVLMPGENISLTCSSAHIPFDRFSLAKEGELSLPQHQSGEHPANFSLGPVDLNVSGIYRCYGWYNRSPYLWSFPSNALELVVTDSIHQDYTTQNLIRMAVAGLVLVALLAILVENWHSHTALNKEASADVAEPSWSQQMCQPGLTFARTPSVCK

SEQ ID NO: 14998 - protein, 265 aa, Homo sapiens
MDPKQTTLLCLVLCLGQRIQAQEGDFPMPFISAKSSPVIPLDGSVKIQCQAIREAYLTQLMIIKNSTYREIGRRLKFWNETDPEFVIDHMDANKAGRYQCQYRIGHYRFRYSDTLELVVTGLYGKPFLSADRGLVLMPGENISLTCSSAHIPFDRFSLAKEGELSLPQHQSGEHPANFSLGPVDLNVSGIYRCYDSIHQDYTTQNLIRMAVAGLVLVALLAILVENWHSHTALNKEASADVAEPSWSQQMCQPGLTFARTPSVCK

SEQ ID NO: 14999 - protein, 191 aa, Homo sapiens
MDPKQTTLLCLVLCLGQRIQAQEGDFPMPFISAKSSPVIPLDGSVKIQCQAIREAYLTQLMIIKNSTYREIGRRLKFWNETDPEFVIDHMDANKAGRYQCQYRIGHYRFRYSDTLELVVTDSIHQDYTTQNLIRMAVAGLVLVALLAILVENWHSHTALNKEASADVAEPSWSQQMCQPGLTFARTPSVCK

SEQ ID NO: 15000 - protein, 239 aa, Homo sapiens
MDPKQTTLLCLVLCLGQRIQAQEGDFPMPFISAKSSPVIPLDGSVKIQCQAIREAYLTQLMIIKNSTYREIGRRLKFWNETDPEFVIDHMDANKAGRYQCQYRIGHYRFRYSDTLELVVTGLYGKPFLSADRGLVLMPGENISLTCSSAHIPFDRFSLAKEGELSLPQHQSGEHPANFSLGPVDLNVSGIYRCYGWYNRSPYLWSFPSNALELVVTGRYRPVQPCVWVGCPGPCHRAGI

SEQ ID NO: 15001 - protein, 227 aa, Homo sapiens
MDPKQTTLLCLGDFPMPFISAKSSPVIPLDGSVKIQCQAIREAYLTQLMIIKNSTYREIGRRLKFWNETDPEFVIDHMDANKAGRYQCQYRIGHYRFRYSDTLELVVTGLYGKPFLSADRGLVLMPGENISLTCSSAHIPFDRFSLAKEGELSLPQHQSGEHPANFSLGPVDLNVSGIYRCYGWYNRSPYLWSFPSNALELVVTGRYRPVQPCVWVGCPGPCHRAGI

SEQ ID NO: 15002 - protein, 291 aa, Homo sapiens
MDPKQTTLLCLVLCLGQRIQAQEGRYISEHFWCRSLGCNPVNDASAQRPGDFPMPFISAKSSPVIPLDGSVKIQCQAIREAYLTQLMIIKNSTYREIGRRLKFWNETDPEFVIDHMDANKAGRYQCQYRIGHYRFRYSDTLELVVTGLYGKPFLSADRGLVLMPGENISLTCSSAHIPFDRFSLAKEGELSLPQHQSGEHPANFSLGPVDLNVSGIYRCYDSIHQDYTTQNLIRMAVAGLVLVALLAILVENWHSHTALNKEASADVAEPSWSQQMCQPGLTFARTPSVCK

SEQ ID NO: 15003 - protein, 178 aa, Homo sapiens
MDPKQTTLLCLGLYGKPFLSADRGLVLMPGENISLTCSSAHIPFDRFSLAKEGELSLPQHQSGEHPANFSLGPVDLNVSGIYRCYGWYNRSPYLWSFPSNALELVVTDSIHQDYTTQNLIRMAVAGLVLVALLAILVENWHSHTALNKEASADVAEPSWSQQMCQPGLTFARTPSVCK

SEQ ID NO: 15004 - protein, 209 aa, Homo sapiens
MDPKQTTLLCLGDFPMPFISAKSSPVIPLDGSVKIQCQAIREAYLTQLMIIKNSTYREIGRRLKFWNETDPEFVIDHMDANKAGRYQCQYRIGHYRFRYSDTLELVVTGLYGKPFLSADRGLVLMPGENISLTCSSAHIPFDRFSLAKEGELSLPQHQSGEHPANFSLGPVDLNVSGIYRLHPPRLHDAELDPHGRGRTGPRGSLGHTG

SEQ ID NO: 15005 - protein, 179 aa, Homo sapiens
MDPKQTTLLCLGDFPMPFISAKSSPVIPLDGSVKIQCQAIREAYLTQLMIIKNSTYREIGRRLKFWNETDPEFVIDHMDANKAGRYQCQYRIGHYRFRYSDTLELVVTDSIHQDYTTQNLIRMAVAGLVLVALLAILVENWHSHTALNKEASADVAEPSWSQQMCQPGLTFARTPSVCK

SEQ ID NO: 15006 - protein, 275 aa, Homo sapiens
MDPKQTTLLCLGDFPMPFISAKSSPVIPLDGSVKIQCQAIREAYLTQLMIIKNSTYREIGRRLKFWNETDPEFVIDHMDANKAGRYQCQYRIGHYRFRYSDTLELVVTGLYGKPFLSADRGLVLMPGENISLTCSSAHIPFDRFSLAKEGELSLPQHQSGEHPANFSLGPVDLNVSGIYRCYGWYNRSPYLWSFPSNALELVVTDSIHQDYTTQNLIRMAVAGLVLVALLAILVENWHSHTALNKEASADVAEPSWSQQMCQPGLTFARTPSVCK

SEQ ID NO: 15007 - protein, 253 aa, Homo sapiens
MDPKQTTLLCLGDFPMPFISAKSSPVIPLDGSVKIQCQAIREAYLTQLMIIKNSTYREIGRRLKFWNETDPEFVIDHMDANKAGRYQCQYRIGHYRFRYSDTLELVVTGLYGKPFLSADRGLVLMPGENISLTCSSAHIPFDRFSLAKEGELSLPQHQSGEHPANFSLGPVDLNVSGIYRCYDSIHQDYTTQNLIRMAVAGLVLVALLAILVENWHSHTALNKEASADVAEPSWSQQMCQPGLTFARTPSVCK

SEQ ID NO: 15008 - protein, 198 aa, Homo sapiens
MGKQKKTRKYATMKRMLSLRDQRLKEKDRLKPKKKEKKDPSALKEREVPQHPSCLFFQYNTQLGPPYHILVDTNFINFSIKAKLDLVQSMMDCLYAKCIPCITDCVMAEIEKLGQKYRVALRIAKDPRFERLPCTHKGTYADDCLVQRVTQHKCYIVATVDRDLKRRIRKIPGVPIMYISNHRYNIERMPDDYGAPRF

SEQ ID NO: 15009 - protein, 314 aa, Homo sapiens
MLVSGRRRLLTALLQAQKWPFQPSRDMRLVQFRAPHLVGPHLGLETGNGGGVINLNAFDPTLPKTMTQFLEQGEATLSVARRALAAQLPVLPWSEVTFLAPVTWPDKVVCVGMNYVDHCKEQNVPVPKEPIIFSKFASSIVGPYDEVVLPPQSQEVDWEVELAVVIGKKGKHIKATDAMAHVAGFTVAHDVSARDWLTRRNGKQWLLGKTFDTFCPLGPALVTKDSVADPHNLKICCRVNGEVVQSSNTNQMVFKTEDLIAWVSQFVTFYPGDVILTGTPPGVGVFRKPPVFLKKGDEVQCEIEELGVIINKVV

SEQ ID NO: 15010 - protein, 330 aa, Homo sapiens
MQPQSVLHSGYFHPLLRAWQTATTTLNASNLIYPIFVTDVPDDIQPITSLPGVARYGVKRLEEMLRPLVEEGLRCVLIFGVPSRVPKDERGSAADSEESPAIEAIHLLRKTFPNLLVACDVCLCPYTSHGHCGLLSENGAFRAEESRQRLAEVALAYAKAGCQVVAPSDMMDGRVEAIKEALMAHGLGNRVSVMSYSAKFASCFYGPFRDAAKSSPAFGDRRCYQLPPGARGLALRAVDRDVREGADMLMVKPGMPYLDIVREVKDKHPDLPLAVYHVSGEFAMLWHGAQAGAFDLKAAVLEAMTAFRRAGADIIITYYTPQLLQWLKEE

SEQ ID NO: 15011 - protein, 359 aa, Homo sapiens
MPPTSSTPSLSRPGLGQAGKPDTGSHPPPTISTSIFLSCFPTIPLSRPRTTGPSHSYQSISHPRSCRDVPDDIQPITSLPGVARYGVKRLEEMLRPLVEEGLRCVLIFGVPSRVPKDERGSAADSEESPAIEAIHLLRKTFPNLLVACDVCLCPYTSHGHCGLLSENGAFRAEESRQRLAEVALAYAKAGCQVVAPSDMMDGRVEAIKEALMAHGLGNRVSVMSYSAKFASCFYGPFRDAAKSSPAFGDRRCYQLPPGARGLALRAVDRDVREGADMLMVKPGMPYLDIVREVKDKHPDLPLAVYHVSGEFAMLWHGAQAGAFDLKAAVLEAMTAFRRAGADIIITYYTPQLLQWLKEE

SEQ ID NO: 15012 - protein, 280 aa, Homo sapiens
MSESFDCAKCNESLYGRKYIQTDSGPYCVPCYDNTFANTCAECQQLIGHDSRELFYEDRHFHEGCFRCCRCQRSLADEPFTCQDSELLCNDCYCSAFSSQCSACGETVMPGSRKLEYGGQTWHEHCFLCSGCEQPLGSRSFVPDKGAHYCVPCYENKFAPRCARCSKTLTQGGVTYRDQPWHRECLVCTGCQTPLAGQQFTSRDEDPYCVACFGELFAPKCSSCKRPIVGLGGGKYVSFEDRHWHHNCFSCARCSTSLVGQGFVPDGDQVLCQGCSQAGP

SEQ ID NO: 15013 - protein, 180 aa, Homo sapiens
MEAARRPRLGLSRRRPRPAGGPSGGRPWFLLGGDERERLWAELLRTVSPELILDHEVPSLPAFPGQEPRCGPEPTEVFTVGPKTFSWTPFPPDLWGPGRSYRLLHGAGGHLESPARSLPQRPAPDPCRAPRVEQQPSVEGAAALRSCPMCQKEFAPRLTQLDVDSHLAQCLAESTEDVTW

SEQ ID NO: 15014 - protein, 283 aa, Homo sapiens
MCGPEHLLCCPKDLAMFPRQLSLTACLPGTPVSHKCHHIWLWVGVPAWHPRASRCGGAQPSSWLRQKAARAFWLSLPAAKLRHHSSRWLRRSGAFSSGSTLKPPPSPSPAPLCHADNLRTGRTRPSGGRPWFLLGGDERERLWAELLRTVSPELILDHEVPSLPAFPGQEPRCGPEPTEVFTVGPKTFSWTPFPPDLWGPGRSYRLLHGAGGHLESPARSLPQRPAPDPCRAPRVEQQPSVEGAAALRSCPMCQKEFAPRLTQLDVDSHLAQCLAESTEDVTW

SEQ ID NO: 15015 - protein, 230 aa, Homo sapiens
MNFGLEKTHFHCARVSPNQKLFSNKAKLRHHSSRWLRRSGAFSSGSTLKPPPSPSPAPLCHADNLRTGRTRPSGGRPWFLLGGDERERLWAELLRTVSPELILDHEVPSLPAFPGQEPRCGPEPTEVFTVGPKTFSWTPFPPDLWGPGRSYRLLHGAGGHLESPARSLPQRPAPDPCRAPRVEQQPSVEGAAALRSCPMCQKEFAPRLTQLDVDSHLAQCLAESTEDVTW

SEQ ID NO: 15016 - protein, 195 aa, Homo sapiens
MEAARRPRLGLSRRRPRPAGGPSGGRPWFLLGGDERERLWAELLRTVSPELILDHEVPSLPAFPGQEPRCGPEPTEVFTVGPKTFSWTPFPPDLWGPGRSYRLLHGAGGHLESPARSLPQRPAPDPCRAPRVEQQPSVEGAAALRSCPMCQKEFAPRLTQLDVDSHLAQCLAESTEDVTCLSWMCKTLNDPGSQG

SEQ ID NO: 15017 - protein, 170 aa, Homo sapiens
MEAARRPRLGLSRRRPRPAGGPSGGRPWFLLGGDERERLWAELLRTVSPELILDHEVPSLPAFPGQEPRCGPEPTEVFTVGPKTFSWTPFPPDLWGPGRSYRLLHGAGGHLESPARSLPQRPAPDPCRAPRVEQQPSVEGAAALRSCPMCQKEFAPRYFNSRPHLCPAGS

SEQ ID NO: 15018 - protein, 112 aa, Homo sapiens
MEAARRPRLGLSRRRPRPAGGSPGAARSPLKSSLSDPRPFPGHPFRRTCGARAVPTGCFTGQEGTWNPPPGPCPSARHLIPAGPPGWSSSRLWRVPRPCAAAPCARRSSPPG

SEQ ID NO: 15019 - protein, 286 aa, Homo sapiens
MAAPAPGAGAASGGAGCSGGGAGAGAGSGSGAAGAGGRLPSRVLELVFSYLELSELRSCALVCKHWYRCLHGDENSEVWRSLCARSLAEEALRTDILCNLPSYKAKIRAFQHAFSTNDCSRNVYIKKNGFTLHRNPIAQSTDGARTKIGFSEGRHAWEVWWEGPLGTVAVIGIATKRAPMQCQGYVALLGSDDQSWGWNLVDNNLLHNGEVNGSFPQCNNAPKYQIGERIRVILDMEDKTLAFERGYEFLGVAFRGLPKVCLYPAVSAVYGNTEVTLVYLGKPLDG

SEQ ID NO: 15020 - protein, 230 aa, Homo sapiens
MRLAGPLRIVVLVVSVGVTWIVVSILLGGPGSGFPRIQQLFTSPESSVTAAPRARKYKCGLPQPCPEEHLAFRVVSGAANVIGPKICLEDKMLMSSVKDNVGRGLNIALVNGVSGELIEARAFDMWAGDVNDLLKFIRPLHEGTLVFVASYDDPATKMNEETRKLFSELGSRNAKELAFRDSWVFVGAKGVQNKSPFEQHVKNSKHSNKYEGWPEALEMEGCIPRRSTAS

SEQ ID NO: 15021 - protein, 213 aa, Homo sapiens
MRLAGPLRIVVLVVSVGVTWIVVSILLGGPGSGFPRIQQLFTSPESSVTAAPRARKYKCGLPQPCPEEHLAFRVVSGAANVIGPKICLEDKMLMSSVKDNVGRGLNIALVNDVNDLLKFIRPLHEGTLVFVASYDDPATKMNEETRKLFSELGSRNAKELAFRDSWVFVGAKGVQNKSPFEQHVKNSKHSNKYEGWPEALEMEGCIPRRSTAS

SEQ ID NO: 15022 - protein, 192 aa, Homo sapiens
MRLAGPESSVTAAPRARKYKCGLPQPCPEEHLAFRVVSGAANVIGPKICLEDKMLMSSVKDNVGRGLNIALVNGVSGELIEARAFDMWAGDVNDLLKFIRPLHEGTLVFVASYDDPATKMNEETRKLFSELGSRNAKELAFRDSWVFVGAKGVQNKSPFEQHVKNSKHSNKYEGWPEALEMEGCIPRRSTAS

SEQ ID NO: 15023 - protein, 558 aa, Homo sapiens
MAALTRDPQFQKLQQWYREHRSELNLRRLFDANKDRFNHFSLTLNTNHGHILVDYSKNLVTEDVMRMLVDLAKSRGVEAARERMFNGEKINYTEGRAVLHVALRNRSNTPILVDGKDVMPEVNKVLDKMKSFCQRVRSGDWKGYTGKTITDVINIGIGGSDLGPLMVTEALKPYSSGGPRVWYVSNIDGTHIAKTLAQLNPESSLFIIASKTFTTQETITNAETAKEWFLQAAKDPSAVAKHFVALSTNTTKVKEFGIDPQNMFEFWDWVGGRYSLWSAIGLSIALHVGFDNFEQLLSGAHWMDQHFRTTPLEKNAPVLLALLGIWYINCFGCETHAMLPYDQYLHRFAAYFQQGDMESNGKYITKSGTRVDHQTGPIVWGEPGTNGQHAFYQLIHQGTKMIPCDFLIPVQTQHPIRKGLHHKILLANFLAQTEALMRGKSTEEARKELQAAGKSPEDLERLLPHKVFEGNRPTNSIVFTKLTPFMLGALVAMYEHKIFVQGIIWDINSFDQWGVELGKQLAKKIEPELDGSAQVTSHDASTNGLINFIKQQREARVQ

SEQ ID NO: 15024 - protein, 569 aa, Homo sapiens
MVALCSLQHLGSSDPRALPTLPTATSGQRPAKRRRKSPAMAALTRDPQFQKLQQWYREHRSELNLRRLFDANKDRFNHFSLTLNTNHGHILVDYSKNLVTEDVMRMLVDLAKSRGVEAARERMFNGEKINYTEGRAVLHVALRNRSNTPILVDGKDVMPEVNKVLDKMKSFCQGPLMVTEALKPYSSGGPRVWYVSNIDGTHIAKTLAQLNPESSLFIIASKTFTTQETITNAETAKEWFLQAAKDPSAVAKHFVALSTNTTKVKEFGIDPQNMFEFWDWVGGRYSLWSAIGLSIALHVGFDNFEQLLSGAHWMDQHFRTTPLEKNAPVLLALLGIWYINCFGCETHAMLPYDQYLHRFAAYFQQGDMESNGKYITKSGTRVDHQTGPIVWGEPGTNGQHAFYQLIHQGTKMIPCDFLIPVQTQHPIRKGLHHKILLANFLAQTEALMRGKSTEEARKELQAAGKSPEDLERLLPHKVFEGNRPTNSIVFTKLTPFMLGALVAMYEHKIFVQGIIWDINSFDQWGVELGKQLAKKIEPELDGSAQVTSHDASTNGLINFIKQQREARVQ

SEQ ID NO: 15025 - protein, 84 aa, Homo sapiens
MALSSQIWAACLLLLLLLASLTSGSVFPQQTGQLAELQPQDRAGARASWMPMFQRRRRRDTHFPICIFCCGCCHRSKCGMCCKT

SEQ ID NO: 15026 - protein, 666 aa, Homo sapiens
MGQTKSKIKSKYASYLSFIKILLKRGGVKVSTKNLIKLFQIIEQFCPWFPEQGTSDLKDWKRIGKELKQAGRKGNIIPLTVWNDWAIIKAALEPFQTEEDSISVSDAPGSCLIDCNENTRKKSQKETESLHCEYVAEPVMAQSTQNVDYNQLQEVIYPETLKLEGKGPELMGPSESKPRGTSPLPAGQVLVRLQPQKQVKENKTQPQVAYQYWPLAELQYRPPPESQYGYPGMPPAPQGRAPYHQPPTRRLNPMAPPSRQGSELHEIIDKSRKEGDTEAWQFPVTLEPMPPGEGAQEGEPPTVEARYKSFSIKMLKDMKEGVKQYGPNSPYMRTLLDSIAYGHRLIPYDWEILAKSSLSPSQFLQFKTWWIDGVQEQVRRNRAANPPVNIDADQLLGIGQNWSTISQQALMQNEAIEQVRAICLRAWEKIQDPGSTCPSFNTVRQGSKEPYPDFVARLQDVAQKSIADEKAGKVIVELMAYENANPECQSAIKPLKGKVPAGSDVISEYVKACDGIGGAMHKAMLMAQAITGVVLGGQVRTFGGKCYNCGQIGHLKKNCPVLNKQNITIQATTTGREPPDLCPRCKKGKHWASQCRSKFDKNGQPLSGNEQRGQPQAPQQTGAFPIQPFVPQGFQGQQPPLSQVFQGISQLPQYNNCPSPQAAVQQ

SEQ ID NO: 15027 - protein, 526 aa, Homo sapiens
MASNDYTQQATQSYGAYPTQPGQGYSQQSSQPYGQQSYSGYSQSTDTSGYGQSSYSSYGQSQNTGYGTQSTPQGYGSTGGYGSSQSSQSSYGQQSSYPGYGQQPAPSSTSGSYGSSSQSSSYGQPQSGSYSQQPSYGGQQQSYGQQQSYNPPQGYGQQNQYNSSSGGGGGGGGGGNYGQDQSSMSSGGGSGGGYGNQDQSGGGGSGGYGQQDRGGRGRGGSGGGGGGGGGGYNRSSGGYEPRGRGGGRGGRGGMGGSDRGGFNKFGGPRDQGSRHDSEQDNSDNNTIFVQGLGENVTIESVADYFKQIGIIKTNKKTGQPMINLYTDRETGKLKGEATVSFDDPPSAKAAIDWFDGKEFSGNPIKVSFATRRADFNRGGGNGRGGRGRGGPMGRGGYGGGGSGGGGRGGFPSGGGGGGGQQRAGDWKCPNPTCENMNFSWRNECNQCKAPKPDGPGGGPGGSHMGGNYGDDRRGGRGGYDRGGYRGRGGDRGGFRGGRGGGDRGGFGPGKMDSRGEHRQDRRERPY

SEQ ID NO: 15028 - protein, 525 aa, Homo sapiens
MASNDYTQQATQSYGAYPTQPGQGYSQQSSQPYGQQSYSGYSQSTDTSGYGQSSYSSYGQSQNSYGTQSTPQGYGSTGGYGSSQSSQSSYGQQSSYPGYGQQPAPSSTSGSYGSSSQSSSYGQPQSGSYSQQPSYGGQQQSYGQQQSYNPPQGYGQQNQYNSSSGGGGGGGGGGNYGQDQSSMSSGGGSGGGYGNQDQSGGGGSGGYGQQDRGGRGRGGSGGGGGGGGGGYNRSSGGYEPRGRGGGRGGRGGMGGSDRGGFNKFGGPRDQGSRHDSEQDNSDNNTIFVQGLGENVTIESVADYFKQIGIIKTNKKTGQPMINLYTDRETGKLKGEATVSFDDPPSAKAAIDWFDGKEFSGNPIKVSFATRRADFNRGGGNGRGGRGRGGPMGRGGYGGGGSGGGGRGGFPSGGGGGGGQQRAGDWKCPNPTCENMNFSWRNECNQCKAPKPDGPGGGPGGSHMGGNYGDDRRGGRGGYDRGGYRGRGGDRGGFRGGRGGGDRGGFGPGKMDSRGEHRQDRRERPY

SEQ ID NO: 15029 - protein, 676 aa, Homo sapiens
MSGGGDVVCTGWLRKSPPEKKLRRYAWKKRWFILRSGRMSGDPDVLEYYKNDHSKKPLRIINLNFCEQVDAGLTFNKKELQDSFVFDIKTSERTFYLVAETEEDMNKWVQSICQICGFNQAEESTDSLRNVSSAGHGPRSSPAELSSSSQHLLRERKSSAPSHSSQPTLFTFEPPVSNHMQPTLSTSAPQEYLYLHQCISRRAENARSASFSQGTRASFLMRSDTAVQKLAQGNGHCVNGISGQVHGFYSLPKPSRHNTEFRDSTYDLPRSLASHGHTKGSLTGSETDNEDVYTFKTPSNTLCREFGDLLVDNMDVPATPLSAYQIPRTFTLDKNHNAMTVATPGDSAIAPPPRPPKPSQAETPRWGSPQQRPPISENSRSVAATIPRRNTLPAMDNSRLHRASSCETYEYPQRGGESAGRSAESMSDGVGSFLPGKMIVGRSDSTNSEDNYVPMNPGSSTLLAMERAGDNSQSVYIPMSPGAHHFDSLGYPSTTLPVHRGPSRGSEIQPPPVNRNLKPDRKAKPTPLDLRNNTVIDELPFKSPITKSWSRANHTFNSSSSQYCRPISTQSITSTDSGDSEENYVPMQNPVSASPVPSGTNSPAPKKSTGSVDYLALDFQPSSPSPHRKPSTSSVTSDEKVDYVQVDKEKTQALQNTMQEWTDVRQSSEPSKGAKL

SEQ ID NO: 15030 - protein, 638 aa, Homo sapiens
MSGDPDVLEYYKNDHSKKPLRIINLNFCEQVDAGLTFNKKELQDSFVFDIKTSERTFYLVAETEEDMNKWVQSICQICGFNQAEESTDSLRNVSSAGHGPRSSPAELSSSSQHLLRERKSSAPSHSSQPTLFTFEPPVSNHMQPTLSTSAPQEYLYLHQCISRRAENARSASFSQGTRASFLMRSDTAVQKLAQGNGHCVNGISGQVHGFYSLPKPSRHNTEFRDSTYDLPRSLASHGHTKGSLTGSETDNEDVYTFKTPSNTLCREFGDLLVDNMDVPATPLSAYQIPRTFTLDKNHNAMTVATPGDSAIAPPPRPPKPSQAETPRWGSPQQRPPISENSRSVAATIPRRNTLPAMDNSRLHRASSCETYEYPQRGGESAGRSAESMSDGVGSFLPGKMIVGRSDSTNSEDNYVPMNPGSSTLLAMERAGDNSQSVYIPMSPGAHHFDSLGYPSTTLPVHRGPSRGSEIQPPPVNRNLKPDRKAKPTPLDLRNNTVIDELPFKSPITKSWSRANHTFNSSSSQYCRPISTQSITSTDSGDSEENYVPMQNPVSASPVPSGTNSPAPKKSTGSVDYLALDFQPSSPSPHRKPSTSSVTSDEKVDYVQVDKEKTQALQNTMQEWTDVRQSSEPSKGAKL

SEQ ID NO: 15031 - protein, 944 aa, Homo sapiens
MAAVAAVAARRRRSWASLVLAFLGVCLGITLAVDRSNFKTCEESSFCKRQRSIRPGLSPYRALLDSLQLGPDSLTVHLIHEVTKVLLVLELQGLQKNMTRFRIDELEPRRPRYRVPDVLVADPPIARLSVSGRDENSVELTMAEGPYKIILTARPFRLDLLEDRSLLLSVNARGLLEFEHQRAPRVSQGSKDPAEGDGAQPEETPRDGDKPEETQGKAEKDEPGAWEETFKTHSDSKPYGPMSVGLDFSLPGMEHVYGIPEHADNLRLKVTEGGEPYRLYNLDVFQYELYNPMALYGSVPVLLAHNPHRDLGIFWLNAAETWVDISSNTAGKTLFGKMMDYLQGSGETPQTDVRWMSETGIIDVFLLLGPSISDVFRQYASLTGTQALPPLFSLGYHQSRWNYRDEADVLEVDQGFDDHNLPCDVIWLDIEHADGKRYFTWDPSRFPQPRTMLERLASKRRKLVAIVDPHIKVDSGYRVHEELRNLGLYVKTRDGSDYEGWCWPGSAGYPDFTNPTMRAWWANMFSYDNYEGSAPNLFVWNDMNEPSVFNGPEVTMLKDAQHYGGWEHRDVHNIYGLYVHMATADGLRQRSGGMERPFVLARAFFAGSQRFGAVWTGDNTAEWDHLKISIPMCLSLGLVGLSFCGADVGGFFKNPEPELLVRWYQMGAYQPFFRAHAHLDTGRREPWLLPSQHNDIIRDALGQRYSLLPFWYTLLYQAHREGIPVMRPLWVQYPQDVTTFNIDDQYLLGDALLVHPVSDSGAHGVQVYLPGQGEVWYDIQSYQKHHGPQTLYLPVTLSSIPVFQRGGTIVPRWMRVRRSSECMKDDPITLFVALSPQGTAQGELFLDDGHTFNYQTRQEFLLRRFSFSGNTLVSSSADPEGHFETPIWIERVVIIGAGKPAAVVLQTKGSPESRLSFQHDPETSVLVLRKPGINVASDWSIHLR

SEQ ID NO: 15032 - protein, 966 aa, Homo sapiens
MAAVAAVAARRRRSWASLVLAFLGVCLGITLAVDRSNFKTCEESSFCKRQRSIRPGLSPYRALLDSLQLGPDSLTVHLIHEVTKVLLVLELQGLQKNMTRFRIDELEPRRPRYRVPDVLVADPPIARLSVSGRDENSVELTMAEGPYKIILTARPFRLDLLEDRSLLLSVNARGLLEFEHQRAPRVSFSDKVNLTLGSIWDKIKNLFSRQGSKDPAEGDGAQPEETPRDGDKPEETQGKAEKDEPGAWEETFKTHSDSKPYGPMSVGLDFSLPGMEHVYGIPEHADNLRLKVTEGGEPYRLYNLDVFQYELYNPMALYGSVPVLLAHNPHRDLGIFWLNAAETWVDISSNTAGKTLFGKMMDYLQGSGETPQTDVRWMSETGIIDVFLLLGPSISDVFRQYASLTGTQALPPLFSLGYHQSRWNYRDEADVLEVDQGFDDHNLPCDVIWLDIEHADGKRYFTWDPSRFPQPRTMLERLASKRRKLVAIVDPHIKVDSGYRVHEELRNLGLYVKTRDGSDYEGWCWPGSAGYPDFTNPTMRAWWANMFSYDNYEGSAPNLFVWNDMNEPSVFNGPEVTMLKDAQHYGGWEHRDVHNIYGLYVHMATADGLRQRSGGMERPFVLARAFFAGSQRFGAVWTGDNTAEWDHLKISIPMCLSLGLVGLSFCGADVGGFFKNPEPELLVRWYQMGAYQPFFRAHAHLDTGRREPWLLPSQHNDIIRDALGQRYSLLPFWYTLLYQAHREGIPVMRPLWVQYPQDVTTFNIDDQYLLGDALLVHPVSDSGAHGVQVYLPGQGEVWYDIQSYQKHHGPQTLYLPVTLSSIPVFQRGGTIVPRWMRVRRSSECMKDDPITLFVALSPQGTAQGELFLDDGHTFNYQTRQEFLLRRFSFSGNTLVSSSADPEGHFETPIWIERVVIIGAGKPAAVVLQTKGSPESRLSFQHDPETSVLVLRKPGINVASDWSIHLR

SEQ ID NO: 15033 - protein, 52 aa, Homo sapiens
MAAVAAVAARRRRSWASLVLAFLGVCLGITLAVDRSNFKTCEESSFCKCCWC

SEQ ID NO: 15034 - protein, 165 aa, Homo sapiens
MTLEEFSAGEQKTERMDKVGDALEEVLSKALSQRTITVGVYEAAKLLNVDPDNVVLCLLAADEDDDRDVALQIHFTLIQAFCCENDINILRVSNPGRLAELLLLETDAGPAASEGAEQPPDLHCVLVTNPHSSQWKDPALSQLICFCRESRYMDQWVPVINLPER

SEQ ID NO: 15035 - protein, 131 aa, Homo sapiens
MTLEEFSAGEQKTESDPDNVVLCLLAADEDDDRDVALQIHFTLIQAFCCENDINILRVSNPGRLAELLLLETDAGPAASEGAEQPPDLHCVLVTNPHSSQWKDPALSQLICFCRESRYMDQWVPVINLPER

SEQ ID NO: 15036 - protein, 476 aa, Homo sapiens
MSGARCRTLYPFSGERHGQGLRFAAGELITLLQVPDGGWWEGEKEDGLRGWFPASYVQLLEKPGMVPPPPGEESQTVILPPGWQSYLSPQGRRYYVNTTTNETTWERPSSSPGIPASPGSHRSSLPPTVNGYHASGTPAHPPETAHMSVRKSTGDSQNLGSSSPSKKQSKENTITINCVTFPHPDTMPEQQLLKPTEWSYCDYFWADKKDPQGNGTVAGFELLLQKQLKGKQMQKEMSEFIRERIKIEEDYAKNLAKLSQNSLASQEEGSLGEAWAQVKKSLADEAEVHLKFSAKLHSEVEKPLMNFRENFKKDMKKCDHHIADLRKQLASRYASVEKARKALTERQRDLEMKTQQLEIKLSNKTEEDIKKARRKSTQAGDDLMRCVDLYNQAQSKWFEEMVTTTLELERLEVERVEMIRQHLCQYTQLRHETDMFNQSTVEPVDQLLRKVDPAKDRELWVREHKTGNIRPVDMEI

SEQ ID NO: 15037 - protein, 412 aa, Homo sapiens
MVPPPPGEESQTVILPPGWQSYLSPQGRRYYVNTTTNETTWERPSSSPGIPASPGSHRSSLPPTVNGYHASGTPAHPPETAHMSVRKSTGDSQNLGSSSPSKKQSKENTITINCVTFPHPDTMPEQQLLKPTEWSYCDYFWADKKDPQGNGTVAGFELLLQKQLKGKQMQKEMSEFIRERIKIEEDYAKNLAKLSQNSLASQEEGSLGEAWAQVKKSLADEAEVHLKFSAKLHSEVEKPLMNFRENFKKDMKKCDHHIADLRKQLASRYASVEKARKALTERQRDLEMKTQQLEIKLSNKTEEDIKKARRKSTQAGDDLMRCVDLYNQAQSKWFEEMVTTTLELERLEVERVEMIRQHLCQYTQLRHETDMFNQSTVEPVDQLLRKVDPAKDRELWVREHKTGNIRPVDMEI

SEQ ID NO: 15038 - protein, 336 aa, Homo sapiens
MSNMENSFDDVSCLSPQNLGSSSPSKKQSKENTITINCVTFPHPDTMPEQQLLKPTEWSYCDYFWADKKDPQGNGTVAGFELLLQKQLKGKQMQKEMSEFIRERIKIEEDYAKNLAKLSQNSLASQEEGSLGEAWAQVKKSLADEAEVHLKFSAKLHSEVEKPLMNFRENFKKDMKKCDHHIADLRKQLASRYASVEKARKALTERQRDLEMKTQQLEIKLSNKTEEDIKKARRKSTQAGDDLMRCVDLYNQAQSKWFEEMVTTTLELERLEVERVEMIRQHLCQYTQLRHETDMFNQSTVEPVDQLLRKVDPAKDRELWVREHKTGNIRPVDMEI

SEQ ID NO: 15039 - protein, 416 aa, Homo sapiens
MKPGMVPPPPGEESQTVILPPGWQSYLSPQGRRYYVNTTTNETTWERPSSSPGIPASPGSHRSSLPPTVNGYHASGTPAHPPETAHMSVRKSTGDSQNLGSSSPSKKQSKENTITINCVTFPHPDTMPEQQLLKPTEWSYCDYFWADKKDPQGNGTVAGFELLLQKQLKGKQMQKEMSEFIRERIKIEEDYAKNLAKLSQNSLASQEEGSLGEAWAQVKKSLADEAEVHLKFSAKLHSEVEKPLMNFRENFKKDMKKCDHHIADLRKQLASRYASVEKARKALTERQRDLEMKTQQLEIKLSNKTEEDIKKARRKSTQAGDDLMRCVDLYNQAQSKWFEEMVTTTLELERLEVERVEMIRQHLCQYTQLRHETDMFNQSTVEPVDQLLRKVDPAKDRELWVREHKTGNIRPVDMEI

SEQ ID NO: 15040 - protein, 154 aa, Homo sapiens
MVALKGVPALLSPELLYALARMGHGDEIVLADLNFPASSICQCGPMEIRADGLGIPQLLEAVLKLLPLDTYVESPAAVMELVPSDKERGLQTPVWTEYESILRRAGCVRALAKIERFEFYERAKKAFAVVATGETALYGNLILRKGVLALNPLL

SEQ ID NO: 15041 - protein, 134 aa, Homo sapiens
MVALKGVPALLSPELLYALARMGHGDEIVLADLNFPASSICQCGPMEIRADGLGIPQLLEAVLKLLPLDTYVESPAAVMELVPSDKERGLQTPVWTEYESILRRAGCVRALAKIERFEFYERAKKAFAVVATGC

SEQ ID NO: 15042 - protein, 825 aa, Homo sapiens
MVGKSQQTDVIEKKKHMAIPKSSSPKATHRIGNTSGSKGSYSAKAYESIRVSSELQQTWTKRKHGQEMTSKSLQTDTIVEEKKEVKLVEETVVPEEKSADVREAAIELPESVQDVEIPPNIPSVQLKMDRSQQTSRTGYWTMMNIPPVEKVDKEQQTYFSESEIVVISRPDSSSTKSKEDALKHKSSGKIFASEHPEFQPATNSNEEIGQKNISRTSFTQETKKGPPVLLEDELREEVTVPVVQEGSAVKKVASAEIEPPSTEKFPAKIQPPLVEEATAKAEPRPAEETHVQVQPSTEETPDAEAATAVAENSVKVQPPPAEEAPLVEFPAEIQPPSAEESPSVELLAEILPPSAEESPSEEPPAEILPPPAEKSPSVELLGEIRSPSAQKAPIEVQPLPAEGALEEAPAKVEPPTVEETLADVQPLLPEEAPREEARELQLSTAMETPAEEAPTEFQSPLPKETTAEEASAEIQLLAATEPPADETPAEARSPLSEETSAEEAHAEVQSPLAEETTAEEASAEIQLLAAIEAPADETPAEAQSPLSEETSAEEAPAEVQSPSAKGVSIEEAPLELQPPSGEETTAEEASAAIQLLAATEASAEEAPAEVQPPPAEEAPAEVQPPPAEEAPAEVQPPPAEEAPAEVQPPPAEEAPAEVQPPPAEEAPAEVQPPPAEEAPAEVQSLPAEETPIEETLAAVHSPPADDVPAEEASVDKHSPPADLLLTEEFPIGEASAEVSPPPSEQTPEDEALVENVSTEFQSPQVAGIPAVKLGSVVLEGEAKFEEVSKINSVLKDLSNTNDGQAPTLEIESVFHIELKQRPPEL

SEQ ID NO: 15043 - protein, 351 aa, Homo sapiens
METNFSTPLNEYEEVSYESAGYTVLRILPLVVLGVTFVLGVLGNGLVIWVAGFRMTRTVTTICYLNLALADFSFTATLPFLIVSMAMGEKWPFGWFLCKLIHIVVDINLFGSVFLIGFIALDRCICVLHPVWAQNHRTVSLAMKVIVGPWILALVLTLPVFLFLTTVTIPNGDTYCTFNFASWGGTPEERLKVAITMLTARGIIRFVIGFSLPMSIVAICYGLIAAKIHKKGMIKSSRPLRVLTAVVASFFICWFPFQLVALLGTVWLKEMLFYGKYKIIDILVNPTSSLAFFNSCLNPMLYVFVGQDFRERLIHSLPTSLERALSEDSAPTNDTAANSASPPAETELQAM

SEQ ID NO: 15044 - protein, 258 aa, Homo sapiens
MAEYSYVKSTKLVLKGTKTKSKKKKSKDKKRKREEDEETQLDIVGIWWTVTNFGEISGTIAIEMDKGTYIHALDNGLFTLGAPHKEVDEGPSPPEQFTAVKLSDSRIALKSGYGKYLGINSDGLVVGRSDAIGPREQWEPVFQNGKMALLASNSCFIRCNEAGDIEAKSKTAGEEEMIKIRSCAERETKKKDDIPEEDKGNVKQCEINYVKKFQSFQDHKLKISKEDSKILKKARKDGFLHETLLDRRAKLKADRYCK

SEQ ID NO: 15045 - protein, 175 aa, Homo sapiens
MSSQIRQNYSTDVEAAVNSLVNLYLQASYTYLSLGFYFDRDDVALEGVSHFFRELAEEKREGYERLLKMQNQRGGRALFQDIKKPAEDEWGKTPDAMKAAMALEKKLNQALLDLHALGSARTDPHLCDFLETHFLDEEVKLIKKMGDHLTNLHRLGGPEAGLGEYLFERLTLKHD

SEQ ID NO: 15046 - protein, 492 aa, Homo sapiens
MAAKLRAHQVDVDPDFAPQSRPRSCTWPLPQPDLAGDEDGALGAGVAEGAEDCGPERRATAPAMAPAPPLGAEVGPLRKAKSSRRNAWGNLSYADLITKAIESAPDKRLTLSQIYDWMVRYVPYFKDKGDSNSSAGWKNSIRHNLSLHTRFIRVQNEGTGKSSWWMLNPEGGKTGKTPRRRAVSMDNGAKFLRIKGKASKKKQLQAPERSPDDSSPSAPAPGPVPAAAKWAASPASHASDDYEAWADFRGGGRPLLGEAAELEDDEALEALAPSSPLMYPSPASALSPALGSRCPGELPRLAELGGPLGLHGGGGAGLPEGLLDGAQDAYGPRPAPRPGPVLGAPGELALAGAAAAYPGKGAAPYAPPAPSRSALAHPISLMTLPGEAGAAGLAPPGHAAAFGGPPGGLLLDALPGPYAAAAAGPLGAAPDRFPADLDLDMFSGSLECDVESIILNDFMDSDEMDFNFDSALPPPPPGLAGAPPPNQSWVPG

SEQ ID NO: 15047 - protein, 1006 aa, Homo sapiens
MSRRKQSNPRQIKRSLGDMEAREEVQLVGASHMEQKATAPEAPSPPSADVNSPPPLPPPTSPGGPKELEGQEPEPRPTEEEPGSPWSGPDELEPVVQDGQRRIRARLSLATGLSWGPFHGSVQTRASSPRQAEPSPALTLLLVDEACWLRTLPQALTEAEANTEIHRKDDALWCRVTKPVPAGGLLSVLLTAEPHSTPGHPVKKEPAEPTCPAPAHDLQLLPQQAGMASILATAVINKDVFPCKDCGIWYRSERNLQAHLLYYCASRQGTGSPAAAATDEKPKETYPNERVCPFPQCRKSCPSASSLEIHMRSHSGERPFVCLICLSAFTTKANCERHLKVHTDTLSGVCHSCGFISTTRDILYSHLVTNHMVCQPGSKGEIYSPGAGHPATKLPPDSLGSFQQQHTALQGPLASADLGLAPTPSPGLDRKALAEATNGEARAEPLAQNGGSSEPPAAPRSIKVEAVEEPEAAPILGPGEPGPQAPSRTPSPRSPAPARVKAELSSPTPGSSPVPGELGLAGALFLPQYVFGPDAAPPASEILAKMSELVHSRLQQGAGAGAGGAQTGLFPGAPKGATCFECEITFSNVNNYYVHKRLYCSGRRAPEDAPAARRPKAPPGPARAPPGQPAEPDAPRSSPGPGAREEGAGGAATPEDGAGGRGSEGSQSPGSSVDDAEDDPSRTLCEACNIRFSRHETYTVHKRYYCASRHDPPPRRPAAPPGPPGPAAPPAPSPAAPVRTRRRRKLYELHAAGAPPPPPPGHAPAPESPRPGSGSGSGPGLAPARSPGPAADGPIDLSKKPRRPLPGAPAPALADYHECTACRVSFHSLEAYLAHKKYSCPAAPPPGALGLPAAACPYCPPNGPVRGDLLEHFRLAHGLLLGAPLAGPGVEARTPADRGPSPAPAPAASPQPGSRGPRDGLGPEPQEPPPGPPPSPAAAPEAVPPPPAPPSYSDKGVQTPSKGTPAPLPNGNHRYCRLCNIKFSSLSTFIAHKKYYCSSHAAEHVK

SEQ ID NO: 15048 - protein, 655 aa, Homo sapiens
MAEAPQVVEIDPDFEPLPRPRSCTWPLPRPEFSQSNSATSSPAPSGSAAANPDAAAGLPSASAAAVSADFMSNLSLLEESEDFPQAPGSVAAAVAAAAAAAATGGLCGDFQGPEAGCLHPAPPQPPPPGPLSQHPPVPPAAAGPLAGQPRKSSSSRRNAWGNLSYADLITKAIESSAEKRLTLSQIYEWMVKSVPYFKDKGDSNSSAGWKNSIRHNLSLHSKFIRVQNEGTGKSSWWMLNPEGGKSGKSPRRRAASMDNNSKFAKSRSRAAKKKASLQSGQEGAGDSPGSQFSKWPASPGSHSNDDFDNWSTFRPRTSSNASTISGRLSPIMTEQDDLGEGDVHSMVYPPSAAKMASTLPSLSEISNPENMENLLDNLNLLSSPTSLTVSTQSSPGTMMQQTPCYSFAPPNTSLNSPSPNYQKYTYGQSSMSPLPQMPIQTLQDNKSSYGGMSQYNCAPGLLKELLTSDSPPHNDIMTPVDPGVAQPNSRVLGQNVMMGPNSVMSTYGSQASHNKMMNPSSHTHPGHAQQTSAVNGRPLPHTVSTMPHTSGMNRLTQVKTPVQVPLPHPMQMSALGGYSSVSSCNGYGRMGLLHQEKLPSDLDGMFIERLDCDMESIIRNDLMDGDTLDFNFDNVLPNQSFPHSVKTTTHSWVSG

SEQ ID NO: 15049 - protein, 1136 aa, Homo sapiens
MFSRKKRELMKTPSISKKNRAGSPSPQPSGELPRKDGADAVFPGPSLEPPAGSSGVKATGTLKRPTSLSRHASAAGFPLSGAASWTLGRSHRSPLTAASPGELPTEGAGPDVVEDISHLLADVARFAEGLEKLKECVLRDDLLEARRPRAHECLGEALRVMHQIISKYPLLNTVETLTAAGTLIAKVKAFHYESNNDLEKQEFEKALETIAVAFSSTVSEFLMGEVDSSTLLAVPPGDSSQSMESLYGPGSEGTPPSLEDCDAGCLPAEEVDVLLQRCEGGVDAALLYAKNMAKYMKDLISYLEKRTTLEMEFAKGLQKIAHNCRQSVMQEPHMPLLSIYSLALEQDLEFGHSMVQAVGTLQTQTFMQPLTLRRLEHEKRRKEIKEAWHRAQRKLQEAESNLRKAKQGYVQRCEDHDKARFLVAKAEEEQAGSAPGAGSTATKTLDKRRRLEEEAKNKAEEAMATYRTCVADAKTQKQELEDTKVTALRQIQEVIRQSDQTIKSATISYYQMMHMQTAPLPVHFQMLCESSKLYDPGQQYASHVRQLQRDQEPDVHYDFEPHVSANAWSPVMRARKSSFNVSDVARPEAAGSPPEEGGCTEGTPAKDHRAGRGHQVHKSWPLSISDSDSGLDPGPGAGDFKKFERTSSSGTMSSTEELVDPDGGAGASAFEQADLNGMTPELPVAVPSGPFRHEGLSKAARTHRLRKLRTPAKCRECNSYVYFQGAECEECCLACHKKCLETLAIQCGHKKLQGRLQLFGQDFSHAARSAPDGVPFIVKKCVCEIERRALRTKGIYRVNGVKTRVEKLCQAFENGKELVELSQASPHDISNVLKLYLRQLPEPLISFRLYHELVGLAKDSLKAEAEAKAASRGRQDGSESEAVAVALAGRLRELLRDLPPENRASLQYLLRHLRRIVEVEQDNKMTPGNLGIVFGPTLLRPRPTEATVSLSSLVDYPHQARVIETLIVHYGLVFEEEPEETPGGQDESSNQRAEVVVQVPYLEAGEAVVYPLQEAAADGCRESRVVSNDSDSDLEEASELLSSSEASALGHLSFLEQQQSEASLEVASGSHSGSEEQLEATAREDGDGDEDGPAQQLSGFNTNQSNNVLQAPLPPMRLRGGRMTLGSCRERQPEFV

SEQ ID NO: 15050 - protein, 1152 aa, Homo sapiens
MSRGQRVLKGLLGWVCTWTWAWRARLGARGCGLHVLCPRDLPLPPEELPRKDGADAVFPGPSLEPPAGSSGVKATGTLKRPTSLSRHASAAGFPLSGAASWTLGRSHRSPLTAASPGELPTEGAGPDVVEDISHLLADVARFAEGLEKLKECVLRDDLLEARRPRAHECLGEALRVMHQIISKYPLLNTVETLTAAGTLIAKVKAFHYESNNDLEKQEFEKALETIAVAFSSTVSEFLMGEVDSSTLLAVPPGDSSQSMESLYGPGSEGTPPSLEDCDAGCLPAEEVDVLLQRCEGGVDAALLYAKNMAKYMKDLISYLEKRTTLEMEFAKGLQKIAHNCRQSVMQEPHMPLLSIYSLALEQDLEFGHSMVQAVGTLQTQTFMQPLTLRRLEHEKRRKEIKEAWHRAQRKLQEAESNLRKAKQGYVQRCEDHDKARFLVAKAEEEQAGSAPGAGSTATKTLDKRRRLEEEAKNKAEEAMATYRTCVADAKTQKQELEDTKVTALRQIQEVIRQSDQTIKSATISYYQMMHMQTAPLPVHFQMLCESSKLYDPGQQYASHVRQLQRDQEPDVHYDFEPHVSANAWSPVMRARKSSFNVSDVARPEAAGSPPEEGGCTEGTPAKDHRAGRGHQVHKSWPLSISDSDSGLDPGPGAGDFKKFERTSSSGTMSSTEELVDPDGGAGASAFEQADLNGMTPELPVAVPSGPFRHEGLSKAARTHRLRKLRTPAKCRECNSYVYFQGAECEECCLACHKKCLETLAIQCGHKKLQGRLQLFGQDFSHAARSAPDGVPFIVKKCVCEIERRALRTKGIYRVNGVKTRVEKLCQAFENGKELVELSQASPHDISNVLKLYLRQLPEPLISFRLYHELVGLAKDSLKAEAEAKAASRGRQDGSESEAVAVALAGRLRELLRDLPPENRASLQYLLRHLRRIVEVEQDNKMTPGNLGIVFGPTLLRPRPTEATVSLSSLVDYPHQARVIETLIVHYGLVFEEEPEETPGGQDESSNQRAEVVVQVPYLEAGEAVVYPLQEAAADGCRESRVVSNDSDSDLEEASELLSSSEASALGHLSFLEQQQSEASLEVASGSHSGSEEQLEATAREDGDGDEDGPAQQLSGFNTNQSNNVLQAPLPPMRLRGGRMTLGSCRERQPEFV

SEQ ID NO: 15051 - protein, 431 aa, Homo sapiens; identical to SEQ ID NO: 251

SEQ ID NO: 15052 - protein, 396 aa, Homo sapiens; identical to SEQ ID NO: 252

SEQ ID NO: 15053 - protein, 456 aa, Homo sapiens; identical to SEQ ID NO: 253

SEQ ID NO: 15054 - protein, 404 aa, Homo sapiens; identical to SEQ ID NO: 254

SEQ ID NO: 15055 - protein, 338 aa, Homo sapiens
MFQAFPGDYDSGSRCSSSPSAESQYLSSVDSFGSPPTAAASQECAGLGEMPGSFVPTVTAITTSQDLQWLVQPTLISSMAQSQGQPLASQPPVVDPYDMPGTSYSTPGMSGYSSGGASGSGGPSTSGTTSGPGPARPARARPRRPREETLTPEEEEKRRVRRERNKLAAAKCRNRRRELTDRLQAETDQLEEEKAELESEIAELQKEKERLEFVLVAHKPGCKIPYEEGPGPGPLAEVRDLPGSAPAKEDGFSWLLPPPPPPPLPFQTSQDAPPNLTASLFTHSEVQVLGDPFPVVNPSYTSSFVLTCPEVSAFAGAQRTSGSDQPSDPLNSPSLLAL

SEQ ID NO: 15056 - protein, 302 aa, Homo sapiens
MFQAFPGDYDSGSRCSSSPSAESQYLSSVDSFGSPPTAAASQECAGLGEMPGSFVPTVTAITTSQDLQWLVQPTLISSMAQSQGQPLASQPPVVDPYDMPGTSYSTPGMSGYSSGGASGSGGPSTSGTTSGPGPARPARARPRRPREETETDQLEEEKAELESEIAELQKEKERLEFVLVAHKPGCKIPYEEGPGPGPLAEVRDLPGSAPAKEDGFSWLLPPPPPPPLPFQTSQDAPPNLTASLFTHSEVQVLGDPFPVVNPSYTSSFVLTCPEVSAFAGAQRTSGSDQPSDPLNSPSLLAL

SEQ ID NO: 15057 - protein, 299 aa, Homo sapiens
MFQAFPGDYDSGSRCSSSPSAESQYLSSVDSFGSPPTAAASQSQGQPLASQPPVVDPYDMPGTSYSTPGMSGYSSGGASGSGGPSTSGTTSGPGPARPARARPRRPREETLTPEEEEKRRVRRERNKLAAAKCRNRRRELTDRLQAETDQLEEEKAELESEIAELQKEKERLEFVLVAHKPGCKIPYEEGPGPGPLAEVRDLPGSAPAKEDGFSWLLPPPPPPPLPFQTSQDAPPNLTASLFTHSEVQVLGDPFPVVNPSYTSSFVLTCPEVSAFAGAQRTSGSDQPSDPLNSPSLLAL

SEQ ID NO: 15058 - protein, 291 aa, Homo sapiens
MFQAFPGDYDSGSRCSSSPSAESQYLSSVDSFGSPPTAAASQECAGLGEMPGSFVPTVTAITTSQDLQWLVQPTLISSMAQSQGQPLASQPPVVDPYDMPGTSYSTPGMSGYSSGGASGSGGPSTSGTTSGPGPARPARARPRRPREETLTPEEEEKRRVRRERNKLAAAKCRNRRRELTDRLQAETDQLEEEKAELESEIAELQKEKERLEFVLVAHKPGCKIPYEEGPGPGPLAEEVQVLGDPFPVVNPSYTSSFVLTCPEVSAFAGAQRTSGSDQPSDPLNSPSLLAL

SEQ ID NO: 15059 - protein, 263 aa, Homo sapiens
MFQAFPGDYDSGSRCSSSPSAESQYLSSVDSFGSPPTAAASQSQGQPLASQPPVVDPYDMPGTSYSTPGMSGYSSGGASGSGGPSTSGTTSGPGPARPARARPRRPREETETDQLEEEKAELESEIAELQKEKERLEFVLVAHKPGCKIPYEEGPGPGPLAEVRDLPGSAPAKEDGFSWLLPPPPPPPLPFQTSQDAPPNLTASLFTHSEVQVLGDPFPVVNPSYTSSFVLTCPEVSAFAGAQRTSGSDQPSDPLNSPSLLAL

SEQ ID NO: 15060 - protein, 255 aa, Homo sapiens
MFQAFPGDYDSGSRCSSSPSAESQYLSSVDSFGSPPTAAASQECAGLGEMPGSFVPTVTAITTSQDLQWLVQPTLISSMAQSQGQPLASQPPVVDPYDMPGTSYSTPGMSGYSSGGASGSGGPSTSGTTSGPGPARPARARPRRPREETETDQLEEEKAELESEIAELQKEKERLEFVLVAHKPGCKIPYEEGPGPGPLAEEVQVLGDPFPVVNPSYTSSFVLTCPEVSAFAGAQRTSGSDQPSDPLNSPSLLAL

SEQ ID NO: 15061 - protein, 252 aa, Homo sapiens
MFQAFPGDYDSGSRCSSSPSAESQYLSSVDSFGSPPTAAASQSQGQPLASQPPVVDPYDMPGTSYSTPGMSGYSSGGASGSGGPSTSGTTSGPGPARPARARPRRPREETLTPEEEEKRRVRRERNKLAAAKCRNRRRELTDRLQAETDQLEEEKAELESEIAELQKEKERLEFVLVAHKPGCKIPYEEGPGPGPLAEEVQVLGDPFPVVNPSYTSSFVLTCPEVSAFAGAQRTSGSDQPSDPLNSPSLLAL

SEQ ID NO: 15062 - protein, 195 aa, Homo sapiens
MFQAFPGDYDSGSRCSSSPSAESQYLSSVDSFGSPPTAAASQETDQLEEEKAELESEIAELQKEKERLEFVLVAHKPGCKIPYEEGPGPGPLAEVRDLPGSAPAKEDGFSWLLPPPPPPPLPFQTSQDAPPNLTASLFTHSEVQVLGDPFPVVNPSYTSSFVLTCPEVSAFAGAQRTSGSDQPSDPLNSPSLLAL

SEQ ID NO: 15063 - protein, 148 aa, Homo sapiens
MFQAFPGDYDSGSRCSSSPSAESQYLSSVDSFGSPPTAAASQETDQLEEEKAELESEIAELQKEKERLEFVLVAHKPGCKIPYEEGPGPGPLAEEVQVLGDPFPVVNPSYTSSFVLTCPEVSAFAGAQRTSGSDQPSDPLNSPSLLAL

SEQ ID NO: 15064 - protein, 289 aa, Homo sapiens
MPGSFVPTVTAITTSQDLQWLVQPTLISSMAQSQGQPLASQPPVVDPYDMPGTSYSTPGMSGYSSGGASGSGGPSTSGTTSGPGPARPARARPRRPREETLTPEEEEKRRVRRERNKLAAAKCRNRRRELTDRLQAETDQLEEEKAELESEIAELQKEKERLEFVLVAHKPGCKIPYEEGPGPGPLAEVRDLPGSAPAKEDGFSWLLPPPPPPPLPFQTSQDAPPNLTASLFTHSEVQVLGDPFPVVNPSYTSSFVLTCPEVSAFAGAQRTSGSDQPSDPLNSPSLLAL

SEQ ID NO: 15065 - protein, 271 aa, Homo sapiens
MFRDFGEPGPSSGNGGGYGGPAQPPAAAQAAQQKFHLVPSINTMSGSQELQWMVQPHFLGPSSYPRPLTYPQYSPPQPRPGVIRALGPPPGVRRRPCEQISPEEEERRRVRRERNKLAAAKCRNRRKELTDFLQAETDKLEDEKSGLQREIEELQKQKERLELVLEAHRPICKIPEGAKEGDTGSTSGTSSPPAPCRPVPCISLSPGPVLEPEALHTPTLMTTPSLTPFTPSLVFTYPSTPEPCASAHRKSSSSSGDPSSDPLGSPTLLAL

SEQ ID NO: 15066 - protein, 169 aa, Homo sapiens
MFRDFGEPGPSSGNGGGYGGPAQPPAAAQAAQQETDKLEDEKSGLQREIEELQKQKERLELVLEAHRPICKIPEGAKEGDTGSTSGTSSPPAPCRPVPCISLSPGPVLEPEALHTPTLMTTPSLTPFTPSLVFTYPSTPEPCASAHRKSSSSSGDPSSDPLGSPTLLAL

SEQ ID NO: 15067 - protein, 607 aa, Homo sapiens
MDNLSDTLKKLKITAVDKTEDSLEGCLDCLLQALAQNNTETSEKIQASGILQLFASLLTPQSSCKAKVANIIAEVAKNEFMRIPCVDAGLISPLVQLLNSKDQEVLLQTGRALGNICYDSHEGRSAVDQAGGAQIVIDHLRSLCSITDPANEKLLTVFCGMLMNYSNENDSLQAQLINMGVIPTLVKLLGIHCQNAALTEMCLVAFGNLAELESSKEQFASTNIAEELVKLFKKQIEHDKREMIFEVLAPLAENDAIKLQLVEAGLVECLLEIVQQKVDSDKEDDITELKTGSDLMVLLLLGDESMQKLFEGGKGSVFQRVLSWIPSNNHQLQLAGALAIANFARNDANCIHMVDNGIVEKLMDLLDRHVEDGNVTVQHAALSALRNLAIPVINKAKMLSAGVTEAVLKFLKSEMPPVQFKLLGTLRMLIDAQAEAAEQLGKNVKLVERLVEWCEAKDHAGVMGESNRLLSALIRHSKSKDVIKTIVQSGGIKHLVTMATSEHVIMQNEALVALALIAALELGTAEKDLESAKLVQILHRLLADERSAPEIKYNSMVLICALMGSECLHKEVQDLAFLDVVSKLRSHENKSVAQQASLTEQRLTVES

SEQ ID NO: 15068 - protein, 558 aa, Homo sapiens
MDNLSDTLKKLKITAVDKTEDSLEGCLDCLLQALAQNNTETSEKIQASGILQLFASLLTPQSSCKAKVANIIAEVAKNEFMRIPCVDAGLISPLVQLLNSKDQEVLLQTGRALGNICYDSHSLQAQLINMGVIPTLVKLLGIHCQNAALTEMCLVAFGNLAELESSKEQFASTNIAEELVKLFKKQIEHDKREMIFEVLAPLAENDAIKLQLVEAGLVECLLEIVQQKVDSDKEDDITELKTGSDLMVLLLLGDESMQKLFEGGKGSVFQRVLSWIPSNNHQLQLAGALAIANFARNDANCIHMVDNGIVEKLMDLLDRHVEDGNVTVQHAALSALRNLAIPVINKAKMLSAGVTEAVLKFLKSEMPPVQFKLLGTLRMLIDAQAEAAEQLGKNVKLVERLVEWCEAKDHAGVMGESNRLLSALIRHSKSKDVIKTIVQSGGIKHLVTMATSEHVIMQNEALVALALIAALELGTAEKDLESAKLVQILHRLLADERSAPEIKYNSMVLICALMGSECLHKEVQDLAFLDVVSKLRSHENKSVAQQASLTEQRLTVES

SEQ ID NO: 15069 - protein, 559 aa, Homo sapiens
MADNLSDTLKKLKITAVDKTEDSLEGCLDCLLQALAQNNTETSEKIQASGILQLFASLLTPQSSCKAKVANIIAEVAKNEFMRIPCVDAGLISPLVQLLNSKDQEVLLQTGRALGNICYDSHSLQAQLINMGVIPTLVKLLGIHCQNAALTEMCLVAFGNLAELESSKEQFASTNIAEELVKLFKKQIEHDKREMIFEVLAPLAENDAIKLQLVEAGLVECLLEIVQQKVDSDKEDDITELKTGSDLMVLLLLGDESMQKLFEGGKGSVFQRVLSWIPSNNHQLQLAGALAIANFARNDANCIHMVDNGIVEKLMDLLDRHVEDGNVTVQHAALSALRNLAIPVINKAKMLSAGVTEAVLKFLKSEMPPVQFKLLGTLRMLIDAQAEAAEQLGKNVKLVERLVEWCEAKDHAGVMGESNRLLSALIRHSKSKDVIKTIVQSGGIKHLVTMATSEHVIMQNEALVALALIAALELGTAEKDLESAKLVQILHRLLADERSAPEIKYNSMVLICALMGSECLHKEVQDLAFLDVVSKLRSHENKSVAQQASLTEQRLTVES

SEQ ID NO: 15070 - protein, 607 aa, Homo sapiens
MADNLSDTLKKLKITAVDKTEDSLEGCLDCLLQALAQNNTETSEKIQASGILQLFASLLTPQSSCKAKVANIIAEVAKNEFMRIPCVDAGLISPLVQLLNSKDQEVLLQTGRALGNICYDSHEGRSAVDQAGGAQIVIDHLRSLCSITDPANEKLLTVFCGMLMNYSNENDSLQAQLINMGVIPTLVKLLGIHCQNAALTEMCLVAFGNLAELESSKEQFASTNIAEELVKLFKKQIEHDKREMIFEVLAPLAENDAIKLQLVEAGLVECLLEIVQQKVDSDKEDDITELKTGSDLMVLLLLGDESMQKLFEGGKGSVFQRVLSWIPSNNHQLQLAGALAIANFARNDANCIHMVDNGIVEKLMDLLDRHVEDGNVTVQHAALSALRNLAIPVINKAKMLSAGVTEAVLKFLKSEMPPVQFKLLGTLRMLIDAQEAAEQLGKNVKLVERLVEWCEAKDHAGVMGESNRLLSALIRHSKSKDVIKTIVQSGGIKHLVTMATSEHVIMQNEALVALALIAALELGTAEKDLESAKLVQILHRLLADERSAPEIKYNSMVLICALMGSECLHKEVQDLAFLDVVSKLRSHENKSVAQQASLTEQRLTVES

SEQ ID NO: 15071 - protein, 608 aa, Homo sapiens
MADNLSDTLKKLKITAVDKTEDSLEGCLDCLLQALAQNNTETSEKIQASGILQLFASLLTPQSSCKAKVANIIAEVAKNEFMRIPCVDAGLISPLVQLLNSKDQEVLLQTGRALGNICYDSHEGRSAVDQAGGAQIVIDHLRSLCSITDPANEKLLTVFCGMLMNYSNENDSLQAQLINMGVIPTLVKLLGIHCQNAALTEMCLVAFGNLAELESSKEQFASTNIAEELVKLFKKQIEHDKREMIFEVLAPLAENDAIKLQLVEAGLVECLLEIVQQKVDSDKEDDITELKTGSDLMVLLLLGDESMQKLFEGGKGSVFQRVLSWIPSNNHQLQLAGALAIANFARNDANCIHMVDNGIVEKLMDLLDRHVEDGNVTVQHAALSALRNLAIPVINKAKMLSAGVTEAVLKFLKSEMPPVQFKLLGTLRMLIDAQAEAAEQLGKNVKLVERLVEWCEAKDHAGVMGESNRLLSALIRHSKSKDVIKTIVQSGGIKHLVTMATSEHVIMQNEALVALALIAALELGTAEKDLESAKLVQILHRLLADERSAPEIKYNSMVLICALMGSECLHKEVQDLAFLDVVSKLRSHENKSVAQQASLTEQRLTVES

SEQ ID NO: 15072 - protein, 516 aa, Homo sapiens
MADNLSDTLKKLKITAVDKTEDSLEGCLDCLLQALAQNNTETSEKIQASGILQLFASLLTPQSSCKAKVANIIAEVAKNEFMRIPCVDAGLISPLVQLLNSKDQEVLLQTGRALGNICYDSQSSKEQFASTNIAEELVKLFKKQIEHDKREMIFEVLAPLAENDAIKLQLVEAGLVECLLEIVQQKVDSDKEDDITELKTGSDLMVLLLLGDESMQKLFEGGKGSVFQRVLSWIPSNNHQLQLAGALAIANFARNDANCIHMVDNGIVEKLMDLLDRHVEDGNVTVQHAALSALRNLAIPVINKAKMLSAGVTEAVLKFLKSEMPPVQFKLLGTLRMLIDAQAEAAEQLGKNVKLVERLVEWCEAKDHAGVMGESNRLLSALIRHSKSKDVIKTIVQSGGIKHLVTMATSEHVIMQNEALVALALIAALELGTAEKDLESAKLVQILHRLLADERSAPEIKYNSMVLICALMGSECLHKEVQDLAFLDVVSKLRSHENKSVAQQASLTEQRLTVES

SEQ ID NO: 15073 - protein, 1859 aa, Homo sapiens
MVDKNIYIIQGEINIVVGAIKRNARWSTHTPLDEERDPLLHSFGHLKEVLNSITELSEIEPNVFLRPFLEVIRSEDTTGPITGLALTSVNKFLSYALIDPTHEGTAEGMENMADAVTHARFVGTDPASDEVVLMKILQVLRTLLLTPVGAHLTNESVCEIMQSCFRICFEMRLSELLRKSAEHTLVDMVQLLFTRLPQFKEEPKNYVGTNMKKLKMRAGGMSDSSKWKKQKRSPRPPRHMTKVTPGSELPTPNGTTLSSNLTGGMPFIDVPTPISSASSEAASAVVSPSTDSGLEFSSQTTSKEDLTDLEQPGSPGYSTATEPGSSELGVPEQPDLQEGTHVEKSQSASVESIPEVLEECTSPADHSDSASVHDMDYVNPRGVRFTQSSQKEGTALVPYGLPCIRELFRFLISLTNPHDRHNSEVMIHMGLHLLTVALESAPVAQCQTLLGLIKDEMCRHLFQLLSIERLNLYAASLRVCFLLFESMREHLKFQMEMYIKKLMEIITVENPKMPYEMKEMALEAIVQLWRIPSFVTELYINYDCDYYCSNLFEELTKLLSKNAFPVSGQLYTTHLLSLDALLTVIDSTEAHCQAKVLNSLTQQEKKETARPSCEIVDGTREASNTERTASDGKAVGMASDIPGLHLPGGGRLPPEHGKSGCSDLEEAVDSGADKKFARKPPRFSCLLPDPRELIEIKNKKKLLITGTEQFNQKPKKGIQFLQEKGLLTIPMDNTEVAQWLRENPRLDKKMIGEFVSDRKNIDLLESFVSTFSFQGLRLDEALRLYLEAFRLPGEAPVIQRLLEAFTERWMNCNGSPFANSDACFSLAYAVIMLNTDQHNHNVRKQNAPMTLEEFRKNLKGVNGGKDFEQDILEDMYHAIKNEEIVMPEEQTGLVRENYVWNVLLHRGATPEGIFLRVPTASYDLDLFTMTWGPTIAALSYVFDKSLEETIIQKAISGFRKCAMISAHYGLSDVFDNLIISLCKFTALSSESIENLPSVFGSNPKAHIAAKTVFHLAHRHGDILREGWKNIMEAMLQLFRAQLLPKAMIEVEDFVDPNGKISLQREETPSNRGESTVLSFVSWLTLSGPEQSSVRGPSTENQEAKRVALECIKQCDPEKMITESKFLQLESLQELMKALVSVTPDEETYDEEDAAFCLEMLLRIVLENRDRVGCVWQTVRDHLYHLCVQAQDFCFLVERAVVGLLRLAIRLLRREEISAQVLLSLRILLLMKPSVLSRVSHQVAYGLHELLKTNAANIHSGDDWATLFTLLECIGSGVKPPAALQATARADAPDAGAQSDSELPSYHQNDVSLDRGYTSDSEVYTDHGRPGKIHRSATDADVVNSGWLVVGKDDVDNSKPGPSRPGPSPLINQYSLTVGLDLGPHDTKSLLKCVESLSFIVRDAAHITPDNFELCVKTLRIFVEASLNGGCKSQEKRGKSHKYDSKGNRFKKKSKEGSMLRRPRTSSQHASRGGQSDDDEDEGVPASYHTVSLQVSQDLLDLMHTLHTRAASIYSSWAEEQRHLETGGQKIEADSRTLWAHCWCPLLQGIACLCCDARRQVRMQALTYLQRALLVHDLQKLDALEWESCFNKVLFPLLTKLLENISPADVGGMEETRMRASTLLSKVFLQHLSPLLSLSTFAALWLTILDFMDKYMHAGSSDLLSEAIPESLKNMLLVMDTAEIFHSADARGGGPSALWEITWERIDCFLPHLRDELFKQTVIQDPMPMEPQGQKPLASAHLTSAAGDTRTPGHPPPPEIPSELGACDFEKPESPRAASSSSPGSPVASSPSRLSPTPDGPPPLAQPPLILQPLASPLQVGVPPMTLPIILNPALIEATSPVPLLATPRPTDPIPTSEVN

SEQ ID NO: 15074 - protein, 1856 aa, Homo sapiens
MVDKNIYIIQGEINIVVGAIKRNARWSTHTPLDEERDPLLHSFGHLKEVLNSITELSEIEPNVFLRPFLEVIRSEDTTGPITGLALTSVNKFLSYALIDPTHEGTAEGMENMADAVTHARFVGTDPASDEVVLMKILQVLRTLLLTPVGAHLTNESVCEIMQSCFRICFEMRLSELLRKSAEHTLVDMVQLLFTRLPQFKEEPKNYVGTNMKKLKMRAGGMSDSSKWKKQKRSPRPPRHMTKVTPGSELPTPNGTTLSSNLTGGMPFIDVPTPISSASSEAASAVVSPSTDSGLEFSSQTTSKEDLTDLEQPGSPGYSTATEPGSSELGVPEQPDLQQEGTHVEKSQSASVESIPEVLEECTSPADHSDSASVHDMDYVNPRGVRFTQSSQKEGTALVPYGLPCIRELFRFLISLTNPHDRHNSEVMIHMGLHLLTVALESAPVAQCQTLLGLIKDEMCRHLFQLLSIERLNLYAASLRVCFLLFESMREHLKFQMEMYIKKLMEIITVENPKMPYEMKEMALEAIVQLWRIPSFVTELYINYDCDYYCSNLFEELTKLLSKNAFPVSGQLYTTHLLSLDALLTVIDSTEAHCQAKVLNSLTQQEKKETARPSCEIVDGTREASNTERTASDGKAVGMASDIPGLHLPGGGRLPPEHGKSGCSDLEEAVDSGADKKFARKPPRFSCLLPDPRELIEIKNKKKLLITGTEQFNQKPKKGIQFLQEKGLLTIPMDNTEVAQWLRENPRLDKKMIGEFVSDRKNIDLLESFVSTFSFQGLRLDEALRLYLEAFRLPGEAPVIQRLLEAFTERWMNCNGSPFANSDACFSLAYAVIMLNTDQHNHNVRKQNAPMTLEEFRKNLKGVNGGKDFEQDILEDMYHAIKNEEIVMPEEQTGLVRENYVWNVLLHRGATPEGIFLRVPTASYDLDLFTMTWGPTIAALSYVFDKSLEETIIQKAISGFRKCAMISAHYGLSDVFDNLIISLCKFTALSSESIENLPSVFGSNPKAHIAAKTVFHLAHRHGDILREGWKNIMEAMLQLFRAQLLPKAMIEVEDFVDPNGKISLQREETPSNRGESTVLSFVSWLTLSGPEQSSVRGPSTENQEAKRVALECIKQCDPEKMITESKFLQLESLQELMKALVSVTPDEETYDEEDAAFCLEMLLRIVLENRDRVGCVWQTVRDHLYHLCVQAQDFCFLVERAVVGLLRLAIRLLRREEISAQVLLSLRILLLMKPSVLSRVSHQVAYGLHELLKTNAANIHSGDDWATLFTLLECIGSGVKPPAALQATARADAPDAGAQSDSELPSYHQNDVSLDRGYTSDSEVYTDHGRPGKIHRSATDADVVNSGWLVVGKDDVDNSKPGPSRPGPSPLINQYSLTVGLDLGPHDTKSLLKCVESLSFIVRDAAHITPDNFELCVKTLRIFVEASLNGGCKSQEKRGKSHKYDSKGNRFKKKSKEGSMLRRPRTSSQHASRGGQSDDDEDEGVPASYHTVSLQLLDLMHTLHTRAASIYSSWAEEQRHLETGGQKIEADSRTLWAHCWCPLLQGIACLCCDARRQVRMQALTYLQRALLVHDLQKLDALEWESCFNKVLFPLLTKLLENISPADVGGMEETRMRASTLLSKVFLQHLSPLLSLSTFAALWLTILDFMDKYMHAGSSDLLSEAIPESLKNMLLVMDTAEIFHSADARGGGPSALWEITWERIDCFLPHLRDELFKQTVIQDPMPMEPQGQKPLASAHLTSAAGDTRTPGHPPPPEIPSELGACDFEKPESPRAASSSSPGSPVASSPSRLSPTPDGPPPLAQPPLILQPLASPLQVGVPPMTLPIILNPALIEATSPVPLLATPRPTDPIPTSEVN

SEQ ID NO: 15075 - protein, 1855 aa, Homo sapiens
MVDKNIYIIQGEINIVVGAIKRNARWSTHTPLDEERDPLLHSFGHLKEVLNSITELSEIEPNVFLRPFLEVIRSEDTTGPITGLALTSVNKFLSYALIDPTHEGTAEGMENMADAVTHARFVGTDPASDEVVLMKILQVLRTLLLTPVGAHLTNESVCEIMQSCFRICFEMRLSELLRKSAEHTLVDMVQLLFTRLPQFKEEPKNYVGTNMKKLKMRAGGMSDSSKWKKQKRSPRPPRHMTKVTPGSELPTPNGTTLSSNLTGGMPFIDVPTPISSASSEAASAVVSPSTDSGLEFSSQTTSKEDLTDLEQPGSPGYSTATEPGSSELGVPEQPDLQEGTHVEKSQSASVESIPEVLEECTSPADHSDSASVHDMDYVNPRGVRFTQSSQKEGTALVPYGLPCIRELFRFLISLTNPHDRHNSEVMIHMGLHLLTVALESAPVAQCQTLLGLIKDEMCRHLFQLLSIERLNLYAASLRVCFLLFESMREHLKFQMEMYIKKLMEIITVENPKMPYEMKEMALEAIVQLWRIPSFVTELYINYDCDYYCSNLFEELTKLLSKNAFPVSGQLYTTHLLSLDALLTVIDSTEAHCQAKVLNSLTQQEKKETARPSCEIVDGTREASNTERTASDGKAVGMASDIPGLHLPGGGRLPPEHGKSGCSDLEEAVDSGADKKFARKPPRFSCLLPDPRELIEIKNKKKLLITGTEQFNQKPKKGIQFLQEKGLLTIPMDNTEVAQWLRENPRLDKKMIGEFVSDRKNIDLLESFVSTFSFQGLRLDEALRLYLEAFRLPGEAPVIQRLLEAFTERWMNCNGSPFANSDACFSLAYAVIMLNTDQHNHNVRKQNAPMTLEEFRKNLKGVNGGKDFEQDILEDMYHAIKNEEIVMPEEQTGLVRENYVWNVLLHRGATPEGIFLRVPTASYDLDLFTMTWGPTIAALSYVFDKSLEETIIQKAISGFRKCAMISAHYGLSDVFDNLIISLCKFTALSSESIENLPSVFGSNPKAHIAAKTVFHLAHRHGDILREGWKNIMEAMLQLFRAQLLPKAMIEVEDFVDPNGKISLQREETPSNRGESTVLSFVSWLTLSGPEQSSVRGPSTENQEAKRVALECIKQCDPEKMITESKFLQLESLQELMKALVSVTPDEETYDEEDAAFCLEMLLRIVLENRDRVGCVWQTVRDHLYHLCVQAQDFCFLVERAVVGLLRLAIRLLRREEISAQVLLSLRILLLMKPSVLSRVSHQVAYGLHELLKTNAANIHSGDDWATLFTLLECIGSGVKPPAALQATARADAPDAGAQSDSELPSYHQNDVSLDRGYTSDSEVYTDHGRPGKIHRSATDADVVNSGWLVVGKDDVDNSKPGPSRPGPSPLINQYSLTVGLDLGPHDTKSLLKCVESLSFIVRDAAHITPDNFELCVKTLRIFVEASLNGGCKSQEKRGKSHKYDSKGNRFKKKSKEGSMLRRPRTSSQHASRGGQSDDDEDEGVPASYHTVSLQLLDLMHTLHTRAASIYSSWAEEQRHLETGGQKIEADSRTLWAHCWCPLLQGIACLCCDARRQVRMQALTYLQRALLVHDLQKLDALEWESCFNKVLFPLLTKLLENISPADVGGMEETRMRASTLLSKVFLQHLSPLLSLSTFAALWLTILDFMDKYMHAGSSDLLSEAIPESLKNMLLVMDTAEIFHSADARGGGPSALWEITWERIDCFLPHLRDELFKQTVIQDPMPMEPQGQKPLASAHLTSAAGDTRTPGHPPPPEIPSELGACDFEKPESPRAASSSSPGSPVASSPSRLSPTPDGPPPLAQPPLILQPLASPLQVGVPPMTLPIILNPALIEATSPVPLLATPRPTDPIPTSEVN

SEQ ID NO: 15076 - protein, 71 aa, Homo sapiens
MASNNTASIAQARKLVEQLKMEANIDRIKVSKAAADLMAYCEAHAKEDPLLTPVPASENPFREKKFFCAIL

SEQ ID NO: 15077 - protein, 699 aa, Homo sapiens
MCGIFAYLNYHVPRTRREILETLIKGLQRLEYRGYDSAGVGFDGGNDKDWEANACKIQLIKKKGKVKALDEEVHKQQDMDLDIEFDVHLGIAHTRWATHGEPSPVNSHPQRSDKNNEFIVIHNGIITNYKDLKKFLESKGYDFESETDTETIAKLVKYMYDNRESQDTSFTTLVERVIQQLEGAFALVFKSVHFPGQAVGTRRGSPLLIGVRSEHKLSTDHIPILYRTARTQIGSKFTRWGSQGERGKDKKGSCNLSRVDSTTCLFPVEEKAVEYYFASDASAVIEHTNRVIFLEDDDVAAVVDGRLSIHRIKRTAGDHPGRAVQTLQMELQQIMKGNFSSFMQKEIFEQPESVVNTMRGRVNFDDYTVNLGGLKDHIKEIQRCRRLILIACGTSYHAGVATRQVLEELTELPVMVELASDFLDRNTPVFRDDVCFFLSQSGETADTLMGLRYCKERGALTVGITNTVGSSISRETDCGVHINAGPEIGVASTKAYTSQFVSLVMFALMMCDDRISMQERRKEIMLGLKRLPDLIKEVLSMDDEIQKLATELYHQKSVLIMGRGYHYATCLEGALKIKEITYMHSEGILAGELKHGPLALVDKLMPVIMIIMRDHTYAKCQNALQQVVARQGRPVVICDKEDTETIKNTKRTIKVPHSVDCLQGILSVIPLQLLAFHLAVLRGYDVDFPRNLAKSVTVE

SEQ ID NO: 15078 - protein, 681 aa, Homo sapiens
MCGIFAYLNYHVPRTRREILETLIKGLQRLEYRGYDSAGVGFDGGNDKDWEANACKIQLIKKKGKVKALDEEVHKQQDMDLDIEFDVHLGIAHTRWATHGEPSPVNSHPQRSDKNNEFIVIHNGIITNYKDLKKFLESKGYDFESETDTETIAKLVKYMYDNRESQDTSFTTLVERVIQQLEGAFALVFKSVHFPGQAVGTRRGSPLLIGVRSEHKLSTDHIPILYRTGKDKKGSCNLSRVDSTTCLFPVEEKAVEYYFASDASAVIEHTNRVIFLEDDDVAAVVDGRLSIHRIKRTAGDHPGRAVQTLQMELQQIMKGNFSSFMQKEIFEQPESVVNTMRGRVNFDDYTVNLGGLKDHIKEIQRCRRLILIACGTSYHAGVATRQVLEELTELPVMVELASDFLDRNTPVFRDDVCFFLSQSGETADTLMGLRYCKERGALTVGITNTVGSSISRETDCGVHINAGPEIGVASTKAYTSQFVSLVMFALMMCDDRISMQERRKEIMLGLKRLPDLIKEVLSMDDEIQKLATELYHQKSVLIMGRGYHYATCLEGALKIKEITYMHSEGILAGELKHGPLALVDKLMPVIMIIMRDHTYAKCQNALQQVVARQGRPVVICDKEDTETIKNTKRTIKVPHSVDCLQGILSVIPLQLLAFHLAVLRGYDVDFPRNLAKSVTVE

SEQ ID NO: 15079 - protein, 1021 aa, Homo sapiens
MAGISYVASFFLLLTKLSIGQREVTVQKGPLFRAEGYPVSIGCNVTGHQGPSEQHFQWSVYLPTNPTQEVQIISTKDAAFSYAVYTQRVRSGDVYVERVQGNSVLLHISKLQMKDAGEYECHTPNTDEKYYGSYSAKTNLIVIPDTLSATMSSQTLGKEEGEPLALTCEASKATAQHTHLSVTWYLTQDGGGSQATEIISLSKDFILVPGPLYTERFAASDVQLNKLGPTTFRLSIERLQSSDQGQLFCEATEWIQDPDETWMFITKKQTDQTTLRIQPAVKDFQVNITADSLFAEGKPLELVCLVVSSGRDPQLQGIWFFNGTEIAHIDAGGVLGLKNDYKERASQGELQVSKLGPKAFSLKIFSLGPEDEGAYRCVVAEVMKTRTGSWQVLQRKQSPDSHVHLRKPAARSVVMSTKNKQQVVWEGETLAFLCKAGGAESPLSVSWWHIPRDQTQPEFVAGMGQDGIVQLGASYGVPSYHGNTRLEKMDWATFQLEITFTAITDSGTYECRVSEKSRNQARDLSWTQKISVTVKSLESSLQVSLMSRQPQVMLTNTFDLSCVVRAGYSDLKVPLTVTWQFQPASSHIFHQLIRITHNGTIEWGNFLSRFQKKTKVSQSLFRSQLLVHDATEEETGVYQCEVEVYDRNSLYNNRPPRASAISHPLRIAVTLPESKLKVNSRSQVQELSINSNTDIECSILSRSNGNLQLAIIWYFSPVSTNASWLKILEMDQTNVIKTGDEFHTPQRKQKFHTEKVSQDLFQLHILNVEDSDRGKYHCAVEEWLLSTNGTWHKLGEKKSGLTELKLKPTGSKVRVSKVYWTENVTEHREVAIRCSLESVGSSATLYSVMWYWNRENSGSKLLVHLQHDGLLEYGEEGLRRHLHCYRSSSTDFVLKLHQVEMEDAGMYWCRVAEWQLHGHPSKWINQASDESQRMVLTVLPSEPTLPSRICSSAPLLYFLFICPFVLLLLLLISLLCLYWKARKLSTLRSNTRKEKALWVDLKEAGGVTTNRREDEEEDEGN

SEQ ID NO: 15080 - protein, 482 aa, Homo sapiens
MSEIRKDTLKAILLELECHFTWNLLKEDIDLFEVEDTIGQQLEFLTTKSRLALYNLLAYVKHLKGQNKDALECLEQAEEIIQQEHSDKEEVRSLVTWGNYAWVYYHMDQLEEAQKYTGKIGNVCKKLSSPSNYKLECPETDCEKGWALLKFGGKYYQKAKAAFEKALEVEPDNPEFNIGYAITVYRLDDSDREGSVKSFSLGPLRKAVTLNPDNSYIKVFLALKLQDVHAEAEGEKYIEEILDQISSQPYVLRYAAKFYRRKNSWNKALELLKKALEVTPTSSFLHHQMGLCYRAQMIQIKKATHNRPKGKDKLKVDELISSAIFHFKAAMERDSMFAFAYTDLANMYAEGGQYSNAEDIFRKALRLENITDDHKHQIHYHYGRFQEFHRKSENTAIHHYLEALKVKDRSPLRTKLTSALKKLSTKRLCHNALDVQSLSALGFVYKLEGEKRQAAEYYEKAQKIDPENAEFLTALCELRLSI

SEQ ID NO: 15081 - protein, 434 aa, Homo sapiens
MSEIRKDTLKAILLELECHFTWNLLKEDIDLFEVEDTIGQQLEFLTTKSRLALYNLLAYVKHLKGQNKDALECLEQAEEIIQQEHSDKEEVRSLVTWGNYAWVYYHMDQLEEAQKYTGKIGNVCKKLSSPSNYKLECPETDCEKGWALLKFGGKYYQKAVTLNPDNSYIKVFLALKLQDVHAEAEGEKYIEEILDQISSQPYVLRYAAKFYRRKNSWNKALELLKKALEVTPTSSFLHHQMGLCYRAQMIQIKKATHNRPKGKDKLKVDELISSAIFHFKAAMERDSMFAFAYTDLANMYAEGGQYSNAEDIFRKALRLENITDDHKHQIHYHYGRFQEFHRKSENTAIHHYLEALKVKDRSPLRTKLTSALKKLSTKRLCHNALDVQSLSALGFVYKLEGEKRQAAEYYEKAQKIDPENAEFLTALCELRLSI

SEQ ID NO: 15082 - protein, 1194 aa, Homo sapiens
MKCFFPVLSCLAVLGVVSAQRQVTVQEGPLYRTEGSHITIWCNVSGYQGPSEQNFQWSIYLPSSPEREVQIVSTMDSSFPYAIYTQRVRGGKIFIERVQGNSTLLHITDLQARDAGEYECHTPSTDKQYFGSYSAKMNLVVIPDSLQTTAMPQTLHRVEQDPLELTCEVASETIQHSHLSVAWLRQKVGEKPVEVISLSRDFMLHSSSEYAQRQSLGEVRLDKLGRTTFRLTIFHLQPSDQGEFYCEAAEWIQDPDGSWYAMTRKRSEGAVVNVQPTDKEFTVRLETEKRLHTVGEPVEFRCILEAQNVPDRYFAVSWAFNSSLIATMGPNAVPVLNSEFAHREARGQLKVAKESDSVFVLKIYHLRQEDSGKYNCRVTEREKTVTGEFIDKESKRPKNIPIIVLPLKSSISVEVASNASVILEGEDLRFSCSVRTAGRPQGRFSVIWQLVDRQNRRSNIMWLDRDGTVQPGSSYWERSSFGGVQMEQVQPNSFSLGIFNSRKEDEGQYECHVTEWVRAVDGEWQIVGERRASTPISITALEMGFAVTAISRTPGVTYSDSFDLQCIIKPHYPAWVPVSVTWRFQPVGTVEFHDLVTFTRDGGVQWGDRSSSFRTRTAIEKAESSNNVRLSISRASDTEAGKYQCVAELWRKNYNNTWTRLAERTSNLLEIRVLQPVTKLQVSKSKRTLTLVENKPIQLNCSVKSQTSQNSHFAVLWYVHKPSDADGKLILKTTHNSAFEYGTYAEEEGLRARLQFERHVSGGLFSLTVQRAEVSDSGSYYCHVEEWLLSPNYAWYKLAEEVSGRTEVTVKQPDSRLRLSQAQGNLSVLETRQVQLECVVLNRTSITSQLMVEWFVWKPNHPERETVARLSRDATFHYGEQAAKNNLKGRLHLESPSPGVYRLFIQNVAVQDSGTYSCHVEEWLPSPSGMWYKRAEDTAGQTALTVMRPDASLQVDTVVPNATVSEKAAFQLDCSIVSRSSQDSRFAVAWYSLRTKAGGKRSSPGLEEQEEEREEEEEEDDDDDDDPTERTALLSVGPDAVFGPEGSPWEGRLRFQRLSPVLYRLTVLQASPQDTGNYSCHVEEWLPSPQKEWYRLTEEESAPIGIRVLDTSPTLQSIICSNDALFYFVFFYPFPIFGILIITILLVRFKSRNSSKNSDGKNGVPLLWIKEPHLNYSPTCLEPPVLSIHPGAID

SEQ ID NO: 15083 - protein, 1214 aa, Homo sapiens
MKCFFPVLSCLAVLGVVSAQRQVTVQEGPLYRTEGSHITIWCNVSGYQGPSEQNFQWSIYLPSSPEREVQIVSTMDSSFPYAIYTQRVRGGKIFIERVQGNSTLLHITDLQARDAGEYECHTPSTDKQYFGSYSAKMNLVVIPDSLQTTAMPQTLHRVEQDPLELTCEVASETIQHSHLSVAWLRQKVGEKPVEVISLSRDFMLHSSSEYAQRQSLGEVRLDKLGRTTFRLTIFHLQPSDQGEFYCEAAEWIQDPDGSWYAMTRKRSEGAVVNVQPTDKEFTVRLETEKRLHTVGEPVEFRCILEAQNVPDRYFAVSWAFNSSLIATMGPNAVPVLNSEFAHREARGQLKVAKESDSVFVLKIYHLRQEDSGKYNCRVTEREKTVTGEFIDKESKRPKNIPIIVLPLTDNWVVKVPQHHQLLSQGHLESSISVEVASNASVILEGEDLRFSCSVRTAGRPQGRFSVIWQLVDRQNRRSNIMWLDRDGTVQPGSSYWERSSFGGVQMEQVQPNSFSLGIFNSRKEDEGQYECHVTEWVRAVDGEWQIVGERRASTPISITALEMGFAVTAISRTPGVTYSDSFDLQCIIKPHYPAWVPVSVTWRFQPVGTVEFHDLVTFTRDGGVQWGDRSSSFRTRTAIEKAESSNNVRLSISRASDTEAGKYQCVAELWRKNYNNTWTRLAERTSNLLEIRVLQPVTKLQVSKSKRTLTLVENKPIQLNCSVKSQTSQNSHFAVLWYVHKPSDADGKLILKTTHNSAFEYGTYAEEEGLRARLQFERHVSGGLFSLTVQRAEVSDSGSYYCHVEEWLLSPNYAWYKLAEEVSGRTEVTVKQPDSRLRLSQAQGNLSVLETRQVQLECVVLNRTSITSQLMVEWFVWKPNHPERETVARLSRDATFHYGEQAAKNNLKGRLHLESPSPGVYRLFIQNVAVQDSGTYSCHVEEWLPSPSGMWYKRAEDTAGQTALTVMRPDASLQVDTVVPNATVSEKAAFQLDCSIVSRSSQDSRFAVAWYSLRTKAGGKRSSPGLEEQEEEREEEEEEDDDDDDDPTERTALLSVGPDAVFGPEGSPWEGRLRFQRLSPVLYRLTVLQASPQDTGNYSCHVEEWLPSPQKEWYRLTEEESAPIGIRVLDTSPTLQSIICSNDALFYFVFFYPFPIFGILIITILLVRFKSRNSSKNSDGKNGVPLLWIKEPHLNYSPTCLEPPVLSIHPGAID

SEQ ID NO: 15084 - protein, 156 aa, Homo sapiens
MGASRLYTLVLVLQPQRVLLGMKKRGFGAGRWNGFGGKVQEGETIEDGARRELQEESGLTVDALHKVGQIVFEFVGEPELMDVHVFCTDSIQGTPVESDEMRPCWFQLDQIPFKDMWPDDSYWFPLLLQKKKFHGYFKFQGQDTILDYTLREVDTV

SEQ ID NO: 15085 - protein, 197 aa, Homo sapiens
MYWSNQITRRLGERVQGFMSGISPQQMGEPEGSWSGKNPGTMGASRLYTLVLVLQPQRVLLGMKKRGFGAGRWNGFGGKVQEGETIEDGARRELQEESGLTVDALHKVGQIVFEFVGEPELMDVHVFCTDSIQGTPVESDEMRPCWFQLDQIPFKDMWPDDSYWFPLLLQKKKFHGYFKFQGQDTILDYTLREVDTV

SEQ ID NO: 15086 - protein, 179 aa, Homo sapiens
MSGISPQQMGEPEGSWSGKNPGTMGASRLYTLVLVLQPQRVLLGMKKRGFGAGRWNGFGGKVQEGETIEDGARRELQEESGLTVDALHKVGQIVFEFVGEPELMDVHVFCTDSIQGTPVESDEMRPCWFQLDQIPFKDMWPDDSYWFPLLLQKKKFHGYFKFQGQDTILDYTLREVDTV

SEQ ID NO: 15087 - protein, 171 aa, Homo sapiens
MGEPEGSWSGKNPGTMGASRLYTLVLVLQPQRVLLGMKKRGFGAGRWNGFGGKVQEGETIEDGARRELQEESGLTVDALHKVGQIVFEFVGEPELMDVHVFCTDSIQGTPVESDEMRPCWFQLDQIPFKDMWPDDSYWFPLLLQKKKFHGYFKFQGQDTILDYTLREVDTV

SEQ ID NO: 15088 - protein, 802 aa, Homo sapiens
MAATRAGPRAREIFTSLEYGPVPESHACALAWLDTQDRCLGHYVNGKWLKPEHRNSVPCQDPITGENLASCLQAQAEDVAAAVEAARMAFKGWSAHPGVVRAQHLTRLAEVIQKHQRLLWTLESLVTGRAVREVRDGDVQLAQQLLHYHAIQASTQEEALAGWEPMGVIGLILPPTFSFLEMMWRICPALAVGCTVVALVPPASPAPLLLAQLAGELGPFPGILNVLSGPASLVPILASQPGIRKVAFCGAPEEGRALRRSLAGECAELGLALGTESLLLLTDTADVDSAVEGVVDAAWSDRGPGGLRLLIQESVWDEAMRRLQERMGRLRSGRGLDGAVDMGARGAAACDLVQRFVREAQSQGAQVFQAGDVPSERPFYPPTLVSNLPPASPCAQVEVPWPVVVASPFRTAKEALLVANGTPRGGSASVWSERLGQALELGYGLQVGTVWINAHGLRDPSVPTGGCKESGCSWHGGPDGLYEYLRPSGTPARLSCLSKNLNYDTFGLAVPSTLPAGPEIGPSPAPPYGLFVGGRFQAPGARSSRPIRDSSGNLHGYVAEGGAKDIRGAVEAAHQAFPGWAGQSPGARAALLWALAAALERRKSTLASRLERQGAELKAAEAEVELSARRLRAWGARVQAQGHTLQVAGLRGPVLRLREPLGVLAVVCPDEWPLLAFVSLLAPALAYGNTVVMVPSAACPLLALEVCQDMATVFPAGLANVVTGDRDHLTRCLALHQDVQAMWYFGSAQGSQFVEWASAGNLKPVWASRGCPRAWDQEAEGAGPELGLRVARTKALWLPMGD

SEQ ID NO: 15089 - protein, 308 aa, Homo sapiens
MAATRAGPRAREIFTSLEYGPVPESHACALAWLDTQDRCLGHYVNGKWLKPEHRNSVPCQDPITGENLASCLQAQAEDVAAAVEAARMAFKGWSAHPGVVRAQHLTRLAEVIQKHQRLLWTLESLVTGRAVREVRDGDVQLAQQLLHYHAIQASTQEEALAGWEPMGVIGLILPPTFSFLEMMWRICPALAVGCTVVALVPPASPAPLLLAQLAGELGPFPGILNVLSGPASLVPILASQPGIRKVAFCGAPEVPSGQGSWRNAAGGRKAPPAAELGGVPRKGVPFDGAWRESVRSWAWRWGRSRCCC

SEQ ID NO: 15090 - protein, 751 aa, Homo sapiens
MAATRAGPRAREIFTSLEYGPVPESHACALAWLDTQDRCLGHYVNGKWLKPEHRNSVPCQDPITGENLASCLQAQAEDVAAAVEAARMAFKGWSAHPGVVRAQHLTRLAEVIQKHQRLLWTLESLVTGRAVREVRDGDVQLAQQLLHYHAIQASTQEEALAGWEPMGVIGLILPPTFSFLEMMWRICPALAVGCTVVALVPPASPAPLLLAQLAGELGPFPGILNVLSGPASLVPILASQPGIRKVAFCGAPEGGLRLLIQESVWDEAMRRLQERMGRLRSGRGLDGAVDMGARGAAACDLVQRFVREAQSQGAQVFQAGDVPSERPFYPPTLVSNLPPASPCAQVEVPWPVVVASPFRTAKEALLVANGTPRGGSASVWSERLGQALELGYGLQVGTVWINAHGLRDPSVPTGGCKESGCSWHGGPDGLYEYLRPSGTPARLSCLSKNLNYDTFGLAVPSTLPAGPEIGPSPAPPYGLFVGGRFQAPGARSSRPIRDSSGNLHGYVAEGGAKDIRGAVEAAHQAFPGWAGQSPGARAALLWALAAALERRKSTLASRLERQGAELKAAEAEVELSARRLRAWGARVQAQGHTLQVAGLRGPVLRLREPLGVLAVVCPDEWPLLAFVSLLAPALAYGNTVVMVPSAACPLLALEVCQDMATVFPAGLANVVTGDRDHLTRCLALHQDVQAMWYFGSAQGSQFVEWASAGNLKPVWASRGCPRAWDQEAEGAGPELGLRVARTKALWLPMGD

SEQ ID NO: 15091 - protein, 951 aa, Homo sapiens
MDGRWQCSCWAWFLLVLAVVAGDTVSTGSTDNSPTSNSLEGGTDATAFWWGEWTKWTACSRSCGGGVTSQERHCLQQRRKSVPGPGNRTCTGTSKRYQLCRVQECPPDGRSFREEQCVSFNSHVYNGRTHQWKPLYPDDYVHISSKPCDLHCTTVDGQRQLMVPARDGTSCKLTDLRGVCVSGKCEPIGCDGVLFSTHTLDKCGICQGDGSSCTHVTGNYRKGNAHLGYSLVTHIPAGARDIQIVERKKSADVLALADEAGYYFFNGNYKVDSPKNFNIAGTVVKYRRPMDVYETGIEYIVAQGPTNQGLNVMVWNQNGKSPSITFEYTLLQPPHESRPQPIYYGFSESAESQGLDGAGLMGFVPHNGSLYGQASSERLGLDNRLFGHPGLDMELGPSQGQETNEVCEQAGGGACEGPPRGKGFRDRNVTGTPLTGDKDDEEVDTHFASQEFFSANAISDQLLGAGSDLKDFTLNETVNSIFAQGAPRSSLAESFFVDYEENEGAGPYLLNGSYLELSSDRVANSSSEAPFPNVSTSLLTSAGNRTHKARTRPKARKQGVSPADMYRWKLSSHEPCSATCTTGVMSAYAMCVRYDGVEVDDSYCDALTRPEPVHEFCAGRECQPRWETSSWSECSRTCGEGYQFRVVRCWKMLSPGFDSSVYSDLCEAAEAVRPEERKTCRNPACGPQWEMSEWSECTAKCGERSVVTRDIRCSEDEKLCDPNTRPVGEKNCTGPPCDRQWTVSDWGPCSGSCGQGRTIRHVYCKTSDGRVVPESQCQMETKPLAIHPCGDKNCPAHWLAQDWERCNTTCGRGVKKRLVLCMELANGKPQTRSGPECGLAKKPPEESTCFERPCFKWYTSPWSECTKTCGVGVRMRDVKCYQGTDIVRGCDPLVKPVGRQACDLQPCPTEPPDDSCQDQPGTNCALAIKVNLCGHWYYSKACCRSCRPPHS

SEQ ID NO: 15092 - protein, 1691 aa, Homo sapiens
MASWTSPWWVLIGMVFMHSPLPQTTAEKSPGAYFLPEFALSPQGSFLEDTTGEQFLTYRYDDQTSRNTRSDEDKDGNWDAWGDWSDCSRTCGGGASYSLRRCLTGRNCEGQNIRYKTCSNHDCPPDAEDFRAQQCSAYNDVQYQGHYYEWLPRYNDPAAPCALKCHAQGQNLVVELAPKVLDGTRCNTDSLDMCISGICQAVGCDRQLGSNAKEDNCGVCAGDGSTCRLVRGQSKSHVSPEKREENVIAVPLGSRSVRITVKGPAHLFIESKTLQGSKGEHSFNSPGVFLVENTTVEFQRGSERQTFKIPGPLMADFIFKTRYTAAKDSVVQFFFYQPISHQWRQTDFFPCTVTCGGGYQLNSAECVDIRLKRVVPDHYCHYYPENVKPKPKLKECSMDPCPSSDGFKEIMPYDHFQPLPRWEHNPWTACSVSCGGGIQRRSFVCVEESMHGEILQVEEWKCMYAPKPKVMQTCNLFDCPKWIAMEWSQCTVTCGRGLRYRVVLCINHRGEHVGGCNPQLKLHIKEECVIPIPCYKPKEKSPVEAKLPWLKQAQELEETRIATEEPTFIPEPWSACSTTCGPGVQVREVKCRVLLTFTQTETELPEEECEGPKLPTERPCLLEACDESPASRELDIPLPEDSETTYDWEYAGFTPCTATCVGGHQEAIAVCLHIQTQQTVNDSLCDMVHRPPAMSQACNTEPCPPRWHVGSWGPCSATCGVGIQTRDVYCLHPGETPAPPEECRDEKPHALQACNQFDCPPGWHIEEWQQCSRTCGGGTQNRRVTCRQLLTDGSFLNLSDELCQGPKASSHKSCARTDCPPHLAVGDWSKCSVSCGVGIQRRKQVCQRLAAKGRRIPLSEMMCRDLPGLPLVRSCQMPECSKIKSEMKTKLGEQGPQILSVQRVYIQTREEKRINLTIGSRAYLLPNTSVIIKCPVRRFQKSLIQWEKDGRCLQNSKRLGITKSGSLKIHGLAAPDIGVYRCIAGSAQETVVLKLIGTDNRLIARPALREPMREYPGMDHSEANSLGVTWHKMRQMWNNKNDLYLDDDHISNQPFLRALLGHCSNSAGSTNSWELKNKQFEAAVKQGAYSMDTAQFDELIRNMSQLMETGEVSDDLASQLIYQLVAELAKAQPTHMQWRGIQEETPPAAQLRGETGSVSQSSHAKNSGKLTFKPKGPVLMRQSQPPSISFNKTINSRIGNTVYITKRTEVINILCDLITPSEATYTWTKDGTLLQPSVKIILDGTGKIQIQNPTRKEQGIYECSVANHLGSDVESSSVLYAEAPVILSVERNITKPEHNHLSVVVGGIVEAALGANVTIRCPVKGVPQPNITWLKRGGSLSGNVSLLFNGSLLLQNVSLENEGTYVCIATNALGKAVATSVLHLLERRWPESRIVFLQGHKKYILQATNTRTNSNDPTGEPPPQEPFWEPGNWSHCSATCGHLGARIQRPQCVMANGQEVSEALCDHLQKPLAGFEPCNIRDCPARWFTSVWSQCSVSCGEGYHSRQVTCKRTKANGTVQVVSPRACAPKDRPLGRKPCFGHPCVQWEPGNRCPGRCMGRAVRMQQRHTACQHNSSDSNCDDRKRPTLRRNCTSGACDVCWHTGPWKPCTAACGRGFQSRKVDCIHTRSCKPVAKRHCVQKKKPISWRHCLGPSCDRDCTDTTHYCMFVKHLNLCSLDRYKQRCCQSCQEG

SEQ ID NO: 15093 - protein, 1682 aa, Homo sapiens
MASWTSPWWVLIGMVFMHSPLPQTTAEKSPGAYFLPEFALSPQGSFLEDTTGEQFLTYRYDDQTSRNTRSDEDKDGNWDAWGDWSDCSRTCGGGASYSLRRCLTGRNCEGQNIRYKTCSNHDCPPDAEDFRAQQCSAYNDVQYQGHYYEWLPRYNDPAAPCALKCHAQGQNLVVELAPKVLDGTRCNTDSLDMCISGICQAVGCDRQLGSNAKEDNCGVCAGDGSTCRLVRGQSKSHVSPEKREENVIAVPLGSRSVRITVKGPAHLFIESKTLQGSKGEHSFNSPGVFLVENTTVEFQRGSERQTFKIPGPLMADFIFKTRYTAAKDSVVQFFFYQPISHQWRQTDFFPCTVTCGGGYQLNSAECVDIRLKRVVPDHYCHYYPENVKPKPKLKECSMDPCPSSDGFKEIMPYDHFQPLPRWEHNPWTACSVSCGGGIQRRSFVCVEESMHGEILQVEEWKCMYAPKPKVMQTCNLFDCPKWIAMEWSQCTVTCGRGLRYRVVLCINHRGEHVGGCNPQLKLHIKEECVIPIPCYKPKEKSPVEAKLPWLKQAQELEETRIATEEPTFIPEPWSACSTTCGPGVQVREVKCRVLLTFTQTETELPEEECEGPKLPTERPCLLEACDESPASRELDIPLPEDSETTYDWEYAGFTPCTATCVGGHQEAIAVCLHIQTQQTVNDSLCDMVHRPPAMSQACNTEPCPPRWHVGSWGPCSATCGVGIQTRDVYCLHPGETPAPPEECRDEKPHALQACNQFDCPPGWHIEEWQQCSRTCGGGTQNRRVTCRQLLTDGSFLNLSDELCQGPKASSHKSCARTDCPPHLAVGDWSKCSVSCGVGIQRRKQVCQRLAAKGRRIPLSEMMCRDLPGLPLVRSCQMPECSKIKSEMKTKLGEQGPQILSVQRVYIQTREEKRINLTIGSRAYLLPNTSVIIKCPVRRFQKSLIQWEKDGRCLQNSKRLGITKSGSLKIHGLAAPDIGVYRCIAGSAQETVVLKLIGTDNRLIARPALREPMREYPGMDHSEANSLGVTWHKMRQMWNNKNDLYLDDDHISNQPFLRALLGHCSNSAGSTNSWELKNKQFEAAVKQGAYSMDTAQFDELIRNMSQLMETGEVSDDLASQLIYQLVAELAKAQPTHMQWRGIQEETPPAAQLRGETGSVSQSSHAKNSGKLTFKPKGPVLMRQSQPPSISFNKTINSRIGNTVYITKRTEVINILCDLITPSEATYTWTKDGTLLQPSVKIILDGTGKIQIQNPTRKEQGIYECSVANHLGSDVESSSVLYAEAPVILSVERNITKPEHNHLSVVVGGIVEAALGANVTIRCPVKGVPQPNITWLKRGGSLSGNVSLLFNGSLLLQNVSLENEGTYVCIATNALGKAVATSVLHLLERRWPESRIVFLQGHKKYILQATNTRTNSNDPTGEPPPQEPFWEPGNWSHCSATCGHLGARIQRPQCVMANGQEVSEALCDHLQKPLAGFEPCNIRDCPARWFTSVWSQCSVSCGEGYHSRQVTCKRTKANGTVQVVSPRACAPKDRPLGRKPCFGHPCVQWEPGNRCPGRCMGRAVRMQQRHTACQHNSSDSNCDDRKRPTLRRNCTSGACDVCWHTGPWKPCTAACGRGFQSRKVDCIHTRSCKPVAKRHCVQKKKPISWRHCLGPSCDSTYTSQTATNKGAASHVKRDKPLEGS

SEQ ID NO: 15094 - protein, 558 aa, Homo sapiens
MAKNRRDRNSWGGFSEKTYEWSSEEEEPVKKAGPVQVLIVKDDHSFELDETALNRILLSEAVRDKEVVAVSVAGAFRKGKSFLMDFMLRYMYNQESVDWVGDYNEPLTGFSWRGGSERETTGIQIWSEIFLINKPDGKKVAVLLMDTQGTFDSQSTLRDSATVFALSTMISSIQVYNLSQNVQEDDLQHLQLFTEYGRLAMEETFLKPFQSLIFLVRDWSFPYEFSYGADGGAKFLEKRLKVSGNQHEELQNVRKHIHSCFTNISCFLLPHPGLKVATNPNFDGKLKEIDDEFIKNLKILIPWLLSPESLDIKEINGNKITCRGLVEYFKAYIKIYQGEELPHPKSMLQATAEANNLAAVATAKDTYNKKMEEICGGDKPFLAPNDLQTKHLQLKEESVKLFRGVKKMGGEEFSRRYLQQLESEIDELYIQYIKHNDSKNIFHAARTPATLFVVIFITYVIAGVTGFIGLDIIASLCNMIMGLTLITLCTWAYIRYSGEYRELGAVIDQVAAALWDQGSTNEALYKLYSAAATHRHLYHQAFPTPKSESTEQSEKKKM

SEQ ID NO: 15095 - protein, 553 aa, Homo sapiens
MAKNRRDRNSWGGFSEKTYEWSSEEEEPVKKAGPVQVLIVKDDHSFELDETALNRILLSEAVRDKEVVAVSVAGAFRKGKSFLMDFMLRYMYNQESVDWVGDYNEPLTGFSWRGGSERETTGIQIWSEIFLINKPDGKKVAVLLMDTQGTFDSQSTLRDSATVFALSTMISSIQVYNLSQNVQEDDLQHLQLFTEYGRLAMEETFLKPFQSLIFLVRDWSFPYEFSYGADGGAKFLEKRLKVSGNQHEELQNVRKHIHSCFTNISCFLLPHPGLKVATNPNFDGKLKEIDDEFIKNLKILIPWLLSPESLDIKEINGNKITCRGLVEYFKAYIKIYQGEELPHPKSMLQATAEANNLAAVATAKDTYNKKMEEICGGDKPFLAPNDLQTKHLQLKEESVKLFRGVKKMGGEEFSRRYLQQLESEIDELYIQYIKHNDSKNIFHAARTPATLFVVIFITYVIAGVTGFIGLDIIASLCNMIMGLTLITLCTWAYIRYSGEYRELGAVIDQVAAALWDQALYKLYSAAATHRHLYHQAFPTPKSESTEQSEKKKM

SEQ ID NO: 15096 - protein, 583 aa, Homo sapiens
MAEGDEAARGQQPHQGLWRRRRTSDPSAAVNHVSSTTSLGENYEDDDLVNSDEVMKKPCPVQIVLAHEDDHNFELDEEALEQILLQEHIRDLNIVVVSVAGAFRKGKSFLLDFMLRYMYNKDSQSWIGGNNEPLTGFTWRGGCERETTGIQVWNEVFVIDRPNGTKVAVLLMDTQGAFDSQSTIKDCATVFALSTMTSSVQVYNLSQNIQEDDLQHLQLFTEYGRLAMEEIYQKPFQTLMFLIRDWSYPYEHSYGLEGGKQFLEKRLQVKQNQHEELQNVRKHIHNCFSNLGCFLLPHPGLKVATNPSFDGRLKDIDEDFKRELRNLVPLLLAPENLVEKEISGSKVTCRDLVEYFKAYIKIYQGEELPHPKSMLQATAEANNLAAVAGARDTYCKSMEQVCGGDKPYIAPSDLERKHLDLKEVAIKQFRSVKKMGGDEFCRRYQDQLEAEIEETYANFIKHNDGKNIFYAARTPATLFAVMFAMYIISGLTGFIGLNSIAVLCNLVMGLALIFLCTWAYVKYSGEFREIGTVIDQIAETLWEQVLKPLGDNLMEENIRQSVTNSIKAGLTDQVSHHARLKTD

SEQ ID NO: 15097 - protein, 579 aa, Homo sapiens
MAEGDEAARGQQPHQGLWRRRRTSDPSAAVNHVSSTTSLGENYEDDDLVNSDEVMKKPCPVQIVLAHEDDHNFELDEEALEQILLQEHIRDLNIVVVSVAGAFRKGKSFLLDFMLRYMYNKDSQSWIGGNNEPLTGFTWRGGCERETTGIQVWNEVFVIDRPNGTKVAVLLMDTQGAFDSQSTIKDCATVFALSTMTSSVQVYNLSQNIQEDDLQHLQLFTEYGRLAMEEIYQKPFQTLMFLIRDWSYPYEHSYGLEGGKQFLEKRLQVKQNQHEELQNVRKHIHNCFSNLGCFLLPHPGLKVATNPSFDGRLKDIDEDFKRELRNLVPLLLAPENLVEKEISGSKVTCRDLVEYFKAYIKIYQGEELPHPKSMLQATAEANNLAAVAGARDTYCKSMEQVCGGDKPYIAPSDLERKHLDLKEVAIKQFRSVKKMGGDEFCRRYQDQLEAEIEETYANFIKHNDGKNIFYAARTPATLFAVMFAMYIISGLTGFIGLNSIAVLCNLVMGLALIFLCTWAYVKYSGEFREIGTVIDQIAETLWEQVFSKLFEVTRRRMVHRALSSAQRQRLSSNNNKKKN

SEQ ID NO: 15098 - protein, 412 aa, Homo sapiens
MDTQGAFDSQSTIKDCATVFALSTMTSSVQVYNLSQNIQEDDLQHLQLFTEYGRLAMEEIYQKPFQTLMFLIRDWSYPYEHSYGLEGGKQFLEKRLQVKQNQHEELQNVRKHIHNCFSNLGCFLLPHPGLKVATNPSFDGRLKDIDEDFKRELRNLVPLLLAPENLVEKEISGSKVTCRDLVEYFKAYIKIYQGEELPHPKSMLQATAEANNLAAVAGARDTYCKSMEQVCGGDKPYIAPSDLERKHLDLKEVAIKQFRSVKKMGGDEFCRRYQDQLEAEIEETYANFIKHNDGKNIFYAARTPATLFAVMFAMYIISGLTGFIGLNSIAVLCNLVMGLALIFLCTWAYVKYSGEFREIGTVIDQIAETLWEQVLKPLGDNLMEENIRQSVTNSIKAGLTDQVSHHARLKTD

SEQ ID NO: 15099 - protein, 566 aa, Homo sapiens
MVLKKGIKFFQRLINSKSLRFGENYEDDDLVNSDEVMKKPCPVQIVLAHEDDHNFELDEEALEQILLQEHIRDLNIVVVSVAGAFRKGKSFLLDFMLRYMYNKDSQSWIGGNNEPLTGFTWRGGCERETTGIQVWNEVFVIDRPNGTKVAVLLMDTQGAFDSQSTIKDCATVFALSTMTSSVQVYNLSQNIQEDDLQHLQLFTEYGRLAMEEIYQKPFQTLMFLIRDWSYPYEHSYGLEGGKQFLEKRLQVKQNQHEELQNVRKHIHNCFSNLGCFLLPHPGLKVATNPSFDGRLKDIDEDFKRELRNLVPLLLAPENLVEKEISGSKVTCRDLVEYFKAYIKIYQGEELPHPKSMLQATAEANNLAAVAGARDTYCKSMEQVCGGDKPYIAPSDLERKHLDLKEVAIKQFRSVKKMGGDEFCRRYQDQLEAEIEETYANFIKHNDGKNIFYAARTPATLFAVMFAMYIISGLTGFIGLNSIAVLCNLVMGLALIFLCTWAYVKYSGEFREIGTVIDQIAETLWEQRSPRKVFSKLFEVTRRRMVHRALSSAQRQRLSSNNNKKKN

SEQ ID NO: 15100 - protein, 565 aa, Homo sapiens
MVLKKGIKFFQRLINSKSLRFGENYEDDDLVNSDEVMKKPCPVQIVLAHEDDHNFELDEEALEQILLQEHIRDLNIVVVSVAGAFRKGKSFLLDFMLRYMYNKDSQSWIGGNNEPLTGFTWRGGCERETTGIQVWNEVFVIDRPNGTKVAVLLMDTQGAFDSQSTIKDCATVFALSTMTSSVQVYNLSQNIQEDDLQHLQLFTEYGRLAMEEIYQKPFQTLMFLIRDWSYPYEHSYGLEGGKQFLEKRLQVKQNQHEELQNVRKHIHNCFSNLGCFLLPHPGLKVATNPSFDGRLKDIDEDFKRELRNLVPLLLAPENLVEKEISGSKVTCRDLVEYFKAYIKIYQGEELPHPKSMLQATAEANNLAAVAGARDTYCKSMEQVCGGDKPYIAPSDLERKHLDLKEVAIKQFRSVKKMGGDEFCRRYQDQLEAEIEETYANFIKHNDGKNIFYAARTPATLFAVMFAMYIISGLTGFIGLNSIAVLCNLVMGLALIFLCTWAYVKYSGEFREIGTVIDQIAETLWEQVLKPLGDNLMEENIRQSVTNSIKAGLTDQVSHHARLKTD

SEQ ID NO: 15101 - protein, 2273 aa, Homo sapiens [sequence omitted]

SEQ ID NO: 15102 - protein, 460 aa, Homo sapiens
MNTSAPPAVSPNITVLAPGKGPWQVAFIGITTGLLSLATVTGNLLVLISFKVNTELKTVNNYFLLSLACADLIIGTFSMNLYTTYLLMGHWALGTLACDLWLALDYVASNASVMNLLLISFDRYFSVTRPLSYRAKRTPRRAALMIGLAWLVSFVLWAPAILFWQYLVGERTVLAGQCYIQFLSQPIITFGTAMAAFYLPVTVMCTLYWRIYRETENRARELAALQGSETPGKGGGSSSSSERSQPGAEGSPETPPGRCCRCCRAPRLLQAYSWKEEEEEDEGSMESLTSSEGEEPGSEVVIKMPMVDPEAQAPTKQPPRSSPNTVKRPTKKGRDRAGKGQKPRGKEQLAKRKTFSLVKEKKAARTLSAILLAFILTWTPYNIMVLVSTFCKDCVPETLWELGYWLCYVNSTINPMCYALCNKAFRDTFRLLLLCRWDKRRWRKIPKRPGSVHRTPSRQC

SEQ ID NO: 15103 - protein, 454 aa, Homo sapiens
MNTSAPPAVSPNITVLAPGKGPWQVAFIGITTGLLSLATVTGNLLVLISFKVNTELKTVNNYFLLSLACADLIIGTFSMNLYTTYLLMGHWALGTLACDLWLALDYVASNASVMNLLLISFDRYFSVTRPLSYRAKRTPRRAALMIGLAWLVSFVLWAPAILFWQYLVGERTVLAGQCYIQFLSQPIITFGTAMAAFYLPVTVMCTLYWRIYRETENRARELAALQGSETPGKGGGSSSSSERSQPGAEGSPETPPGRCCRCCRAPRLLQAYSWKEEEEEDEGSMESLTSSEGEEPGSEVVIKMPMVDPEAQAPTKQPPRSSPNTVKRPTKKGRDRAGKGQKPRGKEQLAKRKTFSLVKEKKAARTLSAILLAFILTWTPYNIMVLVSTFCKDCVPETLWELGYWLCYVNSTINPMCYALCNKAFRDTFRLLLLCRWDKRRWRKIPKRPGSVHR

SEQ ID NO: 15104 - protein, 337 aa, Homo sapiens
MEKSWMLWNFVERWLIALASWSWALCRISLLPLIVTFHLYGGIILLLLIFISIAGILYKFQDVLLYFPEQPSSSRLYVPMPTGIPHENIFIRTKDGIRLNLILIRYTGDNSPYSPTIIYFHGNAGNIGHRLPNALLMLVNLKVNLLLVDYRGYGKSEGEASEEGLYLDSEAVLDYVMTRPDLDKTKIFLFGRSLGGAVAIHLASENSHRISAIMVENTFLSIPHMASTLFSFFPMRYLPLWCYKNKFLSYRKISQCRMPSLFISGLSDQLIPPVMMKQLYELSPSRTKRLAIFPDGTHNDTWQCQGYFTALEQFIKEVVKSHSPEEMAKTSSNVTII

SEQ ID NO: 15105 - protein, 271 aa, Homo sapiens
MVGALCGCWFRLGGARPLIPLGPTVVQTSMSRSQVALLGLSLLLMLLLYVGLPGPPEQTSCLWGDPNVTVLAGLTPGNSPIFYREVLPLNQAHRVEVVLLHGKAFNSHTWEQLGTLQLLSQRGYRAVALDLPGFGNSAPSKEASTEAGRAALLERALRDLEVQNAVLVSPSLSGHYALPFLMRGHHQLHGFVPIAPTSTQNYTQEQFWAVKTPTLILYGELDHILARESLRQLRHLPNHSVVKLRNAGHACYLHKPQDFHLVLLAFLDHLP

SEQ ID NO: 15106 - protein, 842 aa, Homo sapiens
MVTVGNYCEAEGPVGPAWMQDGLSPCFFFTLVPSTRMALGTLALVLALPCRRRERPAGADSLSWGAGPRISPYVLQLLLATLQAALPLAGLAGRVGTARGAPLPSYLLLASVLESLAGACGLWLLVVERSQARQRLAMGIWIKFRHSPGLLLLWTVAFAAENLALVSWNSPQWWWARADLGQQVQFSLWVLRYVVSGGLFVLGLWAPGLRPQSYTLQVHEEDQDVERSQVRSAAQQSTWRDFGRKLRLLSGYLWPRGSPALQLVVLICLGLMGLERALNVLVPIFYRNIVNLLTEKAPWNSLAWTVTSYVFLKFLQGGGTGSTGFVSNLRTFLWIRVQQFTSRRVELLIFSHLHELSLRWHLGRRTGEVLRIADRGTSSVTGLLSYLVFNVIPTLADIIIGIIYFSMFFNAWFGLIVFLCMSLYLTLTIVVTEWRTKFRRAMNTQENATRARAVDSLLNFETVKYYNAESYEVERYREAIIKYQGLEWKSSASLVLLNQTQNLVIGLGLLAGSLLCAYFVTEQKLQVGDYVLFGTYIIQLYMPLNWFGTYYRMIQTNFIDMENMFDLLKEETEVKDLPGAGPLRFQKGRIEFENVHFSYADGRETLQDVSFTVMPGQTLALVGPSGAGKSTILRLLFRFYDISSGCIRIDGQDISQVTQASLRSHIGVVPQDTVLFNDTIADNIRYGRVTAGNDEVEAAAQAAGIHDAIMAFPEGYRTQVGERGLKLSGGEKQRVAIARTILKAPGIILLDEATSALDTSNERAIQASLAKVCANRTTIVVAHRLSTVVNADQILVIKDGCIVERGRHEALLSRGGVYADMWQLQQGQEETSEDTKPQTMER

SEQ ID NO: 15107 - protein, 796 aa, Homo sapiens
MVTVGNYCEAEGPVGPAWMQDGLSPCFFFTLVPSTRMALGTLALVLALPCRRRERPAGADSLSWGAGPRISPYVLQLLLATLQAALPLAGLAGRVGTARGAPLPSYLLLASVLESLAGACGLWLLVVERSQARQRLAMGIWIKFRHSPGLLLLWTVAFAAENLALVSWNSPQWWWARADLGQQVRSAAQQSTWRDFGRKLRLLSGYLWPRGSPALQLVVLICLGLMGLERALNVLVPIFYRNIVNLLTEKAPWNSLAWTVTSYVFLKFLQGGGTGSTGFVSNLRTFLWIRVQQFTSRRVELLIFSHLHELSLRWHLGRRTGEVLRIADRGTSSVTGLLSYLVFNVIPTLADIIIGIIYFSMFFNAWFGLIVFLCMSLYLTLTIVVTEWRTKFRRAMNTQENATRARAVDSLLNFETVKYYNAESYEVERYREAIIKYQGLEWKSSASLVLLNQTQNLVIGLGLLAGSLLCAYFVTEQKLQVGDYVLFGTYIIQLYMPLNWFGTYYRMIQTNFIDMENMFDLLKEETEVKDLPGAGPLRFQKGRIEFENVHFSYADGRETLQDVSFTVMPGQTLALVGPSGAGKSTILRLLFRFYDISSGCIRIDGQDISQVTQASLRSHIGVVPQDTVLFNDTIADNIRYGRVTAGNDEVEAAAQAAGIHDAIMAFPEGYRTQVGERGLKLSGGEKQRVAIARTILKAPGIILLDEATSALDTSNERAIQASLAKVCANRTTIVVAHRLSTVVNADQILVIKDGCIVERGRHEALLSRGGVYADMWQLQQGQEETSEDTKPQTMER

SEQ ID NO: 15108 - protein, 210 aa, Homo sapiens
MAASVEQREGTIQVQGQALFFREALPGSGQARFSVLLLHGIRFSSETWQNLGTLHRLAQAGYRAVAIDLPGLGHSKEAAAPAPIGELAPGSFLAAVVDALELGPPVVISPSLSGMYSLPFLTAPGSQLPGFVPVAPICTDKINAANYASVKTPALIVYGDQDPMGQTSFEHLKQLPNHRVLIMKGAGHPCYLDKPEEWHTGLLDFLQGLQ

SEQ ID NO: 15109 - protein, 172 aa, Homo sapiens
MGPGLFPAFLLRPQVTASTRLLPVCASPRSSPGLGHSKEAAAPAPIGELAPGSFLAAVVDALELGPPVVISPSLSGMYSLPFLTAPGSQLPGFVPVAPICTDKINAANYASVKTPALIVYGDQDPMGQTSFEHLKQLPNHRVLIMKGAGHPCYLDKPEEWHTGLLDFLQGLQ

SEQ ID NO: 15110 - protein, 466 aa, Homo sapiens
MNNSTNSSNNSLALTSPYKTFEVVFIVLVAGSLSLVTIIGNILVMVSIKVNRHLQTVNNYFLFSLACADLIIGVFSMNLYTLYTVIGYWPLGPVVCDLWLALDYVVSNASVMNLLIISFDRYFCVTKPLTYPVKRTTKMAGMMIAAAWVLSFILWAPAILFWQFIVGVRTVEDGECYIQFFSNAAVTFGTAIAAFYLPVIIMTVLYWHISRASKSRIKKDKKEPVANQDPVSPSLVQGRIVKPNNNNMPSSDDGLEHNKIQNGKAPRDPVTENCVQGEEKESSNDSTSVSAVASNMRDDEITQDENTVSTSLGHSKDENSKQTCIRIGTKTPKSDSCTPTNTTVEVVGSSGQNGDEKQNIVARKIVKMTKQPAKKKPPPSREKKVTRTILAILLAFIITWAPYNVMVLINTFCAPCIPNTVWTIGYWLCYINSTINPACYALCNATFKKTFKHLLMCHYKNIGATR

SEQ ID NO: 15111 - protein, 983 aa, Homo sapiens
MEMKLPGQEGFEASSAPRNIPSGELDSNPDPGTGPSPDGPSDTESKELGVPKDPLLFIQLNELLGWPQALEWRETGSSSASLLLDMGEMPSITLSTHLHHRWVLFEEKLEVAAGRWSAPHVPTLALPSLQKLRSLLAEGLVLLDCPAQSLLELVEQVTRVESLSPELRGQLQALLLQRPQHYNQTTGTRPCWGSTHPRKASDNEEAPLREQCQNPLRQKLPPGAEAGTVLAGELGFLAQPLGAFVRLRNPVVLGSLTEVSLPSRFFCLLLGPCMLGKGYHEMGRAAAVLLSDPQFQWSVRRASNLHDLLAALDAFLEEVTVLPPGRWDPTARIPPPKCLPSQHKRLPSQQREIRGPAVPRLTSAEDRHRHGPHAHSPELQRTGRLFGGLIQDVRRKVPWYPSDFLDALHLQCFSAVLYIYLATVTNAITFGGLLGDATDGAQGVLESFLGTAVAGAAFCLMAGQPLTILSSTGPVLVFERLLFSFSRDYSLDYLPFRLWVGIWVATFCLVLVATEASVLVRYFTRFTEEGFCALISLIFIYDAVGKMLNLTHTYPIQKPGSSAYGCLCQYPGPGGNESQWIRTRPKDRDDIVSMDLGLINASLLPPPECTRQGGHPRGPGCHTVPDIAFFSLLLFLTSFFFAMALKCVKTSRFFPSVVRKGLSDFSSVLAILLGCGLDAFLGLATPKLMVPREFKPTLPGRGWLVSPFGANPWWWSVAAALPALLLSILIFMDQQITAVILNRMEYRLQKGAGFHLDLFCVAVLMLLTSALGLPWYVSATVISLAHMDSLRRESRACAPGERPNFLGIREQRLTGLVVFILTGASIFLAPVLKFIPMPVLYGIFLYMGVAALSSIQFTNRVKLLLMPAKHQPDLLLLRHVPLTRVHLFTAIQLACLGLLWIIKSTPAAIIFPLMLLGLVGVRKALERVFSPQELLWLDELMPEEERSIPEKGLEPEHSFSGSDSEDSELMYQPKAPEINISVN

SEQ ID NO: 15112 - protein, 945 aa, Homo sapiens
MEMKLPGQEGFEASSAPRNIPSGELDSNPDPGTGPSPDGPSDTESKELGVPKDPLLFIQLNELLGWPQALEWRETGRWVLFEEKLEVAAGRWSAPHVPTLALPSLQKLRSLLAEGLVLLDCPAQSLLELVEQVTRVESLSPELRGQLQALLLQRPQHYNQTTGTRPCWGSTHPRKASDNEEAPLREQCQNPLRQKLPPGAEAGTVLAGELGFLAQPLGAFVRLRNPVVLGSLTEVSLPSRFFCLLLGPCMLGKGYHEMGRAAAVLLSDPQFQWSVRRASNLHDLLAALDAFLEEVTVLPPGRWDPTARIPPPKCLPSQHKRLPSQQREIRGPAVPRLTSAEDRHRHGPHAHSPELQRTGRKVPWYPSDFLDALHLQCFSAVLYIYLATVTNAITFGGLLGDATDGAQGVLESFLGTAVAGAAFCLMAGQPLTILSSTGPVLVFERLLFSFSRDYSLDYLPFRLWVGIWVATFCLVLVATEASVLVRYFTRFTEEGFCALISLIFIYDAVGKMLNLTHTYPIQKPGSSAYGCLCQYPGPGGNESQWIRTRPKDRDDIDLGLINASLLPPPECTRQGGHPRGPGCHTVPDIAFFSLLLFLTSFFFAMALKCVKTSRFFPSVVRKGLSDFSSVLAILLGCGLDAFLGLATPKLMVPREFKPTLPGRGWLVSPFGANPWWWSVAAALPALLLSILIFMDQQITAVILNRMEYRLQKGAGFHLDLFCVAVLMLLTSALGLPWYVSATVISLAHMDSLRRESRACAPGERPNFLGIREQRLTGLVVFILTGASIFLAPVLKFIPMPVLYGIFLYMGVAALSSIQFTNRVKLLLMPAKHQPDLLLLRHVPLTRVHLFTAIQLACLGLLWIIKSTPAAIIFPLMLLGLVGVRKALERVFSPQELLWLDELMPEEERSIPEKGLEPEHSFSGSDSEDSELMYQPKAPEINISVN

SEQ ID NO: 15113 - protein, 959 aa, Homo sapiens
MEMKLPGQEGFEASSAPRNIPSGELDSNPDPGTGPSPDGPSDTESKELGVPKDPLLFIQLNELLGWPQALEWRETGRWVLFEEKLEVAAGRWSAPHVPTLALPSLQKLRSLLAEGLVLLDCPAQSLLELVEQVTRVESLSPELRGQLQALLLQRPQHYNQTTGTRPCWGSTHPRKASDNEEAPLREQCQNPLRQKLPPGAEAGTVLAGELGFLAQPLGAFVRLRNPVVLGSLTEVSLPSRFFCLLLGPCMLGKGYHEMGRAAAVLLSDPQFQWSVRRASNLHDLLAALDAFLEEVTVLPPGRWDPTARIPPPKCLPSQHKRLPSQQREIRGPAVPRLTSAEDRHRHGPHAHSPELQRTGRLFGGLIQDVRRKVPWYPSDFLDALHLQCFSAVLYIYLATVTNAITFGGLLGDATDGAQGVLESFLGTAVAGAAFCLMAGQPLTILSSTGPVLVFERLLFSFSRDYSLDYLPFRLWVGIWVATFCLVLVATEASVLVRYFTRFTEEGFCALISLIFIYDAVGKMLNLTHTYPIQKPGSSAYGCLCQYPGPGGNESQWIRTRPKDRDDIVSMDLGLINASLLPPPECTRQGGHPRGPGCHTVPDIAFFSLLLFLTSFFFAMALKCVKTSRFFPSVVRKGLSDFSSVLAILLGCGLDAFLGLATPKLMVPREFKPTLPGRGWLVSPFGANPWWWSVAAALPALLLSILIFMDQQITAVILNRMEYRLQKGAGFHLDLFCVAVLMLLTSALGLPWYVSATVISLAHMDSLRRESRACAPGERPNFLGIREQRLTGLVVFILTGASIFLAPVLKFIPMPVLYGIFLYMGVAALSSIQFTNRVKLLLMPAKHQPDLLLLRHVPLTRVHLFTAIQLACLGLLWIIKSTPAAIIFPLMLLGLVGVRKALERVFSPQELLWLDELMPEEERSIPEKGLEPEHSFSGSDSEDSELMYQPKAPEINISVN

SEQ ID NO: 15114 - protein, 896 aa, Homo sapiens
MEMKLPGQEGFEASSAPRNIPSGELDSNPDPGTGPSPDGPSDTESKELGVPKDPLLFIQLNELLGWPQALEWRETGRWVLFEEKLEVAAGRWSAPHVPTLALPSLQKLRSLLAEGLVLLDCPAQSLLELVEQVTRVESLSPELRGQLQALLLQRPQHYNQTTGTRPCWGSTHPRKASDNEEAPLREQCQNPLRQKLPPGAEAGTVLAGELGFLAQPLGAFVRLRNPVVLGSLTEVSLPSRFFCLLLGPCMLGKGYHEMGRAAAVLLSDPQFQWSVRRASNLHDLLAALDAFLEEVTVLPPGRWDPTARIPPPKCLPSQHKRLPSQQREIRGPAVPRLTSAEDRHRHGPHAHSPELQRTGRLFGGLIQDVRRKVPWYPSDFLDALHLQCFSAVLYIYLATVTNAITFGGLLGDATDGAQGVLESFLGTAVAGAAFCLMAGQPLTILSSTGPVLVFERLLFSFSRDYSLDYLPFRLWVGIWVATFCLVLVATEASVLVRYFTRFTEEGFCALISLIFIYDAVGKMLNLTHTYPIQKPGSSAYGCLCQYPGPGGNESQWIRTRPKDRDDIVSMVRKGLSDFSSVLAILLGCGLDAFLGLATPKLMVPREFKPTLPGRGWLVSPFGANPWWWSVAAALPALLLSILIFMDQQITAVILNRMEYRLQKGAGFHLDLFCVAVLMLLTSALGLPWYVSATVISLAHMDSLRRESRACAPGERPNFLGIREQRLTGLVVFILTGASIFLAPVLKFIPMPVLYGIFLYMGVAALSSIQFTNRVKLLLMPAKHQPDLLLLRHVPLTRVHLFTAIQLACLGLLWIIKSTPAAIIFPLMLLGLVGVRKALERVFSPQELLWLDELMPEEERSIPEKGLEPEHSFSGSDSEDSELMYQPKAPEINISVN

SEQ ID NO: 15115 - protein, 145 aa, Homo sapiens
MRRLRHREVRGPVLGHTATGGPQNGTSGCTTAPQQRPPPGTQGMLEQYLNRGGQKSHGLCWLLCFVSQGQNQDVISAELWCRIHVQAHWGCWQNSAVWGCRNEVLVSLLAVGQGLPSASGGRLPSLVHGPSHPDSQHPREVPLAL

SEQ ID NO: 15116 - protein, 64 aa, Homo sapiens
MRRLRHREVRGPVLGHTATGGPQNGTSGCTTAPQQRPPPGTQGMLEQYLNRNIQWHKRDQLGDN

SEQ ID NO: 15117 - protein, 334 aa, Homo sapiens
MKMASSLAFLLLNFHVSLLLVQLLTPCSAQFSVLGPSGPILAMVGEDADLPCHLFPTMSAETMELKWVSSSLRQVVNVYADGKEVEDRQSAPYRGRTSILRDGITAGKAALRIHNVTASDSGKYLCYFQDGDFYEKALVELKVAALGSNLHVEVKGYEDGGIHLECRSTGWYPQPQIQWSNAKGENIPAVEAPVVADGVGLYEVAASVIMRGGSGEGVSCIIRNSLLGLEKTASISIADPFFRSAQPWIAALAGTLPILLLLLAGASYFLWRQQKEITALSSEIESEQEMKEMGYAATEREISLRESLQEELKRKKIQYLTRGEESSSDTNKSA

SEQ ID NO: 15118 - protein, 311 aa, Homo sapiens
MGIPRAQFSVLGPSGPILAMVGEDADLPCHLFPTMSAETMELKWVSSSLRQVVNVYADGKEVEDRQSAPYRGRTSILRDGITAGKAALRIHNVTASDSGKYLCYFQDGDFYEKALVELKVAALGSNLHVEVKGYEDGGIHLECRSTGWYPQPQIQWSNAKGENIPAVEAPVVADGVGLYEVAASVIMRGGSGEGVSCIIRNSLLGLEKTASISIADPFFRSAQPWIAALAGTLPILLLLLAGASYFLWRQQKEITALSSEIESEQEMKEMGYAATEREISLRESLQEELKRKKIQYLTRGEESSSDTNKSA

SEQ ID NO: 15119 - protein, 292 aa, Homo sapiens
MVGEDADLPCHLFPTMSAETMELKWVSSSLRQVVNVYADGKEVEDRQSAPYRGRTSILRDGITAGKAALRIHNVTASDSGKYLCYFQDGDFYEKALVELKVAALGSNLHVEVKGYEDGGIHLECRSTGWYPQPQIQWSNAKGENIPAVEAPVVADGVGLYEVAASVIMRGGSGEGVSCIIRNSLLGLEKTASISIADPFFRSAQPWIAALAGTLPILLLLLAGASYFLWRQQKEITALSSEIESEQEMKEMGYAATEREISLRESLQEELKRKKIQYLTRGEESSSDTNKSA

SEQ ID NO: 15120 - protein, 621 aa, Homo sapiens
MSGCGLFLRTTAAARACRGLVVSTANRRLLRTSPPVRAFAKELFLGKIKKKEVFPFPEVSQDELNEINQFLGPVEKFFTEEVDSRKIDQEGKIPDETLEKLKSLGLFGLQVPEEYGGLGFSNTMYSRLGEIISMDGSITVTLAAHQAIGLKGIILAGTEEQKAKYLPKLASGEHIAAFCLTEPASGSDAASIRSRATLSEDKKHYILNGSKVWITNGGLANIFTVFAKTEVVDSDGSVKDKITAFIVERDFGGVTNGKPEDKLGIRGSNTCEVHFENTKIPVENILGEVGDGFKVAMNILNSGRFSMGSVVAGLLKRLIEMTAEYACTRKQFNKRLSEFGLIQEKFALMAQKAYVMESMTYLTAGMLDQPGFPDCSIEAAMVKVFSSEAAWQCVSEALQILGGLGYTRDYPYERILRDTRILLIFEGTNEILRMYIALTGLQHAGRILTTRIHELKQAKVSTVMDTVGRRLRDSLGRTVDLGLTGNHGVVHPSLADSANKFEENTYCFGRTVETLLLRFGKTIMEEQLVLKRVANILINLYGMTAVLSRASRSIRIGLRNHDHEVLLANTFCVEAYLQNLFSLSQLDKYAPENLDEQIKKVSQQILEKRAYICAHPLDRTC

SEQ ID NO: 15121 - protein, 366 aa, Homo sapiens
MAELQQLQEFEIPTGREALRGNHSALLRVADYCEDNYVQATDKRKALEETMAFTTQALASVAYQVGNLAGHTLRMLDLQGAALRQVEARVSTLGQMVNMHMEKVARREIGTLATVQRLPPGQKVIAPENLPPLTPYCRRPLNFGCLDDIGHGIKDLSTQLSRTGTLSRKSIKAPATPASATLGRPPRIPEPVHLPVVPDGRLSAASSAFSLASAGSAEGVGGAPTPKGQAAPPAPPLPSSLDPPPPPAAVEVFQRPPTLEELSPPPPDEELPLPLDLPPPPPLDGDELGLPPPPPGFGPDEPSWVPASYLEKVVTLYPYTSQKDNELSFSEGTVICVTRRYSDGWCEGVSSEGTGFFPGNYVEPSC

SEQ ID NO: 15122 - protein, 360 aa, Homo sapiens
MAELQQLQEFEIPTGREALRGNHSALLRVADYCEDNYVQATDKRKALEETMAFTTQALASVAYQVGNLAGHTLRMLDLQGAALRQVEARMVNMHMEKVARREIGTLATVQRLPPGQKVIAPENLPPLTPYCRRPLNFGCLDDIGHGIKDLSTQLSRTGTLSRKSIKAPATPASATLGRPPRIPEPVHLPVVPDGRLSAASSAFSLASAGSAEGVGGAPTPKGQAAPPAPPLPSSLDPPPPPAAVEVFQRPPTLEELSPPPPDEELPLPLDLPPPPPLDGDELGLPPPPPGFGPDEPSWVPASYLEKVVTLYPYTSQKDNELSFSEGTVICVTRRYSDGWCEGVSSEGTGFFPGNYVEPSC

SEQ ID NO: 15123 - protein, 323 aa, Homo sapiens
MKSALFTRFFILLPWILIVIIMLDVDTRRPVPPLTPRPYFSPYAVGRGGARLPLRRGGPAHGTQKRNQSRPQPQPEPQLPTIYAITPTYSRPVQKAELTRLANTFRQVAQLHWILVEDAAARSELVSRFLARAGLPSTHLHVPTPRRYKRPGLPRATEQRNAGLAWLRQRHQHQRAQPGVLFFADDDNTYSLELFQEMRTTRKVSVWPVGLVGGRRYERPLVENGKVVGWYTGWRADRPFAIDMAGFAVSLQVILSNPKAVFKRRGSQPGMQESDFLKQITTVEELEPKANNCTKVLVWHTRTEKVNLANEPKYHLDTVKIEV

SEQ ID NO: 15124 - protein, 263 aa, Homo sapiens
MKEMYENAEDKVNNSTGKWSCVEERICHLQHENPCIEQQLDDVHQKEDHKEIVTNIQRGFIESGKKDLMLEEKNKKLMNECDHLKESLFQYEREKAERVVVVRQLQQEAADSLKKLTMLESPLEGISHYHINLDETQVPKKKLFQVESQFDDLMVEKEAVSSKCVNLAKENQVFQQKLLSMKKVQQECEKLEEDKKMLEEEILNLKTHMENSMVELSKLQEYKSELDERAMQAVEKLEEIHLQEQAQYKKQLEQLNKDIIQLH

SEQ ID NO: 15125 - protein, 823 aa, Homo sapiens
MKLFGFGSRRGQTAQGSIDHVYTGSGYRIRDSELQKIHRAAVKGDAAEVERCLARRSGDLDALDKQHRTALHLACTSGHVQVVTLLVNRKCQIDVCDKENRTPLIQAVHCQEEACAVILLEHGANPNLKDIYGNTALHYAVYSESTSLAEKLLSHGAHIEALDKDNNTPLLFAIICKKEKMVEFLLKKKASSHAVDRLRRSALMLAVYYDSPGIVNILLKQNIDVFAQDMCGRDAEDYAISHHLTKIQQQILEHKKKILKKEKSDVGSSDESAVSIFHELRVDSLPASDDKDLNVATKQCVPEKVSEPLPGSSHEKGNRIVNGQGEGPPAKHPSLKPSTEVEDPAVKGAVQRKNVQTLRAEQALPVASEEEQERHERSEKKQPQVKEGNNTNKSEKIQLSENICDSTSSAAAGRLTQQRKIGKTYPQQFPKKLKEEHDRCTLKQENEEKTNVNMLYKKNREELERKEKQYKKEVEAKQLEPTVQSLEMKSKTARNTPNWDFHNHEEMKGLMDENCILKADIAILRQEICTMKNDNLEKENKYLKDIKIVKETNAALEKYIKLNEEMITETAFRYQQELNDLKAENTRLNAELLKEKESKKRLEADIESYQSRLAAAISKHSESVKTERNLKLALERTRDVSVQVEMSSAISKVKAENEFLTEQLSETQIKFNALKDKFRKTRDSLRKKSLALETVQNDLSQTQQQTQEMKEMYQNAEAKVNNSTGKWNCVEERICHLQRENAWLVQQLDDVHQKEDHKEIVTNIQRGFIESGKKDLVLEEKSKKLMNECDHLKESLFQYEREKTEGVVSIKEDKYFQTSRKTI

SEQ ID NO: 15126 - protein, 823 aa, Homo sapiens
MKLFGFGSRRGQTAQGSIDHVYTGSGYRIRDSELQKIHRAAVKGDAAEVERCLARRSGDLDALDKQHRTALHLACASGHVQVVTLLVNRKCQIDVCDKENRTPLIQAVHCQEEACAVILLEHGANPNLKDIYGNTALHYAVYSESTSLAEKLLSHGAHIEALDKDNNTPLLFAIICKKEKMVEFLLKRKASSHAVDRLRRSALMLAVYYDSPGIVNILLKQNIDVFAQDMCGRDAEDYAISHHLTKIQQQILEHKKKILKKEKSDVGSSDESAVSIFHELRVDSLPASDDKDLNVATKQCVPEKVSEPLPGSSHEKGNRIVNGQGEGPPAKHPSLKPSTEVEDPAVKGAVQRKNVQTLRAEQALPVASEEEQERHERSEKKQPQVKEGNNTNKSEKIQLSENICDSTSSAAAGRLTQQRKIGKTYPQQFPKKLKEEHDRCTLKQENEEKTNVNMLYKKNREELERKEKQYKKEVEAKQLEPTVQSLEMKSKTARNTPNRDFHNHEEMKGLMDENCILKADIAILRQEICTMKNDNLEKENKYLKDIKIVKETNAALEKYIKLNEEMITETAFRYQQELNYLKAENTRLNAELLKEKESKKRLEADIESYQSRLAAAISKHSESVKTERNLKLALERTRDVSVQVEMSSAISKVKDENEFLTEQLSETQIKFNALKDKFRKTRDSLRKKSLALETVQNDLSQTQQQTQEMKEMYQNAEAKVNNSTGKWNCVEERICHLQRENAWLVQQLDDVHQKEDHKEIVTNIQRGFIESGKKDLVLEEKSKKLMNECDHLKESLFQYEREKTEGVVSIKEDKYFQTSRKTI

SEQ ID NO: 15127 - protein, 335 aa, Homo sapiens
MKLKLKNVFLAYFLVSIAGLLYALVQLGQPCDCLPPLRAAAEQLRQKDLRISQLQAELRRPPPAPAQPPEPEALPTIYVVTPTYARLVQKAELVRLSQTLSLVPRLHWLLVEDAEGPTPLVSGLLAASGLLFTHLVVLTPKAQRLREGEPGWVHPRGVEQRNKALDWLRGRGGAVGGEKDPPPPGTQGVVYFADDDNTYSRELFEEMRWTRGVSVWPVGLVGGLRFEGPQVQDGRVVGFHTAWEPSRPFPVDMAGFAVALPLLLDKPNAQFDSTAPRGHLESSLLSHLVDPKDLEPRAANCTRVLVWHTRTEKPKMKQEEQLQRQGRGSDPAIEV

SEQ ID NO: 15128 - protein, 315 aa, Homo sapiens
MKLKLKNVFLAYFLVSIAGLLYALVQLGQPCDCLPPLRAAAEQLRQKDLRISQLQAELRRPPPAPAQPPEPEALPTIYVVTPTYARLVQKAELVRLSQTLSLVPRLHWLLVEDAEGPTPLVSGLLAASGLLFTHLVVLTPKAQRLREGEPGWVHPRGVEQRNKALDWLRGRGGAVGGEKDPPPPGTQGVVYFADDDNTYSRELFEEMRWTRGVSVWPVGLVGGLRFEGPQVQDGRVVGFHTAWEPSRPFPVDMAGFAVALPLLLDKPNAQFDSTAPRGHLESSLLSHLVDPKDLEPRAANCTRTESRCVTQAGVQ

SEQ ID NO: 15129 - protein, 481 aa, Homo sapiens
MNEVSVIKEGWLHKRGEYIKTWRPRYFLLKSDGSFIGYKERPEAPDQTLPPLNNFSVAECQLMKTERPRPNTFVIRCLQWTTVIERTFHVDSPDEREEWMRAIQMVANSLKQRAPGEDPMDYKCGSPSDSSTTEEMEVAVSKARAKVTMNDFDYLKLLGKGTFGKVILVREKATGRYYAMKILRKEVIIAKDEVAHTVTESRVLQNTRHPFLTALKYAFQTHDRLCFVMEYANGGELFFHLSRERVFTEERARFYGAEIVSALEYLHSRDVVYRDIKLENLMLDKDGHIKITDFGLCKEGISDGATMKTFCGTPEYLAPEVLEDNDYGRAVDWWGLGVVMYEMMCGRLPFYNQDHERLFELILMEEIRFPRTLSPEAKSLLAGLLKKDPKQRLGGGPSDAKEVMEHRFFLSINWQDVVQKKLLPPFKPQVTSEVDTRYFDDEFTAQSITITPPDRYDSLGLLELDQRTHFPQFSYSASIRE

SEQ ID NO: 15130 - protein, 438 aa, Homo sapiens
MNEVSVIKEGWLHKRGEYIKTWRPRYFLLKSDGSFIGYKERPEAPDQTLPPLNNFSVAECQLMKTERPRPNTFVIRCLQWTTVIERTFHVDSPDEREEWMRAIQMVANSLKQRAPGEDPMDYKCGSPSDSSTTEEMEVAVSKARAKVTMNDFDYLKLLGKGTFGKVILVREKATGRYYAMKILRKEVIIAKDEVAHTVTESRVLQNTRHPFLTALKYAFQTHDRLCFVMEYANGGELFFHLSRERVFTEERARFYGAEIVSALEYLHSRDVVYRDIKVLEDNDYGRAVDWWGLGVVMYEMMCGRLPFYNQDHERLFELILMEEIRFPRTLSPEAKSLLAGLLKKDPKQRLGGGPSDAKEVMEHRFFLSINWQDVVQKKLLPPFKPQVTSEVDTRYFDDEFTAQSITITPPDRYDSLGLLELDQRTHFPQFSYSASIRE

SEQ ID NO: 15131 - protein, 1657 aa, Homo sapiens
MDSKKRSSTEAEGSKERGLVHIWQAGSFPITPERLPGWGGKTVLQAALGVKHGVLLTEDGEVYSFGTLPWRSGPVEICPSSPILENALVGQYVITVATGSFHSGAVTDNGVAYMWGENSAGQCAVANQQYVPEPNPVSIADSEASPLLAVRILQLACGEEHTLALSISREIWAWGTGCQLGLITTAFPVTKPQKVEHLAGRVVLQVACGAFHSLALVQCLPSQDLKPVPERCNQCSQLLITMTDKEDHVIISDSHCCPLGVTLTESQAENHASTALSPSTETLDRQEEVFENTLVANDQSVATELNAVSAQITSSDAMSSQQNVMGTTEISSARNIPSYPDTQAVNEYLRKLSDHSVREDSEHGEKPVPSQPLLEEAIPNLHSPPTTSTSALNSLVVSCASAVGVRVAATYEAGALSLKKVMNFYSTTPCETGAQAGSSAIGPEGLKDSREEQVKQESMQGKKSSSLVDIREEETEGGSRRLSLPGLLSQVSPRLLRKAARVKTRTVVLTPTYSGEADALLPSLRTEVWTWGKGKEGQLGHGDVLPRLQPLCVKCLDGKEVIHLEAGGYHSLALTAKSQVYSWGSNTFGQLGHSDFPTTVPRLAKISSENGVWSIAAGRDYSLFLVDTEDFQPGLYYSGRQDPTEGDNLPENHSGSKTPVLLSCSKLGYISRVTAGKDSYLALVDKNIMGYIASLHELATTERRFYSKLSDIKSQILRPLLSLENLGTTTTVQLLQEVASRFSKLCYLIGQHGASLSSFLHGVKEARSLVILKHSSLFLDSYTEYCTSITNFLVMGGFQLLAKPAIDFLNKNQELLQDLSEVNDENTQLMEILNTLFFLPIRRLHNYAKVLLKLATCFEVASPEYQKLQDSSSCYECLALHLGRKRKEAEYTLGFWKTFPGKMTDSLRKPERRLLCESSNRALSLQHAGRFSVNWFILFNDALVHAQFSTHHVFPLATLWAEPLSEEAGGVNGLKITTPEEQFTLISSTPQEKTKWLRAISQAVDQALRGMSDLPPYGSGSSVQRQEPPISRSAKYTFYKDPRLKDATYDGRWLSGKPHGRGVLKWPDGKMYSGMFRNGLEDGYGEYRIPNKAMNKEDHYVGHWKEGKMCGQGVYSYASGEVFEGCFQDNMRHGHGLLRSGKLTSSSPSMFIGQWVMDKKAGYGVFDDITRGEKYMGMWQDDVCQGNGVVVTQFGLYYEGNFHLNKMMGNGVLLSEDDTIYEGEFSDDWTLSGKGTLTMPNGDYIEGYFSGEWGSGIKITGTYFKPSLYESDKDRPKVFRKLGNLAVPADEKWKAVFDECWRQLGCEGPGQGEVWKAWDNIAVALTTSRRQHRDSPEILSRSQTQTLESLEFIPQHVGAFSVEKYDDIRKYLIKACDTPLHPLGRLVETLVAVYRMTYVGVGANRRLLQEAVKEIKSYLKRIFQLVRFLFPELPEEGSTIPLSAPLPTERKSFCTGKSDSRSESPEPGYVVTSSGLLLPVLLPRLYPPLFMLYALDNDREEDIYWECVLRLNKQPDIALLGFLGVQRKFWPATLSILGESKKVLPTTKDACFASAVECLQQISTTFTPSDKLKVIQQTFEEISQSVLASLHEDFLWSMDDLFPVFLYVVLRARIRNLGSEVHLIEDLMDPYLQHGEQGIMFTTLKACYYQIQREKLN

SEQ ID NO: 15132 - protein, 396 aa, Homo sapiens
MDSKKRSSTEAEGSKERGLVHIWQAGSFPITPERLPGWGGKTVLQAALGVKHGVLLTEDGEVYSFGTLPWRSGPVEICPSSPILENALVGQYVITVATGSFHSGAVTDNGVAYMWGENSAGQCAVANQQYVPEPNPVSIADSEASPLLAVRILQLACGEEHTLALSISREIWAWGTGCQLGLITTAFPVTKPQKVEHLAGRVVLQVACGAFHSLALVQCLPSQDLKPVPERCNQCSQLLITMTDKEDHVIISDSHCCPLGVTLTESQAENHASTALSPSTETLDRQEEVFENTLVANDQSVATELNAVSAQITSSDAMSSQQNVMGTTEISSARNIPSYPDTQAVNEYLRKLSDHSVREDSEHGEKPVPSQVPAQFYKIKVCLELNCMGFSLETLK

SEQ ID NO: 15133 - protein, 807 aa, Homo sapiens
MDSKKRSSTEAEGSKERGLVHIWQAGSFPITPERLPGWGGKTVLQAALGVKHGVLLTEDGEVYSFGTLPWRSGPVEICPSSPILENALVGQYVITVATGSFHSGAVTDNGVAYMWGENSAGQCAVANQQYVPEPNPVSIADSEASPLLAVRILQLACGEEHTLALSISREIWAWGTGCQLGLITTAFPVTKPQKVEHLAGRVVLQVACGAFHSLALVQCLPSQDLKPVPERCNQCSQLLITMTDKEDHVIISDSHCCPLGVTLTESQAENHASTALSPSTETLDRQEEVFENTLVANDQSVATELNAVSAQITSSDAMSSQQNVMGTTEISSARNIPSYPDTQAVNEYLRKLSDHSVREDSEHGEKPVPSQPLLEEAIPNLHSPPTTSTSALNSLVVSCASAVGVRVAATYEAGALSLKKVMNFYSTTPCETGAQAGSSAIGPEGLKDSREEQVKQESMQGKKSSSLVDIREEETEGGSRRLSLPGLLSQVSPRLLRKAARVKTRTVVLTPTYSGEADALLPSLRTEVWTWGKGKEGQLGHGDVLPRLQPLCVKCLDGKEVIHLEAGGYHSLALTAKSQVYSWGSNTFGQLGHSDFPTTVPRLAKISSENGVWSIAAGRDYSLFLVDTEDFQPGLYYSGRQDPTEGDNLPENHSGSKTPVLLSCSKLGYISRVTAGKDSYLALVDKNIMGYIASLHELATTERRFYSKLSDIKSQILRPLLSLENLGTTTTVQLLQEVASRFSKLCYLIGQHGASLSSFLHGVKEARSLVILKHSSLFLDSYTEQVSSPVSCSISAGLFCQGEQLLN

SEQ ID NO: 15134 - protein, 1581 aa, Homo sapiens
MPLAFCGSENHSAAYRVDQGVLNNGCFVDALNVVPHVFLLFITFPILFIGWGSQSSKVHIHHSTWLHFPGHNLRWILTFMLLFVLVCEIAEGILSDGVTESHHLHLYMPAGMAFMAAVTSVVYYHNIETSNFPKLLIALLVYWTLAFITKTIKFVKFLDHAIGFSQLRFCLTGLLVILYGMLLLVEVNVIRVRRYIFFKTPREVKPPEDLQDLGVRFLQPFVNLLSKGTYWWMNAFIKTAHKKPIDLRAIGKLPIAMRALTNYQRLCEAFDAQVRKDIQGTQGARAIWQALSHAFGRRLVLSSTFRILADLLGFAGPLCIFGIVDHLGKENDVFQPKTQFLGVYFVSSQEFLANAYVLAVLLFLALLLQRTFLQASYYVAIETGINLRGAIQTKIYNKIMHLSTSNLSMGEMTAGQICNLVAIDTNQLMWFFFLCPNLWAMPVQIIVGVILLYYILGVSALIGAAVIILLAPVQYFVATKLSQAQRSTLEYSNERLKQTNEMLRGIKLLKLYAWENIFRTRVETTRRKEMTSLRAFAIYTSISIFMNTAIPIAAVLITFVGHVSFFKEADFSPSVAFASLSLFHILVTPLFLLSSVVRSTVKALVSVQKLSEFLSSAEIREEQCAPHEPTPQGPASKYQAVPLRVVNRKRPAREDCRGLTGPLQSLVPSADGDADNCCVQIMGGYFTWTPDGIPTLSNITIRIPRGQLTMIVGQVGCGKSSLLLAALGEMQKVSGAVFWSSLPDSEIGEDPSPERETATDLDIRKRGPVAYASQKPWLLNATVEENIIFESPFNKQRYKMVIEACSLQPDIDILPHGDQTQIGERGINLSGGQRQRISVARALYQHANVVFLDDPFSALDIHLSDHLMQAGILELLRDDKRTVVLVTHKLQYLPHADWIIAMKDGTIQREGTLKDFQRSECQLFEHWKTLMNRQDQELEKETVTERKATEPPQGLSRAMSSRDGLLQDEEEEEEEAAESEEDDNLSSMLHQRAEIPWRACAKYLSSAGILLLSLLVFSQLLKHMVLVAIDYWLAKWTDSALTLTPAARNCSLSQECTLDQTVYAMVFTVLCSLGIVLCLVTSVTVEWTGLKVAKRLHRSLLNRIILAPMRFFETTPLGSILNRFSSDCNTIDQHIPSTLECLSRSTLLCVSALAVISYVTPVFLVALLPLAIVCYFIQKYFRVASRDLQQLDDTTQLPLLSHFAETVEGLTTIRAFRYEARFQQKLLEYTDSNNIASLFLTAANRWLEVRMEYIGACVVLIAAVTSISNSLHRELSAGLVGLGLTYALMVSNYLNWMVRNLADMELQLGAVKRIHGLLKTEAESYEGLLAPSLIPKNWPDQGKIQIQNLSVRYDSSLKPVLKHVNALIAPGQKIGICGRTGSGKSSFSLAFFRMVDTFEGHIIIDGIDIAKLPLHTLRSRLSIILQDPVLFSGTIRFNLDPERKCSDSTLWEALEIAQLKLVVKALPGGLDAIITEGGENFSQGQRQLFCLARAFVRKTSIFIMDEATASIDMATENILQKVVMTAFADRTVVTIAHRVHTILSADLVIVLKRGAILEFDKPEKLLSRKDSVFASFVRADK

SEQ ID NO: 15135 - protein, 1582 aa, Homo sapiens
MPLAFCGSENHSAAYRVDQGVLNNGCFVDALNVVPHVFLLFITFPILFIGWGSQSSKVHIHHSTWLHFPGHNLRWILTFMLLFVLVCEIAEGILSDGVTESHHLHLYMPAGMAFMAAVTSVVYYHNIETSNFPKLLIALLVYWTLAFITKTIKFVKFLDHAIGFSQLRFCLTGLLVILYGMLLLVEVNVIRVRRYIFFKTPREVKPPEDLQDLGVRFLQPFVNLLSKGTYWWMNAFIKTAHKKPIDLRAIGKLPIAMRALTNYQRLCEAFDAQVRKDIQGTQGARAIWQALSHAFGRRLVLSSTFRILADLLGFAGPLCIFGIVDHLGKENDVFQPKTQFLGVYFVSSQEFLANAYVLAVLLFLALLLQRTFLQASYYVAIETGINLRGAIQTKIYNKIMHLSTSNLSMGEMTAGQICNLVAIDTNQLMWFFFLCPNLWAMPVQIIVGVILLYYILGVSALIGAAVIILLAPVQYFVATKLSQAQRSTLEYSNERLKQTNEMLRGIKLLKLYAWENIFRTRVETTRRKEMTSLRAFAIYTSISIFMNTAIPIAAVLITFVGHVSFFKEADFSPSVAFASLSLFHILVTPLFLLSSVVRSTVKALVSVQKLSEFLSSAEIREEQCAPHEPTPQGPASKYQAVPLRVVNRKRPAREDCRGLTGPLQSLVPSADGDADNCCVQIMGGYFTWTPDGIPTLSNITIRIPRGQLTMIVGQVGCGKSSLLLAALGEMQKVSGAVFWSSSLPDSEIGEDPSPERETATDLDIRKRGPVAYASQKPWLLNATVEENIIFESPFNKQRYKMVIEACSLQPDIDILPHGDQTQIGERGINLSGGQRQRISVARALYQHANVVFLDDPFSALDIHLSDHLMQAGILELLRDDKRTVVLVTHKLQYLPHADWIIAMKDGTIQREGTLKDFQRSECQLFEHWKTLMNRQDQELEKETVTERKATEPPQGLSRAMSSRDGLLQDEEEEEEEAAESEEDDNLSSMLHQRAEIPWRACAKYLSSAGILLLSLLVFSQLLKHMVLVAIDYWLAKWTDSALTLTPAARNCSLSQECTLDQTVYAMVFTVLCSLGIVLCLVTSVTVEWTGLKVAKRLHRSLLNRIILAPMRFFETTPLGSILNRFSSDCNTIDQHIPSTLECLSRSTLLCVSALAVISYVTPVFLVALLPLAIVCYFIQKYFRVASRDLQQLDDTTQLPLLSHFAETVEGLTTIRAFRYEARFQQKLLEYTDSNNIASLFLTAANRWLEVRMEYIGACVVLIAAVTSISNSLHRELSAGLVGLGLTYALMVSNYLNWMVRNLADMELQLGAVKRIHGLLKTEAESYEGLLAPSLIPKNWPDQGKIQIQNLSVRYDSSLKPVLKHVNALIAPGQKIGICGRTGSGKSSFSLAFFRMVDTFEGHIIIDGIDIAKLPLHTLRSRLSIILQDPVLFSGTIRFNLDPERKCSDSTLWEALEIAQLKLVVKALPGGLDAIITEGGENFSQGQRQLFCLARAFVRKTSIFIMDEATASIDMATENILQKVVMTAFADRTVVTIAHRVHTILSADLVIVLKRGAILEFDKPEKLLSRKDSVFASFVRADK

SEQ ID NO: 15136 - protein, 50 aa, Homo sapiens
MPLAFCGSENHSAAYRVDQGVLNNGCFVDALNVVPHVFLLFITFPILFIG

SEQ ID NO: 15137 - protein, 506 aa, Homo sapiens
MIMSNTHKARLERRVTGSTNRWRLPKQPFSGDLLSLSQMCKALSIDFEEALRNPDRLCISQIQKFFFENFKNKDIQSGEADVILECLGFKWELHQPQLFQSETLAKLYLKALAQGTTHPLRELEELLRAQSPKKTKEKSPAKRIIISLKINDPLVTKVAFATALKNLYMSEVEINLEDLLGVLASAHILQFSGLFQRCVDVMIARLKPSTIKKFYEAGCKYKEEQLTTGCEKWLEMNLVPLGGTQIHLHKIPQDLLHKVLKSPRLFTFSEFHLLKTMLLWVFLQLNYKIQAIPTYETVMTFFKSFPENCCFLDRDIGRSLRPLFLCLRLHGITKGKDLEVLRHLNFFPESWLDQVTVNHYHALENGGDMVHLKDLNTQAVRFGLLFNQENTTYSKTIALYGFFFKIKGLKHDTTSYSFYMQRIKHTDLESPSAVYEHNHVSLRAARLVKYEIRAEALVDGKWQEFRTNQIKQKFGLTTSSCKSHTLKIQTVGIPIYVSFAFIFPAS

SEQ ID NO: 15138 - protein, 507 aa, Homo sapiens
MIMSNTQHKARLERRVTGSTNRWRLPKQPFSGDLLSLSQMCKALSIDFEEALRNPDRLCISQIQKFFFENFKNKDIQSGEADVILECLGFKWELHQPQLFQSETLAKLYLKALAQGTTHPLRELEELLRAQSPKKTKEKSPAKRIIISLKINDPLVTKVAFATALKNLYMSEVEINLEDLLGVLASAHILQFSGLFQRCVDVMIARLKPSTIKKFYEAGCKYKEEQLTTGCEKWLEMNLVPLGGTQIHLHKIPQDLLHKVLKSPRLFTFSEFHLLKTMLLWVFLQLNYKIQAIPTYETVMTFFKSFPENCCFLDRDIGRSLRPLFLCLRLHGITKGKDLEVLRHLNFFPESWLDQVTVNHYHALENGGDMVHLKDLNTQAVRFGLLFNQENTTYSKTIALYGFFFKIKGLKHDTTSYSFYMQRIKHTDLESPSAVYEHNHVSLRAARLVKYEIRAEALVDGKWQEFRTNQIKQKFGLTTSSCKSHTLKIQTVGIPIYVSFAFIFPAS

SEQ ID NO: 15139 - protein, 745 aa, Homo sapiens [sequence omitted]

SEQ ID NO: 15140 - protein, 347 aa, Homo sapiens
MSSWSRQRPKSPGGIQPHVSRTLFLLLLLAASAWGVTLSPKDCQVFRSDHGSSISCQPPAEIPGYLPADTVHLAVEFFNLTHLPANLLQGASKLQELHLSSNGLESLSPEFLRPVPQLRVLDLTRNALTGLPPGLFQASATLDTLVLKENQLEVLEVSWLHGLKALGHLDLSGNRLRKLPPGLLANFTLLRTLDLGENQLETLPPDLLRGPLQLERLHLEGNKLQVLGKDLLLPQPDLRYLFLNGNKLARVAAGAFQGLRQLDMLDLSNNSLASVPEGLWASLGQPNWDMRDGFDISGNPWICDQNLSDLYRWLQAQKDKMFSQNDTRCAGPEAVKGQTLLAVAKSQ

SEQ ID NO: 15141 - protein, 726 aa, Homo sapiens
MSTATTVAPAGIPATPGPVNPPPPEVSNPSKPGRKTNQLQYMQNVVVKTLWKHQFAWPFYQPVDAIKLNLPDYHKIIKNPMDMGTIKKRLENNYYWSASECMQDFNTMFTNCYIYNKPTDDIVLMAQALEKIFLQKVAQMPQEEVELLPPAPKGKGRKPAAGAQSAGTQQVAAVSSVSPATPFQSVPPTVSQTPVIAATPVPTITANVTSVPVPPAAAPPPPATPIVPVVPPTPPVVKKKGVKRKADTTTPTTSAITASRSESPPPLSDPKQAKVVARRESGGRPIKPPKKDLEDGEVPQHAGKKGKLSEHLRYCDSILREMLSKKHAAYAWPFYKPVDAEALELHDYHDIIKHPMDLSTVKRKMDGREYPDAQGFAADVRLMFSNCYKYNPPDHEVVAMARKLQDVFEMRFAKMPDEPVEAPALPAPAAPMVSKGAESSRSSEESSSDSGSSDSEEERATRLAELQEQLKAVHEQLAALSQAPVNKPKKKKEKKEKEKKKKDKEKEKEKHKVKAEEEKKAKVAPPAKQAQQKKAPAKKANSTTTAGRQLKKGGKQASASYDSEEEEEGLPMSYDEKRQLSLDINRLPGEKLGRVVHIIQSREPSLRDSNPDEIEIDFETLKPTTLRELERYVKSCLQKKQRKPFSASGKKQAAKSKEELAQEKKKELEKRLQDVSGQLSSSKKPARKEKPGSAPSGGPSRLSSSSSSESGSSSSSGSSSDSSDSE

SEQ ID NO: 15142 - protein, 556 aa, Homo sapiens
MSTATTVAPAGIPATPGPVNPPPPEVSNPSKPGRKTNQLQYMQNVVVKTLWKHQFAWPFYQPVDAIKLNLPDYHKIIKNPMDMGTIKKRLENNYYWSASECMQDFNTMFTNCYIYNKPTDDIVLMAQALEKIFLQKVAQMPQEEVELLPPAPKGKGRKPAAGAQSAGTQQVAAVSSVSPATPFQSVPPTVSQTPVIAATPVPTITANVTSVPVPPAAAPPPPATPIVPVVPPTPPVVKKKGVKRKADTTTPTTSAITASRSESPPPLSDPKQAKVVARRESGGRPIKPPKKDLEDGEVPQHAGKKGKLSEHLRYCDSILREMLSKKHAAYAWPFYKPVDAEALELHDYHDIIKHPMDLSTVKRKMDGREYPDAQGFAADVRLMFSNCYKYNPPDHEVVAMARKLQDVFEMRFAKMPDEPVEAPALPAPAAPMVSKGAESSRSSEESSSDSGSSDSEEERATRLAELQEQLKAVHEQLAALSQAPVNKPKKKKEKKEKEKKKKDKEKEKEKHKVKAEEEKKAKVAPPAKQAQQKKAPAKKANSTTTAGRDHFLTCGV

SEQ ID NO: 15143 - protein, 483 aa, Homo sapiens
MAQADIALIGLAVMGQNLILNMNDHGFVVCAFNRTVSKVDDFLANEAKGTKVVGAQSLKEMVSKLKKPRRIILLVKAGQAVDDFIEKLVPLLDTGDIIIDGGNSEYRDTTRRCRDLKAKGILFVGSGVSGGEEGARYGPSLMPGGNKEAWPHIKTIFQGIAAKVGTGEPCCDWVGDEGAGHFVKMVHNGIEYGDMQLICEAYHLMKDVLGMAQDEMAQAFEDWNKTELDSFLIEITANILKFQDTDGKHLLPKIRDSAGQKGTGKWTAISALEYGVPVTLIGEAVFARCLSSLKDERIQASKKLKGPQKFQFDGDKKSFLEDIRKALYASKIISYAQGFMLLRQAATEFGWTLNYGGIALMWRGGCIIRSVFLGKIKDAFDRNPELQNLLLDDFFKSAVENCQDSWRRAVSTGVQAGIPMPCFTTALSFYDGYRHEMLPASLIQAQRDYFGAHTYELLAKPGQFIHTNWTGHGGTVSSSSYNA

SEQ ID NO: 15144 - protein, 470 aa, Homo sapiens
MGQNLILNMNDHGFVVCAFNRTVSKVDDFLANEAKGTKVVGAQSLKEMVSKLKKPRRIILLVKAGQAVDDFIEKLVPLLDTGDIIIDGGNSEYRDTTRRCRDLKAKGILFVGSGVSGGEEGARYGPSLMPGGNKEAWPHIKTIFQGIAAKVGTGEPCCDWVGDEGAGHFVKMVHNGIEYGDMQLICEAYHLMKDVLGMAQDEMAQAFEDWNKTELDSFLIEITANILKFQDTDGKHLLPKIRDSAGQKGTGKWTAISALEYGVPVTLIGEAVFARCLSSLKDERIQASKKLKGPQKFQFDGDKKSFLEDIRKALYASKIISYAQGFMLLRQAATEFGWTLNYGGIALMWRGGCIIRSVFLGKIKDAFDRNPELQNLLLDDFFKSAVENCQDSWRRAVSTGVQAGIPMPCFTTALSFYDGYRHEMLPASLIQAQRDYFGAHTYELLAKPGQFIHTNWTGHGGTVSSSSYNA

SEQ ID NO: 15145 - protein, 834 aa, Homo sapiens
MTVEFEECVKDSPRFRATIDEVETDVVEIEAKLDKLVKLCSGMVEAGKAYVSTSRLFVSGVRDLSQQCQGDTVISECLQRFADSLQEVVNYHMILFDQAQRSVRQQLQSFVKEDVRKFKETKKQFDKVREDLELSLVRNAQAPRHRPHEVEEATGALTLTRKCFRHLALDYVLQINVLQAKKKFEILDSMLSFMHAQSSFFQQGYSLLHQLDPYMKKLAAELDQLVIDSAVEKREMERKHAAIQQRTLLQDFSYDESKVEFDVDAPSGVVMEGYLFKRASNAFKTWNRRWFSIQNSQLVYQKKLKDALTVVVDDLRLCSVKPCEDIERRFCFEVLSPTKSCMLQADSEKLRQAWVQAVQASIASAYRESPDSCYSERLDRTASPSTSSIDSATDTRERGVKGESVLQRVQSVAGNSQCGDCGQPDPRWASINLGVLLCIECSGIHRSLGVHCSKVRSLTLDSWEPELLKLMCELGNSAVNQIYEAQCEGAGSRKPTASSSRQDKEAWIKDKYVEKKFLRKAPMAPALEAPRRWRVQKCLRPHSSPRAPTARRKVRLEPVLPCVAALSSVGTLDRKFRRDSLFCPDELDSLFSYFDAGAAGAGPRSLSSDSGLGGSSDGSSDVLAFGSGSVVDSVTEEEGAESEESSGEADGDTEAEAWGLADVRELHPGLLAHRAARARDLPALAAALAHGAEVNWADAEDEGKTPLVQAVLGGSLIVCEFLLQNGADVNQRDSRGRAPLHHATLLGRTGQVCLFLKRGADQHALDQEQRDPLAIAVQAANADIVTLLRLARMAEEMREAEAAPGPPGALAGSPTELQFRRCIQEFISLHLEES

SEQ ID NO: 15146 - protein, 759 aa, Homo sapiens
MVEAGKAYVSTSRLFVSGVRDLSQQCQGDTVISECLQRFADSLQEVVNYHMILFDQAQRSVRQQLQSFVKEDVRKFKETKKQFDKVREDLELSLVRNAQAPRHRPHEVEEATGALTLTRKCFRHLALDYVLQINVLQAKKKFEILDSMLSFMHAQSSFFQQGYSLLHQLDPYMKKLAAELDQLVIDSAVEKREMERKHAAIQQRTLLQDFSYDESKVEFDVDAPSGVVMEGYLFKRASNAFKTWNRRWFSIQNSQLVYQKKLKDALTVVVDDLRLCSVKPCEDIERRFCFEVLSPTKSCMLQADSEKLRQAWVQAVQASIASAYRESPDSCYSERLDRTASPSTSSIDSATDTRERGVKGESVLQRVQSVAGNSQCGDCGQPDPRWASINLGVLLCIECSGIHRSLGVHCSKVRSLTLDSWEPELLKLMCELGNSAVNQIYEAQCEGAGSRKPTASSSRQDKEAWIKDKYVEKKFLRKAPMAPALEAPRRWRVQKCLRPHSSPRAPTARRKVRLEPVLPCVAALSSVGTLDRKFRRDSLFCPDELDSLFSYFDAGAAGAGPRKGAESEESSGEADGDTEAEAWGLADVRELHPGLLAHRAARARDLPALAAALAHGAEVNWADAEDEGKTPLVQAVLGGSLIVCEFLLQNGADVNQRDSRGRAPLHHATLLGRTGQVCLFLKRGADQHALDQEQRDPLAIAVQAANADIVTLLRLARMAEEMREAEAAPGPPGALAGSPTELQFRRCIQEFISLHLEES

SEQ ID NO: 15147 - protein, 564 aa, Homo sapiens
MEGYLFKRASNAFKTWNRRWFSIQNSQLVYQKKLKDALTVVVDDLRLCSVKPCEDIERRFCFEVLSPTKSCMLQADSEKLRQAWVQAVQASIASAYRESPDSCYSERLDRTASPSTSSIDSATDTRERGVKGESVLQRVQSVAGNSQCGDCGQPDPRWASINLGVLLCIECSGIHRSLGVHCSKVRSLTLDSWEPELLKLMCELGNSAVNQIYEAQCEGAGSRKPTASSSRQDKEAWIKDKYVEKKFLRKAPMAPALEAPRRWRVQKCLRPHSSPRAPTARRKVRLEPVLPCVAALSSVGTLDRKFRRDSLFCPDELDSLFSYFDAGAAGAGPRSLSSDSGLGGSSDGSSDVLAFGSGSVVDSVTEEEGAESEESSGEADGDTEAEAWGLADVRELHPGLLAHRAARARDLPALAAALAHGAEVNWADAEDEGKTPLVQAVLGGSLIVCEFLLQNGADVNQRDSRGRAPLHHATLLGRTGQVCLFLKRGADQHALDQEQRDPLAIAVQAANADIVTLLRLARMAEEMREAEAAPGPPGALAGSPTELQFRRCIQEFISLHLEES

SEQ ID NO: 15148 - protein, 1130 aa, Homo sapiens
MLEICLKLVGCKSKKGLSSSSSCYLEEALQRPVASDFEPQGLSEAARWNSKENLLAGPSENDPNLFVALYDFVASGDNTLSITKGEKLRVLGYNHNGEWCEAQTKNGQGWVPSNYITPVNSLEKHSWYHGPVSRNAAEYLLSSGINGSFLVRESESSPGQRSISLRYEGRVYHYRINTASDGKLYVSSESRFNTLAELVHHHSTVADGLITTLHYPAPKRNKPTVYGVSPNYDKWEMERTDITMKHKLGGGQYGEVYEGVWKKYSLTVAVKTLKEDTMEVEEFLKEAAVMKEIKHPNLVQLLGVCTREPPFYIITEFMTYGNLLDYLRECNRQEVNAVVLLYMATQISSAMEYLEKKNFIHRDLAARNCLVGENHLVKVADFGLSRLMTGDTYTAHAGAKFPIKWTAPESLAYNKFSIKSDVWAFGVLLWEIATYGMSPYPGIDLSQVYELLEKDYRMERPEGCPEKVYELMRACWQWNPSDRPSFAEIHQAFETMFQESSISDEVEKELGKQGVRGAVSTLLQAPELPTKTRTSRRAAEHRDTTDVPEMPHSKGQGESDPLDHEPAVSPLLPRKERGPPEGGLNEDERLLPKDKKTNLFSALIKKKKKTAPTPPKRSSSFREMDGQPERRGAGEEEGRDISNGALAFTPLDTADPAKSPKPSNGAGVPNGALRESGGSGFRSPHLWKKSSTLTSSRLATGEEEGGGSSSKRFLRSCSASCVPHGAKDTEWRSVTLPRDLQSTGRQFDSSTFGGHKSEKPALPRKRAGENRSDQVTRGTVTPPPRLVKKNEEAADEVFKDIMESSPGSSPPNLTPKPLRRQVTVAPASGLPHKEEAGKGSALGTPAAAEPVTPTSKAGSGAPGGTSKGPAEESRVRRHKHSSESPGRDKGKLSRLKPAPPPPPAASAGKAGGKPSQSPSQEAAGEAVLGAKTKATSLVDAVNSDAAKPSQPGEGLKKPVLPATPKPQSAKPSGTPISPAPVPSTLPSASSALAGDQPSSTAFIPLISTRVSLRKTRQPPERIASGAITKGVVLDSTEALCLAISRNSEQMASHSAVLEAGKNLYTFCVSYVDSIQQMRNKFAFREAINKLENNLRELQICPATAGSGPAATQDFSKLLSSVKEISDIVQR

SEQ ID NO: 15149 - protein, 1149 aa, Homo sapiens
MGQQPGKVLGDQRRPSLPALHFIKGAGKKESSRHGGPHCNVFVEHEALQRPVASDFEPQGLSEAARWNSKENLLAGPSENDPNLFVALYDFVASGDNTLSITKGEKLRVLGYNHNGEWCEAQTKNGQGWVPSNYITPVNSLEKHSWYHGPVSRNAAEYLLSSGINGSFLVRESESSPGQRSISLRYEGRVYHYRINTASDGKLYVSSESRFNTLAELVHHHSTVADGLITTLHYPAPKRNKPTVYGVSPNYDKWEMERTDITMKHKLGGGQYGEVYEGVWKKYSLTVAVKTLKEDTMEVEEFLKEAAVMKEIKHPNLVQLLGVCTREPPFYIITEFMTYGNLLDYLRECNRQEVNAVVLLYMATQISSAMEYLEKKNFIHRDLAARNCLVGENHLVKVADFGLSRLMTGDTYTAHAGAKFPIKWTAPESLAYNKFSIKSDVWAFGVLLWEIATYGMSPYPGIDLSQVYELLEKDYRMERPEGCPEKVYELMRACWQWNPSDRPSFAEIHQAFETMFQESSISDEVEKELGKQGVRGAVSTLLQAPELPTKTRTSRRAAEHRDTTDVPEMPHSKGQGESDPLDHEPAVSPLLPRKERGPPEGGLNEDERLLPKDKKTNLFSALIKKKKKTAPTPPKRSSSFREMDGQPERRGAGEEEGRDISNGALAFTPLDTADPAKSPKPSNGAGVPNGALRESGGSGFRSPHLWKKSSTLTSSRLATGEEEGGGSSSKRFLRSCSASCVPHGAKDTEWRSVTLPRDLQSTGRQFDSSTFGGHKSEKPALPRKRAGENRSDQVTRGTVTPPPRLVKKNEEAADEVFKDIMESSPGSSPPNLTPKPLRRQVTVAPASGLPHKEEAGKGSALGTPAAAEPVTPTSKAGSGAPGGTSKGPAEESRVRRHKHSSESPGRDKGKLSRLKPAPPPPPAASAGKAGGKPSQSPSQEAAGEAVLGAKTKATSLVDAVNSDAAKPSQPGEGLKKPVLPATPKPQSAKPSGTPISPAPVPSTLPSASSALAGDQPSSTAFIPLISTRVSLRKTRQPPERIASGAITKGVVLDSTEALCLAISRNSEQMASHSAVLEAGKNLYTFCVSYVDSIQQMRNKFAFREAINKLENNLRELQICPATAGSGPAATQDFSKLLSSVKEISDIVQR

SEQ ID NO: 15150 - protein, 659 aa, Homo sapiens
MAAFSKYLTARNSSLAGAAFLLLCLLHKRRRALGLHGKKSGKPPLQNNEKEGKKERAVVDKVFFSRLIQILKIMVPRTFCKETGYLVLIAVMLVSRTYCDVWMIQNGTLIESGIIGRSRKDFKRYLLNFIAAMPLISLVNNFLKYGLNELKLCFRVRLTKYLYEEYLQAFTYYKMGNLDNRIANPDQLLTQDVEKFCNSVVDLYSNLSKPFLDIVLYIFKLTSAIGAQGPASMMAYLVVSGLFLTRLRRPIGKMTITEQKYEGEYRYVNSRLITNSEEIAFYNGNKREKQTVHSVFRKLVEHLHNFILFRFSMGFIDSIIAKYLATVVGYLVVSRPFLDLSHPRHLKSTHSELLEDYYQSGRMLLRMSQALGRIVLAGREMTRLAGFTARITELMQVLKDLNHGKYERTMVSQQEKGIEGVQVIPLIPGAGEIIIADNIIKFDHVPLATPNGDVLIRDLNFEVRSGANVLICGPNGCGKSSLFRVLGELWPLFGGRLTKPERGKLFYVPQRPYMTLGTLRDQVIYPDGREDQKRKGISDLVLKEYLDNVQLGHILEREGGWDSVQDWMDVLSGGEKQRMAMARLFYHKPQFAILDECTSAVSVDVEGYIYSHCRKVGITLFTVSHRKSLWKHHEYYLHMDGRGNYEFKQITEDTVEFGS

SEQ ID NO: 15151 - protein, 549 aa, Homo sapiens
MAAFSKYLTARNSSLAGAAFLLLCLLHKRRRALGLHGKKSGKPPLQNNEKEGKKERAVVDKVFFSRLIQILKIMVPRTFCKETGYLVLIAVMLVSRTYCDVWMIQNGTLIESGIIGRSRKDFKRYLLNFIAAMPLISLVNNFLKYGLNELKLCFRVRLTKYLYEEYLQAFTYYKMGNLDNRIANPDQLLTQDVEKFCNSVVDLYSNLSKPFLDIVLYIFKLTSAIGAQGPASMMAYLVVSGLFLTRLRRPIGKMTITEQKYEGEYRYVNSRLITNSFTARITELMQVLKDLNHGKYERTMVSQQEKGIEGVQVIPLIPGAGEIIIADNIIKFDHVPLATPNGDVLIRDLNFEVRSGANVLICGPNGCGKSSLFRVLGELWPLFGGRLTKPERGKLFYVPQRPYMTLGTLRDQVIYPDGREDQKRKGISDLVLKEYLDNVQLGHILEREGGWDSVQDWMDVLSGGEKQRMAMARLFYHKPQFAILDECTSAVSVDVEGYIYSHCRKVGITLFTVSHRKSLWKHHEYYLHMDGRGNYEFKQITEDTVEFGS

SEQ ID NO: 15152 - protein, 236 aa, Homo sapiens
MAAFSKYLTARNSSLAGAAFLLLCLLHKRRRALGLHGKKSGKPPLQNNEKEGKKERAVVDKVFFSRLIQILKIMVPRTFCKETGYLVLIAVMLVSRTYCDVWMIQNGTLIESGIIGRSRKDFKRYLLNFIAAMPLISLVNNFLKYGLNELKLCFRVRLTKYLYEEYLQAFTYYKMGNLDNRIANPDQLLTQDVEKFCNSVVDLYSNLSKPFLDIVLYIFKLTSAIGAQVLGKILWH

SEQ ID NO: 15153 - protein, 845 aa, Homo sapiens
MPKAPKQQPPEPEWIGDGESTSPSDKVVKKGKKDKKIKKTFFEELAVEDKQAGEEEKVLKEKEQQQQQQQQQQKKKRDTRKGRRKKDVDDDGEEKELMERLKKLSVPTSDEEDEVPAPKPRGGKKTKGGNVFAALIQDQSEEEEEEEKHPPKPAKPEKNRINKAVSEEQQPALKGKKGKEEKSKGKAKPQNKFAALDNEEEDKEEEIIKEKEPPKQGKEKAKKAEQGSEEEGEGEEEEEEGGESKADDPYAHLSKKEKKKLKKQMEYERQVASLKAANAAENDFSVSQAEMSSRQAMLENASDIKLEKFSISAHGKELFVNADLYIVAGRRYGLVGPNGKGKTTLLKHIANRALSIPPNIDVLLCEQEVVADETPAVQAVLRADTKRLKLLEEERRLQGQLEQGDDTAAERLEKVYEELRATGAAAAEAKARRILAGLGFDPEMQNRPTQKFSGGWRMRVSLARALFMEPTLLMLDEPTNHLDLNAVIWLNNYLQGWRKTLLIVSHDQGFLDDVCTDIIHLDAQRLHYYRGNYMTFKKMYQQKQKELLKQYEKQEKKLKELKAGGKSTKQAEKQTKEALTRKQQKCRRKNQDEESQEAPELLKRPKEYTVRFTFPDPPPLSPPVLGLHGVTFGYQGQKPLFKNLDFGIDMDSRICIVGPNGVGKSTLLLLLTGKLTPTHGEMRKNHRLKIGFFNQQYAEQLRMEETPTEYLQRGFNLPYQDARKCLGRFGLESHAHTIQICKLSGGQKARVVFAELACREPDVLILDEPTNNLDIESIDALGEAINEYKGAVIVVSHDARLITETNCQLWVVEEQSVSQIDGDFEDYKREVLEALGEVMVSRPRE

SEQ ID NO: 15154 - protein, 807 aa, Homo sapiens
MPKAPKQQPPEPEWIGDGESTSPSDKVVKKGKKDKKIKKTFFEELAVEDKQAGEEEKVLKEKEQQQQQQQQQQKKKRDTRKGRRKKDVDDDGEEKELMERLKKLSVPTSDEEDEVPAPKPRGGKKTKGGNVFAALIQDQSEEEEEEEKHPPKPAKPEKNRINKAVSEEQQPALKGKKGKEEKSKGKAKPQNKFAALDNEEEDKEEEIIKEKEPPKQGKEKAKKAEQMEYERQVASLKAANAAENDFSVSQAEMSSRQAMLENASDIKLEKFSISAHGKELFVNADLYIVAGRRYGLVGPNGKGKTTLLKHIANRALSIPPNIDVLLCEQEVVADETPAVQAVLRADTKRLKLLEEERRLQGQLEQGDDTAAERLEKVYEELRATGAAAAEAKARRILAGLGFDPEMQNRPTQKFSGGWRMRVSLARALFMEPTLLMLDEPTNHLDLNAVIWLNNYLQGWRKTLLIVSHDQGFLDDVCTDIIHLDAQRLHYYRGNYMTFKKMYQQKQKELLKQYEKQEKKLKELKAGGKSTKQAEKQTKEALTRKQQKCRRKNQDEESQEAPELLKRPKEYTVRFTFPDPPPLSPPVLGLHGVTFGYQGQKPLFKNLDFGIDMDSRICIVGPNGVGKSTLLLLLTGKLTPTHGEMRKNHRLKIGFFNQQYAEQLRMEETPTEYLQRGFNLPYQDARKCLGRFGLESHAHTIQICKLSGGQKARVVFAELACREPDVLILDEPTNNLDIESIDALGEAINEYKGAVIVVSHDARLITETNCQLWVVEEQSVSQIDGDFEDYKREVLEALGEVMVSRPRE

SEQ ID NO: 15155 - protein, 780 aa, Homo sapiens
MAPYSLLVTRLQKALGVRQYHVASVLCQRAKVAMSHFEPNEYIHYDLLEKNINIVRKRLNRPLTLSEKIVYGHLDDPASQEIERGKSYLRLRPDRVAMQDATAQMAMLQFISSGLSKVAVPSTIHCDHLIEAQVGGEKDLRRAKDINQEVYNFLATAGAKYGVGFWKPGSGIIHQIILENYAYPGVLLIGTDSHTPNGGGLGGICIGVGGADAVDVMAGIPWELKCPKVIGVKLTGSLSGWSSPKDVILKVAGILTVKGGTGAIVEYHGPGVDSISCTGMATICNMGAEIGATTSVFPYNHRMKKYLSKTGREDIANLADEFKDHLVPDPGCHYDQLIEINLSELKPHINGPFTPDLAHPVAEVGKVAEKEGWPLDIRVGLIGSCTNSSYEDMGRSAAVAKQALAHGLKCKSQFTITPGSEQIRATIERDGYAQILRDLGGIVLANACGPCIGQWDRKDIKKGEKNTIVTSYNRNFTGRNDANPETHAFVTSPEIVTALAIAGTLKFNPETDYLTGTDGKKFRLEAPDADELPKGEFDPGQDTYQHPPKDSSGQHVDVSPTSQRLQLLEPFDKWDGKDLEDLQILIKVKGKCTTDHISAAGPWLKFRGHLDNISNNLLIGAINIENGKANSVRNAVTQEFGPVPDTARYYKKHGIRWVVIGDENYGEGSSREHAALEPRHLGGRAIITKSFARIHETNLKKQGLLPLTFADPADYNKIHPVDKLTIQGLKDFTPGKPLKCIIKHPNGTQETILLNHTFNETQIEWFRAGSALNRMKELQQ

SEQ ID NO: 15156 - protein, 479 aa, Homo sapiens
MNWSHSCISFCWIYFAASRLRAAETADGKYAQKLFNDLFEDYSNALRPVEDTDKVLNVTLQITLSQIKDMDERNQILTAYLWIRQIWHDAYLTWDRDQYDGLDSIRIPSDLVWRPDIVLYNKADDESSEPVNTNVVLRYDGLITWDAPAITKSSCVVDVTYFPFDNQQCNLTFGSWTYNGNQVDIFNALDSGDLSDFIEDVEWEVHGMPAVKNVISYGCCSEPYPDVTFTLLLKRRSSFYIVNLLIPCVLISFLAPLSFYLPAASGEKVSLGVTILLAMTVFQLMVAEIMPASENVPLIGKYYIATMALITASTALTIMVMNIHFCGAEARPVPHWARVVILKYMSRVLFVYDVGESCLSPHHSRERDHLTKVYSKLPESNLKAARNKDLSRKKDMNKRLKNDLGCQGKNPQEAESYCAQYKVLTRNIEYIAKCLKDHKATNSKGSEWKKVAKVIDRFFMWIFFIMVFVMTILIIARAD

SEQ ID NO: 15157 - protein, 2168 aa, Homo sapiens
MESGERLPSSAASSTTPTSSSTPSVASVVSKGGLSTGVASLSSTINPCGHLFRTAGDQPFNLSTVSSAFPMVSHPVFGLHSASSGHSEFGGLGTLGTPTALAAHPQLASFPGAEWWRTTDAHTRTGATFFPPLLGIPPLFAPPAQNHDSSSFHSRTSGKSNRNGPEKGVNGSINGSNTSSVIGINTSVLSTTASSSMGQTKSTSSGGGNRKCNQEQSKNQPLDARVDKIKDKKPRKKAMESSSNSDSDSGTSSDTSSEGISSSDSDDLEEDEEEEDQSIEESEDDDSDSESEAQHKSNNQVLLHGISDPKADGQKATEKAQEKRIHQPLPLASESQTHSFQSQQKQPQVLSQQLPFIFQSSQAKEESVNKHTSVIQSTGLVSNVKPLSLVNQAKKETYMKLIVPSPDVLKAGNKNTSEESSLLTSELRSKREQYKQAFPSQLKKQESSKSLKKVIAALSNPKATSSSPAHPKQTLENNHPNPFLTNALLGNHQPNGVIQSVIQEAPLALTTKTKMQSKINENIAAASSTPFSSPVNLSTSGRRTPGNQTPVMPSASPILHSQGKEKAVSNNVNPVKTQHHSHPAKSLVEQFRGTDSDIPSSKDSEDSNEDEEEDDEEEDEEDDEDDESDDSQSESDSNSESDTEGSEEEDDDDKDQDESDSDTEGEKTSMKLNKTTSSVKSPSMSLTGHSTPRNLHIAKAPGSAPAALCSESQSPAFLGTSSSTLTSSPHSGTSKRRRVTDERELRIPLEYGWQRETRIRNFGGRLQGEVAYYAPCGKKLRQYPEVIKYLSRNGIMDISRDNFSFSAKIRVGDFYEARDGPQGMQWCLLKEEDVIPRIRAMEGRRGRPPNPDRQRAREESRMRRRKGRPPNVGNAEFLDNADAKLLRKLQAQEIARQAAQIKLLRKLQKQEQARVAKEAKKQQAIMAAEEKRKQKEQIKIMKQQEKIKRIQQIRMEKELRAQQILEAKKKKKEEAANAKLLEAEKRIKEKEMRRQQAVLLKHQERERRRQHMMLMKAMEARKKAEEKERLKQEKRDEKRLNKERKLEQRRLELEMAKELKKPNEDMCLADQKPLPELPRIPGLVLSGSTFSDCLMVVQFLRNFGKVLGFDVNIDVPNLSVLQEGLLNIGDSMGEVQDLLVRLLSAAVCDPGLITGYKAKTALGEHLLNVGVNRDNVSEILQIFMEAHCGQTELTESLKTKAFQAHTPAQKASVLAFLINELACSKSVVSEIDKNIDYMSNLRRDKWVVEGKLRKLRIIHAKKTGKRDTSGGIDLGEEQHPLGTPTPGRKRRRKGGDSDYDDDDDDDSDDQGDEDDEDEEDKEDKKGKKTDICEDEDEGDQAASVEELEKQIEKLSKQQSQYRRKLFDASHSLRSVMFGQDRYRRRYWILPQCGGIFVEGMESGEGLEEIAKEREKLKKAESVQIKEEMFETSGDSLNCSNTDHCEQKEDLKEKDNTNLFLQKPGSFSKLSKLLEVAKMPPESEVMTPKPNAGANGCTLSYQNSGKHSLGSVQSTATQSNVEKADSNNLFNTGSSGPGKFYSPLPNDQLLKTLTEKNRQWFSLLPRTPCDDTSLTHADMSTASLVTPQSQPPSKSPSPTPAPLGSSAQNPVGLNPFALSPLQVKGGVSMMGLQFCGWPTGVVTSNIPFTSSVPSLGSGLGLSEGNGNSFLTSNVASSKSESPVPQNEKATSAQPAAVEVAKPVDFPSPKPIPEEMQFGWWRIIDPEDLKALLKVLHLRGIREKALQKQIQKHLDYITQACLKNKDVAIIELNENEENQVTRDIVENWSVEEQAMEMDLSVLQQVEDLERRVASASLQVKGWMCPEPASEREDLVYFEHKSFTKLCKEHDGEFTGEDESSAHALERKSDNPLDIAVTRLADLERNIERRIEEDIAPGLRVWRRALSEARSAAQVALCIQQLQKSIAWEKSIMKVYCQICRKGDNEELLLLCDGCDKGCHTYCHRPKITTIPDGDWFCPACIAKASGQTLKIKKLHVKGKKTNESKKGKKVTLTGDTEDEDSASTSSSLKRGNKDLKKRKMEENTSINLSKQESFTSVKKPKRDDSKDLALCSMILTEMETHEDAWPFLLPVNLKLVPGYKKVIKKPMDFSTIREKLSSGQYPNLETFALDVRLVFDNCETFNEDDSDIGRAGHNMRKYFEKKWTDTFKVS

SEQ ID NO: 15158 - protein, 2068 aa, Homo sapiens
MESGERLPSSAASSTTPTSSSTPSVASVVSKGGLSTGVASLSSTINPCGHLFRTAGDQPFNLSTVSSAFPMVSHPVFGLHSASSGHSEFGGLGTLGTPTALAAHPQLASFPEWWRTTDAHTRTGATFFPPLLGIPPLFAPPAQNHDSSSFHSRTSGKSNRNGPEKGVNGSINGSNTSSVIGINTSVLSTTASSSMGQTKSTSSGGGNRKCNQEQSKNQPLDARVDKIKDKKPRKKAMESSSNSDSDSGTSSDTSSEGISSSDSDDLEEDEEEEDQSIEESEDDDSDSESEAQHKSNNQVLLHGISDPKADGQKATEKAQEKRIHQPLPLASESQTHSFQSQQKQPQVLSQQLPFIFQSSQAKEESVNKHTSVIQSTGLVSNVKPLSLVNQAKKETYMKLIVPSPDVLKAGNKNTSEESSLLTSELRSKREQYKQAFPSQLKKQESSKSLKKVIAALSNPKATSSSPAHPKQTLENNHPNPFLTNALLGNHQPNGVIQSVIQEAPLALTTKTKMQSKINENIAAASSTPFSSPVNLSTSGRRTPGNQTPVMPSASPILHSQGKEKAVSNNVNPVKTQHHSHPAKSLVEQFRGTDSDIPSSKDSEDSNEDEEEDDEEEDEEDDEDDESDDSQSGTSKRRRVTDERELRIPLEYGWQRETRIRNFGGRLQGEVAYYAPCGKKLRQYPEVIKYLSRNGIMDISRDNFSFSAKIRVGDFYEARDGPQGMQWCLLKEEDVIPRIRAMEGRRGRPPNPDRQRAREESRMRRRKGRPPNVGNAEFLDNADAKLLRKLQAQEIARQAAQIKLLRKLQKQEQARVAKEAKKQQAIMAAEEKRKQKEQIKIMKQQEKIKRIQQIRMEKELRAQQILEAKKKKKEEAANAKLLEAEKRIKEKEMRRQQAVLLKHQERERRRQHMMLMKAMEARKKAEEKERLKQEKRDEKRLNKERKLEQRRLELEMAKELKKPNEDMCLADQKPLPELPRIPGLVLSGSTFSDCLMVVQFLRNFGKVLGFDVNIDVPNLSVLQEGLLNIGDSMGEVQDLLVRLLSAAVCDPGLITGYKAKTALGEHLLNVGVNRDNVSEILQIFMEAHCGQTELTESLKTKAFQAHTPAQKASVLAFLINELACSKSVVSEIDKNIDYMSNLRRDKWVVEGKLRKLRIIHAKKTGKRDTSGGIDLGEEQHPLGTPTPGRKRRRKGGDSDYDDDDDDDSDDQGDEDDEDEEDKEDKKGKKTDICEDEDEGDQAASVEELEKQIEKLSKQQSQYRRKLFDASHSLRSVMFGQDRYRRRYWILPQCGGIFVEGMESGEGLEEIAKEREKLKKAESVQIKEEMFETSGDSLNCSNTDHCEQKEDLKEKDNTNLFLQKPGSFSKLSKLLEVAKMPPESEVMTPKPNAGANGCTLSYQNSGKHSLGSVQSTATQSNVEKADSNNLFNTGSSGPGKFYSPLPNDQLLKTLTEKNRQWFSLLPRTPCDDTSLTHADMSTASLVTPQSQPPSKSPSPTPAPLGSSAQNPVGLNPFALSPLQVKGGVSMMGLQFCGWPTGVVTSNIPFTSSVPSLGSGLGLSEGNGNSFLTSNVASSKSESPVPQNEKATSAQPAAVEVAKPVDFPSPKPIPEEMQFGWWRIIDPEDLKALLKVLHLRGIREKALQKQIQKHLDYITQACLKNKDVAIIELNENEENQVTRDIVENWSVEEQAMEMDLSVLQQVEDLERRVASASLQVKGWMCPEPASEREDLVYFEHKSFTKLCKEHDGEFTGEDESSAHALERKSDNPLDIAVTRLADLERNIERRIEEDIAPGLRVWRRALSEARSAAQVALCIQQLQKSIAWEKSIMKVYCQICRKGDNEELLLLCDGCDKGCHTYCHRPKITTIPDGDWFCPACIAKASGQTLKIKKLHVKGKKTNESKKGKKVTLTGDTEDEDSASTSSSLKRGNKDLKKRKMEENTSINLSKQESFTSVKKPKRDDSKDLALCSMILTEMETHEDAWPFLLPVNLKLVPGYKKVIKKPMDFSTIREKLSSGQYPNLETFALDVRLVFDNCETFNEDDSDIGRAGHNMRKYFEKKWTDTFKVS

SEQ ID NO: 15159 - protein, 2134 aa, Homo sapiens
MESGERLPSSAASSTTPTSSSTPSVASVVSKGGLSTGVASLSSTINPCGHLFRTAGDQPFNLSTVSSAFPMVSHPVFGLHSASSGHSEFGGLGTLGTPTALAAHPQLASFPGAEWWRTTDAHTRTGATFFPPLLGIPPLFAPPAQNHDSSSFHSRTSGKSNRNGPEKGVNGSINGSNTSSVIGINTSVLSTTASSSMGQTKSTSSGGGNRKCNQEQSKNQPLDARVDKIKDKKPRKKAMESSSNSDSDSGTSSDTSSEGISSSDSDDLEEDEEEEDQSIEESEDDDSDSESEAQHKSNNQVLLHGISDPKADGQKATEKAQEKRIHQPLPLASESQTHSFQSQQKQPQVLSQQLPFIFQSSQAKEESVNKHTSVIQSTGLVSNVKPLSLVNQAKKETYMKLIVPSPDVLKAGNKNTSEESSLLTSELRSKREQYKQAFPSQLKKQESSKSLKKVIAALSNPKATSSSPAHPKQTLENNHPNPFLTNALLGNHQPNGVIQSVIQEAPLALTTKTKMQSKINENIAAASSTPFSSPVNLSTSGRRTPGNQTPVMPSASPILHSQGKEKAVSNNVNPVKTQHHSHPAKSLVEQFRGTDSDIPSSKDSEDSNEDEEEDDEEEDEEDDEDDESDDSQSESDSNSESDTEGSEEEDDDDKDQDESDSDTEGEKTSMKLNKTTSSVKSPSMSLTGHSTPRNLHIAKAPGSAPAALCSESQSPAFLGTSSSTLTSSPHSGTSKRRRVTDERELRIPLEYGWQRETRIRNFGGRLQGEVAYYAPCGKKLRQYPEVIKGMQWCLLKEEDVIPRIRAMEGRRGRPPNPDRQRAREESRMRRRKGRPPNVGNAEFLDNADAKLLRKLQAQEIARQAAQIKLLRKLQKQEQARVAKEAKKQQAIMAAEEKRKQKEQIKIMKQQEKIKRIQQIRMEKELRAQQILEAKKKKKEEAANAKLLEAEKRIKEKEMRRQQAVLLKHQERERRRQHMMLMKAMEARKKAEEKERLKQEKRDEKRLNKERKLEQRRLELEMAKELKKPNEDMCLADQKPLPELPRIPGLVLSGSTFSDCLMVVQFLRNFGKVLGFDVNIDVPNLSVLQEGLLNIGDSMGEVQDLLVRLLSAAVCDPGLITGYKAKTALGEHLLNVGVNRDNVSEILQIFMEAHCGQTELTESLKTKAFQAHTPAQKASVLAFLINELACSKSVVSEIDKNIDYMSNLRRDKWVVEGKLRKLRIIHAKKTGKRDTSGGIDLGEEQHPLGTPTPGRKRRRKGGDSDYDDDDDDDSDDQGDEDDEDEEDKEDKKGKKTDICEDEDEGDQAASVEELEKQIEKLSKQQSQYRRKLFDASHSLRSVMFGQDRYRRRYWILPQCGGIFVEGMESGEGLEEIAKEREKLKKAESVQIKEEMFETSGDSLNCSNTDHCEQKEDLKEKDNTNLFLQKPGSFSKLSKLLEVAKMPPESEVMTPKPNAGANGCTLSYQNSGKHSLGSVQSTATQSNVEKADSNNLFNTGSSGPGKFYSPLPNDQLLKTLTEKNRQWFSLLPRTPCDDTSLTHADMSTASLVTPQSQPPSKSPSPTPAPLGSSAQNPVGLNPFALSPLQVKGGVSMMGLQFCGWPTGVVTSNIPFTSSVPSLGSGLGLSEGNGNSFLTSNVASSKSESPVPQNEKATSAQPAAVEVAKPVDFPSPKPIPEEMQFGWWRIIDPEDLKALLKVLHLRGIREKALQKQIQKHLDYITQACLKNKDVAIIELNENEENQVTRDIVENWSVEEQAMEMDLSVLQQVEDLERRVASASLQVKGWMCPEPASEREDLVYFEHKSFTKLCKEHDGEFTGEDESSAHALERKSDNPLDIAVTRLADLERNIERRIEEDIAPGLRVWRRALSEARSAAQVALCIQQLQKSIAWEKSIMKVYCQICRKGDNEELLLLCDGCDKGCHTYCHRPKITTIPDGDWFCPACIAKASGQTLKIKKLHVKGKKTNESKKGKKVTLTGDTEDEDSASTSSSLKRGNKDLKKRKMEENTSINLSKQESFTSVKKPKRDDSKDLALCSMILTEMETHEDAWPFLLPVNLKLVPGYKKVIKKPMDFSTIREKLSSGQYPNLETFALDVRLVFDNCETFNEDDSDIGRAGHNMRKYFEKKWTDTFKVS

SEQ ID NO: 15160 - protein, 1972 aa, Homo sapiens
MGQTKSTSSGGGNRKCNQEQSKNQPLDARVDKIKDKKPRKKAMESSSNSDSDSGTSSDTSSEGISSSDSDDLEEDEEEEDQSIEESEDDDSDSESEAQHKSNNQVLLHGISDPKADGQKATEKAQEKRIHQPLPLASESQTHSFQSQQKQPQVLSQQLPFIFQSSQAKEESVNKHTSVIQSTGLVSNVKPLSLVNQAKKETYMKLIVPSPDVLKAGNKNTSEESSLLTSELRSKREQYKQAFPSQLKKQESSKSLKKVIAALSNPKATSSSPAHPKQTLENNHPNPFLTNALLGNHQPNGVIQSVIQEAPLALTTKTKMQSKINENIAAASSTPFSSPVNLSTSGRRTPGNQTPVMPSASPILHSQGKEKAVSNNVNPVKTQHHSHPAKSLVEQFRGTDSDIPSSKDSEDSNEDEEEDDEEEDEEDDEDDESDDSQSESDSNSESDTEGSEEEDDDDKDQDESDSDTEGEKTSMKLNKTTSSVKSPSMSLTGHSTPRNLHIAKAPGSAPAALCSESQSPAFLGTSSSTLTSSPHSGTSKRRRVTDERELRIPLEYGWQRETRIRNFGGRLQGEVAYYAPCGKKLRQYPEVIKYLSRNGIMDISRDNFSFSAKIRVGDFYEARDGPQGMQWCLLKEEDVIPRIRAMEGRRGRPPNPDRQRAREESRMRRRKGRPPNVGNAEFLDNADAKLLRKLQAQEIARQAAQIKLLRKLQKQEQARVAKEAKKQQAIMAAEEKRKQKEQIKIMKQQEKIKRIQQIRMEKELRAQQILEAKKKKKEEAANAKLLEAEKRIKEKEMRRQQAVLLKHQERERRRQHMMLMKAMEARKKAEEKERLKQEKRDEKRLNKERKLEQRRLELEMAKELKKPNEDMCLADQKPLPELPRIPGLVLSGSTFSDCLMVVQFLRNFGKVLGFDVNIDVPNLSVLQEGLLNIGDSMGEVQDLLVRLLSAAVCDPGLITGYKAKTALGEHLLNVGVNRDNVSEILQIFMEAHCGQTELTESLKTKAFQAHTPAQKASVLAFLINELACSKSVVSEIDKNIDYMSNLRRDKWVVEGKLRKLRIIHAKKTGKRDTSGGIDLGEEQHPLGTPTPGRKRRRKGGDSDYDDDDDDDSDDQGDEDDEDEEDKEDKKGKKTDICEDEDEGDQAASVEELEKQIEKLSKQQSQYRRKLFDASHSLRSVMFGQDRYRRRYWILPQCGGIFVEGMESGEGLEEIAKEREKLKKAESVQIKEEMFETSGDSLNCSNTDHCEQKEDLKEKDNTNLFLQKPGSFSKLSKLLEVAKMPPESEVMTPKPNAGANGCTLSYQNSGKHSLGSVQSTATQSNVEKADSNNLFNTGSSGPGKFYSPLPNDQLLKTLTEKNRQWFSLLPRTPCDDTSLTHADMSTASLVTPQSQPPSKSPSPTPAPLGSSAQNPVGLNPFALSPLQVKGGVSMMGLQFCGWPTGVVTSNIPFTSSVPSLGSGLGLSEGNGNSFLTSNVASSKSESPVPQNEKATSAQPAAVEVAKPVDFPSPKPIPEEMQFGWWRIIDPEDLKALLKVLHLRGIREKALQKQIQKHLDYITQACLKNKDVAIIELNENEENQVTRDIVENWSVEEQAMEMDLSVLQQVEDLERRVASASLQVKGWMCPEPASEREDLVYFEHKSFTKLCKEHDGEFTGEDESSAHALERKSDNPLDIAVTRLADLERNIERRIEEDIAPGLRVWRRALSEARSAAQVALCIQQLQKSIAWEKSIMKVYCQICRKGDNEELLLLCDGCDKGCHTYCHRPKITTIPDGDWFCPACIAKASGQTLKIKKLHVKGKKTNESKKGKKVTLTGDTEDEDSASTSSSLKRGNKDLKKRKMEENTSINLSKQESFTSVKKPKRDDSKDLALCSMILTEMETHEDAWPFLLPVNLKLVPGYKKVIKKPMDFSTIREKLSSGQYPNLETFALDVRLVFDNCETFNEDDSDIGRAGHNMRKYFEKKWTDTFKVS

SEQ ID NO: 15161 - protein, 2132 aa, Homo sapiens
MESGERLPSSAASSTTPTSSSTPSVASVVSKGGLSTGVASLSSTINPCGHLFRTAGDQPFNLSTVSSAFPMVSHPVFGLHSASSGHSEFGGLGTLGTPTALAAHPQLASFPEWWRTTDAHTRTGATFFPPLLGIPPLFAPPAQNHDSSSFHSRTSGKSNRNGPEKGVNGSINGSNTSSVIGINTSVLSTTASSSMGQTKSTSSGGGNRKCNQEQSKNQPLDARVDKIKDKKPRKKAMESSSNSDSDSGTSSDTSSEGISSSDSDDLEEDEEEEDQSIEESEDDDSDSESEAQHKSNNQVLLHGISDPKADGQKATEKAQEKRIHQPLPLASESQTHSFQSQQKQPQVLSQQLPFIFQSSQAKEESVNKHTSVIQSTGLVSNVKPLSLVNQAKKETYMKLIVPSPDVLKAGNKNTSEESSLLTSELRSKREQYKQAFPSQLKKQESSKSLKKVIAALSNPKATSSSPAHPKQTLENNHPNPFLTNALLGNHQPNGVIQSVIQEAPLALTTKTKMQSKINENIAAASSTPFSSPVNLSTSGRRTPGNQTPVMPSASPILHSQGKEKAVSNNVNPVKTQHHSHPAKSLVEQFRGTDSDIPSSKDSEDSNEDEEEDDEEEDEEDDEDDESDDSQSESDSNSESDTEGSEEEDDDDKDQDESDSDTEGEKTSMKLNKTTSSVKSPSMSLTGHSTPRNLHIAKAPGSAPAALCSESQSPAFLGTSSSTLTSSPHSGTSKRRRVTDERELRIPLEYGWQRETRIRNFGGRLQGEVAYYAPCGKKLRQYPEVIKGMQWCLLKEEDVIPRIRAMEGRRGRPPNPDRQRAREESRMRRRKGRPPNVGNAEFLDNADAKLLRKLQAQEIARQAAQIKLLRKLQKQEQARVAKEAKKQQAIMAAEEKRKQKEQIKIMKQQEKIKRIQQIRMEKELRAQQILEAKKKKKEEAANAKLLEAEKRIKEKEMRRQQAVLLKHQERERRRQHMMLMKAMEARKKAEEKERLKQEKRDEKRLNKERKLEQRRLELEMAKELKKPNEDMCLADQKPLPELPRIPGLVLSGSTFSDCLMVVQFLRNFGKVLGFDVNIDVPNLSVLQEGLLNIGDSMGEVQDLLVRLLSAAVCDPGLITGYKAKTALGEHLLNVGVNRDNVSEILQIFMEAHCGQTELTESLKTKAFQAHTPAQKASVLAFLINELACSKSVVSEIDKNIDYMSNLRRDKWVVEGKLRKLRIIHAKKTGKRDTSGGIDLGEEQHPLGTPTPGRKRRRKGGDSDYDDDDDDDSDDQGDEDDEDEEDKEDKKGKKTDICEDEDEGDQAASVEELEKQIEKLSKQQSQYRRKLFDASHSLRSVMFGQDRYRRRYWILPQCGGIFVEGMESGEGLEEIAKEREKLKKAESVQIKEEMFETSGDSLNCSNTDHCEQKEDLKEKDNTNLFLQKPGSFSKLSKLLEVAKMPPESEVMTPKPNAGANGCTLSYQNSGKHSLGSVQSTATQSNVEKADSNNLFNTGSSGPGKFYSPLPNDQLLKTLTEKNRQWFSLLPRTPCDDTSLTHADMSTASLVTPQSQPPSKSPSPTPAPLGSSAQNPVGLNPFALSPLQVKGGVSMMGLQFCGWPTGVVTSNIPFTSSVPSLGSGLGLSEGNGNSFLTSNVASSKSESPVPQNEKATSAQPAAVEVAKPVDFPSPKPIPEEMQFGWWRIIDPEDLKALLKVLHLRGIREKALQKQIQKHLDYITQACLKNKDVAIIELNENEENQVTRDIVENWSVEEQAMEMDLSVLQQVEDLERRVASASLQVKGWMCPEPASEREDLVYFEHKSFTKLCKEHDGEFTGEDESSAHALERKSDNPLDIAVTRLADLERNIERRIEEDIAPGLRVWRRALSEARSAAQVALCIQQLQKSIAWEKSIMKVYCQICRKGDNEELLLLCDGCDKGCHTYCHRPKITTIPDGDWFCPACIAKASGQTLKIKKLHVKGKKTNESKKGKKVTLTGDTEDEDSASTSSSLKRGNKDLKKRKMEENTSINLSKQESFTSVKKPKRDDSKDLALCSMILTEMETHEDAWPFLLPVNLKLVPGYKKVIKKPMDFSTIREKLSSGQYPNLETFALDVRLVFDNCETFNEDDSDIGRAGHNMRKYFEKKWTDTFKVS

SEQ ID NO: 15162 - protein, 611 aa, Homo sapiens
MSAVSQPQAAPSPLEKSPSTAILCNTCGNVCKGEVLRVQDKYFHIKCFVCKACGCDLAEGGFFVRQGEYICTLDYQRLYGTRCFSCDQFIEGEVVSALGKTYHPDCFVCAVCRLPFPPGDRVTFNGKECMCQKCSLPVSVGSSAHLSQGLRSCGGCGTEIKNGQALVALDKHWHLGCFKCKSCGKLLNAEYISKDGLPYCEADYHAKFGIRCDSCEKYITGRVLEAGEKHYHPSCALCVRCGQMFAEGEEMYLQGSSIWHPACRQAARTEDRNKETRTSSESIISVPASSTSGSPSRVIYAKLGGEILDYRDLAALPKSKAIYDIDRPDMISYSPYISHSAGDRQSYGEGDQDDRSYKQCRTSSPSSTGSVSLGRYTPTSRSPQHYSRPGSESGRSTPSLSVLSDSKPPPSTYQQAPRHFHVPDTGVKDNIYRKPPIYRQHAARRSDGEDGSLDQDNRKKSSWLMLKGDADTRTNSPDLDTQSLSHSSGTDRDPLQRMAGDSFHSRFPYSKSDPLPGHGKNGLDQRNANLAPCGADPDASWGMREYKIYPYDSLIVTNRIRVKLPKDVDRTRLERHLSPEEFQEVFGMSIEEFDRLALWKRNDLKKKALLF

SEQ ID NO: 15163 - protein, 572 aa, Homo sapiens
MSAVSQPQAAPSPLEKSPSTAILCNTCGNVCKGEVLRVQDKYFHIKCFVCKACGCDLAEGGFFVRQGEYICTLDYQRLYGTRCFSCDQFIEGEVVSALGKTYHPDCFVCAVCRLPFPPGDRVTFNGKECMCQKCSLPVSVGSSAHLSQGLRSCGGCGTEIKNGQALVALDKHWHLGCFKCKSCGKLLNAEYISKDGLPYCEADYHAKFGIRCDSCEKYITGRVLEAGEKHYHPSCALCVRCGQMFAEGEEMYLQGSSIWHPACRQAARTEDRNKETRTSSESIISVPASSTSGSPSRVIYAKLGGEILDYRDLAALPKSKAIYDIDRPDMISYSPYISHSAGDRQSYGEGDQDDRSYKQCRTSSPSSTGSVSLGRYTPTSRSPQHYSRPGSESGRSTPSLSVLSDSKPPPSTYQQAPRHFHVPDTGVKDNIYRKPPIYRQHAARRSDGEDGSLDQDNRKKSSWLMLKGDADTRTNSPDLDTQSLSHSSGTDRDPLQRMAGDSFHSQYKIYPYDSLIVTNRIRVKLPKDVDRTRLERHLSPEEFQEVFGMSIEEFDRLALWKRNDLKKKALLF

SEQ ID NO: 15164 - protein, 531 aa, Homo sapiens
MSAVSQPQAAPSPLEKSPSTAILCNTCGNVCKGEVLRVQDKYFHIKCFVCKACGCDLAEGGFFVRQGEYICTLDYQRLYGTRCFSCDQFIEGEVVSALGKTYHPDCFVCAVCRLPFPPGDRVTFNGKECMCQKCSLPVSVGSSAHLSQGLRSCGGCGTEIKNGQALVALDKHWHLGCFKCKSCGKLLNAEYISKDGLPYCEADYHAKFGIRCDSCEKYITGRVLEAGEKHYHPSCALCVRCGQMFAEGEEMYLQGSSIWHPACRQAARTEDRNKETRTSSESIISVPASSTSGSPSRVIYAKLGGEILDYRDLAALPKSKAIYDIDRPDMISYSPYISHSAGDRQSYGESPQLLSPTPTEGDQDDRSYKQCRTSSPSSTGSVSLGRYTPTSRSPQHYSRPAARRSDGEDGSLDQDNRKKSSWLMLKGDADTRTNSPDLDTQSLSHSSGTDRDPLQRMAGDSFHSQYKIYPYDSLIVTNRIRVKLPKDVDRTRLERHLSPEEFQEVFGMSIEEFDRLALWKRNDLKKKALLF

SEQ ID NO: 15165 - protein, 346 aa, Homo sapiens
MFAEGEEMYLQGSSIWHPACRQAARTEDRNKETRTSSESIISVPASSTSGSPSRVIYAKLGGEILDYRDLAALPKSKAIYDIDRPDMISYSPYISHSAGDRQSYGESPQLLSPTPTEGDQDDRSYKQCRTSSPSSTGSVSLGRYTPTSRSPQHYSRPDTGVKDNIYRKPPIYRQHAARRSDGEDGSLDQDNRKQKSSWLMLKGDADTRTNSPDLDTQSLSHSSGTDRDPLQRMAGDSFHSRFPYSKSDPLPGHGKNGLDQRNANLAPCGADPDASWGMREYKIYPYDSLIVTNRIRVKLPKDVDRTRLERHLSPEEFQEVFGMSIEEFDRLALWKRNDLKKKALLF

SEQ ID NO: 15166 - protein, 573 aa, Homo sapiens
MSAVSQPQAAPSPLEKSPSTAILCNTCGNVCKGEVLRVQDKYFHIKCFVCKACGCDLAEGGFFVRQGEYICTLDYQRLYGTRCFSCDQFIEGEVVSALGKTYHPDCFVCAVCRLPFPPGDRVTFNGKECMCQKCSLPVSVGSSAHLSQGLRSCGGCGTEIKNGQALVALDKHWHLGCFKCKSCGKLLNAEYISKDGLPYCEADYHAKFGIRCDSCEKYITGRVLEAGEKHYHPSCALCVRCGQMFAEGEEMYLQGSSIWHPACRQAARTEDRNKETRTSSESIISVPASSTSGSPSRVIYAKLGGEILDYRDLAALPKSKAIYDIDRPDMISYSPYISHSAGDRQSYGEGDQDDRSYKQCRTSSPSSTGSVSLGRYTPTSRSPQHYSRPGSESGRSTPSLSVLSDSKPPPSTYQQAPRHFHVPDTGVKDNIYRKPPIYRQHAARRSDGEDGSLDQDNRKQKSSWLMLKGDADTRTNSPDLDTQSLSHSSGTDRDPLQRMAGDSFHSQYKIYPYDSLIVTNRIRVKLPKDVDRTRLERHLSPEEFQEVFGMSIEEFDRLALWKRNDLKKKALLF

SEQ ID NO: 15167 - protein, 470 aa, Homo sapiens
MSAVSQPQAAPSPLEKSPSTAILCNTCGNVCKGEVLRVQDKYFHIKCFVCKACGCDLAEGGFFVRQGEYICTLDYQRLYGTRCFSCDQFIEGEVVSALGKTYHPDCFVCAVCRLPFPPGDRVTFNGKECMCQKCSLPVSVGSSAHLSQGLRSCGGCGTEIKNGQALVALDKHWHLGCFKCKSCGKLLNAEYISKDGLPYCEADYHAKFGIRCDSCEKYITGRVLEAGEKHYHPSCALCVRCGQMFAEGEEMYLQGSSIWHPACRQAARTEDRNKETRTSSESIISVPASSTSGSPSRVIYAKLGGEILDYRDLAALPKSKAIYDIDRPDMISYSPYISHSAGDRQSYGESPQLLSPTPTEGDQDDRSYKQCRTSSPSSTGSVSLGRYTPTSRSPQHYSRPAARRSDGEDGSLDQDNRKQKSSWLMLKGDADTRTNSPDLDTQSLSHSSGTDRDPLQRMAGDSFHSREWFF

SEQ ID NO: 15168 - protein, 559 aa, Homo sapiens
MSAVSQPQAAPSPLEKSPSTAILCNTCGNVCKGEVLRVQDKYFHIKCFVCKACGCDLAEGGFFVRQGEYICTLDYQRLYGTRCFSCDQFIEGEVVSALGKTYHPDCFVCAVCRLPFPPGDRVTFNGKECMCQKCSLPVSVGSSAHLSQGLRSCGGCGTEIKNGQALVALDKHWHLGCFKCKSCGKLLNAEYISKDGLPYCEADYHAKFGIRCDSCEKYITGRVLEAGEKHYHPSCALCVRCGQMFAEGEEMYLQGSSIWHPACRQAARTEDRNKETRTSSESIISVPASSTSGSPSRVIYAKLGGEILDYRDLAALPKSKAIYDIDRPDMISYSPYISHSAGDRQSYGEGDQDDRSYKQCRTSSPSSTGSVSLGRYTPTSRSPQHYSRPAARRSDGEDGSLDQDNRKKSSWLMLKGDADTRTNSPDLDTQSLSHSSGTDRDPLQRMAGDSFHSRFPYSKSDPLPGHGKNGLDQRNANLAPCGADPDASWGMREYKIYPYDSLIVTNRIRVKLPKDVDRTRLERHLSPEEFQEVFGMSIEEFDRLALWKRNDLKKKALLF

SEQ ID NO: 15169 - protein, 521 aa, Homo sapiens
MSAVSQPQAAPSPLEKSPSTAILCNTCGNVCKGEVLRVQDKYFHIKCFVCKACGCDLAEGGFFVRQGEYICTLDYQRLYGTRCFSCDQFIEGEVVSALGKTYHPDCFVCAVCRLPFPPGDRVTFNGKECMCQKCSLPVSVGSSAHLSQGLRSCGGCGTEIKNGQALVALDKHWHLGCFKCKSCGKLLNAEYISKDGLPYCEADYHAKFGIRCDSCEKYITGRVLEAGEKHYHPSCALCVRCGQMFAEGEEMYLQGSSIWHPACRQAARTEDRNKETRTSSESIISVPASSTSGSPSRVIYAKLGGEILDYRDLAALPKSKAIYDIDRPDMISYSPYISHSAGDRQSYGEGDQDDRSYKQCRTSSPSSTGSVSLGRYTPTSRSPQHYSRPAARRSDGEDGSLDQDNRKQKSSWLMLKGDADTRTNSPDLDTQSLSHSSGTDRDPLQRMAGDSFHSQYKIYPYDSLIVTNRIRVKLPKDVDRTRLERHLSPEEFQEVFGMSIEEFDRLALWKRNDLKKKALLF

SEQ ID NO: 15170 - protein, 645 aa, Homo sapiens
MSAVSQPQAAPSPLEKSPSTAILCNTCGNVCKGEVLRVQDKYFHIKCFVCKACGCDLAEGGFFVRQGEYICTLDYQRLYGTRCFSCDQFIEGEVVSALGKTYHPDCFVCAVCRLPFPPGDRVTFNGKECMCQKCSLPVSVGSSAHLSQGLRSCGGCGTEIKNGQALVALDKHWHLGCFKCKSCGKLLNAEYISKDGLPYCEADYHAKFGIRCDSCEKYITGRVLEAGEKHYHPSCALCVRCGQMFAEGEEMYLQGSSIWHPACRQAARTEDRNKETRTSSESIISVPASSTSGSPSRVIYAKLGGEILDYRDLAALPKSKAIYDIDRPDMISYSPYISHSAGDRQSYGEGDQDDRSYKQCRTSSPSSTGSVSLGRYTPTSRSPQHYSRPAGTVSVGTSSCLSLSQHPSPTSVFRHHYIPYFRGSESGRSTPSLSVLSDSKPPPSTYQQAPRHFHVPDTGVKDNIYRKPPIYRQHAARRSDGEDGSLDQDNRKQKSSWLMLKGDADTRTNSPDLDTQSLSHSSGTDRDPLQRMAGDSFHSRFPYSKSDPLPGHGKNGLDQRNANLAPCGADPDASWGMREYKIYPYDSLIVTNRIRVKLPKDVDRTRLERHLSPEEFQEVFGMSIEEFDRLALWKRNDLKKKALLF

SEQ ID NO: 15171 - protein, 87 aa, Homo sapiens
MSQAEFEKAAEEVRHLKTKPSDEEMLFIYGHYKQATVGDINTERPGMLDFTGKAKWDAWNELKGTSKEDAMKAYINKVEELKKKYGI

SEQ ID NO: 15172 - protein, 104 aa, Homo sapiens
MWGDLWLLPPASANPGTGTEAEFEKAAEEVRHLKTKPSDEEMLFIYGHYKQATVGDINTERPGMLDFTGKAKWDAWNELKGTSKEDAMKAYINKVEELKKKYGI

SEQ ID NO: 15173 - protein, 88 aa, Homo sapiens
MPAFAEFEKAAEEVRHLKTKPSDEEMLFIYGHYKQATVGDINTERPGMLDFTGKAKWDAWNELKGTSKEDAMKAYINKVEELKKKYGI

SEQ ID NO: 15174 - protein, 129 aa, Homo sapiens
MSQHRAGRRGGVGKRGVRGRELGGQGKYGAGCSECGTRRIAARGEAEFEKAAEEVRHLKTKPSDEEMLFIYGHYKQATVGDINTERPGMLDFTGKAKWDAWNELKGTSKEDAMKAYINKVEELKKKYGI

SEQ ID NO: 15175 - protein, 148 aa, Homo sapiens
MERWGKGLHGLEERGDSVPIPKHRAGRRGGVGKRGVRGRELGGQGKYGAGCSECGTRRIAARGEAEFEKAAEEVRHLKTKPSDEEMLFIYGHYKQATVGDINTERPGMLDFTGKAKWDAWNELKGTSKEDAMKAYINKVEELKKKYGI

SEQ ID NO: 15176 - protein, 123 aa, Homo sapiens
MSQAEFEKAAEEVRHLKTKPSDEEMLFIYGHYKQATVGDINTGMQSGGWKGICSSKQAQQLRLEVPGNFTLKLPEALLFRWGMVMVPEVEKTMFRILSVSSSNRIQILVLEGLYWPSPAATLY

SEQ ID NO: 15177 - protein, 193 aa, Homo sapiens
MARARQEGSSPEPVEGLARDGPRPFPLGRLVPSAVSCGLCEPGLAAAPAAPTLLPAAYLCAPTAPPAVTAALGGSRWPGGPRSRPRGPRPDGPQPSLSLAEQHLESPVPSAPGALAGGPTQAAPGVRGEEEQWAREIGAQLRRMADDLNAQYERRRQEEQQRHRPSPWRVLYNLIMGLLPLPRGHRAPEMEPN

SEQ ID NO: 15178 - protein, 131 aa, Homo sapiens
MKFGMGSAQACPCQVPRAASTTWVPCQICGPQPSLSLAEQHLESPVPSAPGALAGGPTQAAPGVRGEEEQWAREIGAQLRRMADDLNAQYERRRQEEQQRHRPSPWRVLYNLIMGLLPLPRGHRAPEMEPN

SEQ ID NO: 15179 - protein, 421 aa, Homo sapiens
MAATLILEPAGRCCWDEPVRIAVRGLAPEQPVTLRASLRDEKGALFQAHARYRADTLGELDLERAPALGGSFAGLEPMGLLWALEPEKPLVRLVKRDVRTPLAVELEVLDGHDPDPGRLLCRVRHERYFLPPGVRREPVRAGRVRGTLFLPPEPGPFPGIVDMFGTGGGLLEYRASLLAGKGFAVMALAYYNYEDLPKTMETLHLEYFEEAVNYLLSHPEVKGPGVGLLGISKGGELCLSMASFLKGITAAVVINGSVANVGGTLRYKGETLPPVGVNRNRIKVTKDGYADIVDVLNSPLEGPDQKSFIPVERAESTFLFLVGQDDHNWKSEFYANEACKRLQAHGRRKPQIICYPETGHYIEPPYFPLCRASLHALVGSPIIWGGEPRAHAMAQVDAWKQLQTFFHKHLGGHEGTIPSKV

SEQ ID NO: 15180 - protein, 651 aa, Homo sapiens
MGDLSSLTPGGSMGLQVNRGSQSSLEGAPATAPEPHSLGILHASYSVSHRVRPWWDITSCRQQWTRQILKDVSLYVESGQIMCILGSSGSGKTTLLDAMSGRLGRAGTFLGEVYVNGRALRREQFQDCFSYVLQSDTLLSSLTVRETLHYTALLAIRRGNPGSFQKKVEAVMAELSLSHVADRLIGNYSLGGISTGERRRVSIAAQLLQDPKVMLFDEPTTGLDCMTANQIVVLLVELARRNRIVVLTIHQPRSELFQLFDKIAILSFGELIFCGTPAEMLDFFNDCGYPCPEHSNPFDFYMDLTSVDTQSKEREIETSKRVQMIESAYKKSAICHKTLKNIERMKHLKTLPMVPFKTKDSPGVFSKLGVLLRRVTRNLVRNKLAVITRLLQNLIMGLFLLFFVLRVRSNVLKGAIQDRVGLLYQFVGATPYTGMLNAVNLFPVLRAVSDQESQDGLYQKWQMMLAYALHVLPFSVVATMIFSSVCYWTLGLHPEVARFGYFSAALLAPHLIGEFLTLVLLGIVQNPNIVNSVVALLSIAGVLVGSGFLRNIQEMPIPFKIISYFTFQKYCSEILVVNEFYGLNFTCGSSNVSVTTNPMCAFTQGIQFIEKTCPGATSRFTMNFLILYSFIPALVILGIVVFKIRDHLISR

SEQ ID NO: 15181 - protein, 256 aa, Homo sapiens
MGLFLLFFVLRVRSNVLKGAIQDRVGLLYQFVGATPYTGMLNAVNLFPVLRAVSDQESQDGLYQKWQMMLAYALHVLPFSVVATMIFSSVCYWTLGLHPEVARFGYFSAALLAPHLIGEFLTLVLLGIVQNPNIVNSVVALLSIAGVLVGSGFLRNIQEMPIPFKIISYFTFQKYCSEILVVNEFYGLNFTCGSSNVSVTTNPMCAFTQGIQFIEKTCPGATSRFTMNFLILYSFIPALVILGIVVFKIRDHLISR

SEQ ID NO: 15182 - protein, 453 aa, Homo sapiens
MAGAGGGGCPAGGNDFQWCFSQVKGAIDEDVAEADIISTVEFNYSGDLLATGDKGGRVVIFQREQENKSRPHSRGEYNVYSTFQSHEPEFDYLKSLEIEEKINKIRWLPQQNAAHFLLSTNDKTIKLWKISERDKRAEGYNLKDEDGRLRDPFRITALRVPILKPMDLMVEASPRRIFANAHTYHINSISVNSDHETYLSADDLRINLWHLEITDRSFNIVDIKPANMEELTEVITAAEFHPHQCNVFVYSSSKGTIRLCDMRSSALCDRHSKFFEEPEDPSSRSFFSEIISSISDVKFSHSGRYMMTRDYLSVKVWDLNMESRPVETHQVHEYLRSKLCSLYENDCIFDKFECCWNGSDSAIMTGSYNNFFRMFDRDTRRDVTLEASRESSKPRASLKPRKVCTGGKRRKDEISVDSLDFNKKILHTAWHPVDNVIAVAATNNLYIFQDKIN

SEQ ID NO: 15183 - protein, 1214 aa, Homo sapiens
MGVDFDVKTFCHNLRATKPPYECPVETCRKVYKSYSGIEYHLYHYDHDNPPPPQQTPLRKHKKKGRQSRPANKQSPSPSEVSQSPGREVMSYAQAQRMVEVDLHGRVHRISIFDNLDVVSEDEEAPEEAPENGSNKENTETPAATPKSGKHKNKEKRKDSNHHHHHNVSASTTPKLPEVVYRELEQDTPDAPPRPTSYYRYIEKSAEELDEEVEYDMDEEDYIWLDIMNERRKTEGVSPIPQEIFEYLMDRLEKESYFESHNKGDPNALVDEDAVCCICNDGECQNSNVILFCDMCNLAVHQECYGVPYIPEGQWLCRRCLQSPSRAVDCALCPNKGGAFKQTDDGRWAHVVCALWIPEVCFANTVFLEPIDSIEHIPPARWKLTCYICKQRGSGACIQCHKANCYTAFHVTCAQQAGLYMKMEPVRETGANGTSFSVRKTAYCDIHTPPGSARRLPALSHSEGEEDEDEEEDEGKGWSSEKVKKAKAKSRIKMKKARKILAEKRAAAPVVSVPCIPPHRLSKITNRLTIQRKSQFMQRLHSYWTLKRQSRNGVPLLRRLQTHLQSQRNCDQVGRDSEDKNWALKEQLKSWQRLRHDLERARLLVELIRKREKLKRETIKVQQIAMEMQLTPFLILLRKTLEQLQEKDTGNIFSEPVPLSEVPDYLDHIKKPMDFFTMKQNLEAYRYLNFDDFEEDFNLIVSNCLKYNAKDTIFYRAAVRLREQGGAVLRQARRQAEKMGIDFETGMHIPHSLAGDEATHHTEDAAEEERLVLLENQKHLPVEEQLKLLLERLDEVNASKQSVGRSRRAKMIKKEMTALRRKLAHQRETGRDGPERHGPSSRGSLTPHPAACDKDGQTDSAAEESSSQETSKGLGPNMSSTPAHEVGRRTSVLFSKKNPKTAGPPKRPGRPPKNRESQMTPSHGGSPVGPPQLPIMSSLRQRKRGRSPRPSSSSDSDSDKSTEDPPMDLPANGFSGGNQPVKKSFLVYRNDCSLPRSSSDSESSSSSSSSAASDRTSTTPSKQGRGKPSFSRGTFPEDSSEDTSGTENEAYSVGTGRGVGHSMVRKSLGRGAGWLSEDEDSPLDALDLVWAKCRGYPSYPALIIDPKMPREGMFHHGVPIPVPPLEVLKLGEQMTQEAREHLYLVLFFDNKRTWQWLPRTKLVPLGVNQDLDKEKMLEGRKSNIRKSVQIAYHRALQHRSKVQGEQSSETSDSD

SEQ ID NO: 15184 - protein, 1220 aa, Homo sapiens
MGVDFDVKTFCHNLRATKPPYECPVETCRKVYKSYSGIEYHLYHYDHDNPPPPQQTPLRKHKKKGRQSRPANKQSPSPSEVSQSPGREVMSYAQAQRMVEVDLHGRVHRISIFDNLDVVSEDEEAPEEAPENGSNKENTETPAATPKSGKHKNKEKRKDSNHHHHHNVSASTTPKLPEVVYRELEQDTPDAPPRPTSYYRYIEKSAEELDEEVEYDMDEEDYIWLDIMNERRKTEGVSPIPQEIFEYLMDRLEKESYFESHNKGDPNALVDEDAVCCICNDGECQNSNVILFCDMCNLAVHQECYGVPYIPEGQWLCRRCLQSPSRAVDCALCPNKGGAFKQTDDGRWAHVVCALWIPEVCFANTVFLEPIDSIEHIPPARWKLTCYICKQRGSGACIQCHKANCYTAFHVTCAQQAGLYMKMEPVRETGANGTSFSVRKTAYCDIHTPPGSARRLPALSHSEGEEDEDEEEDEGKGWSSEKVKKAKAKSRIKMKKARKILAEKRAAAPVVSVPCIPPHRLSKITNRLTIQRKSQFMQRLHSYWTLKRQSRNGVPLLRRLQTHLQSQRNCDQVGRDSEDKNWALKEQLKSWQRLRHDLERARLLVELIRKREKLKRETIKVQQIAMEMQLTPFLILLRKTLEQLQEKDTGNIFSEPVPLSEVTELDEVPDYLDHIKKPMDFFTMKQNLEAYRYLNFDDFEEDFNLIVSNCLKYNAKDTIFYRAAVRLREQGGAVLRQARRQAEKMGIDFETGMHIPHSLAGDEATHHTEDAAEEERLVLLENQKHLPVEEQLKLLLERLDEVNASKQSVGRSRRAKMIKKEMTALRRKLAHQRETGRDGPERHGPSSRGSLTPHPAACDKDGQTDSAAEESSSQETSKGLGPNMSSTPAHEVGRRTSVLFSKKNPKTAGPPKRPGRPPKNRESQMTPSHGGSPVGPPQLPIMSSLRQRKRGRSPRPSSSSDSDSDKSTEDPPMDLPANGFSGGNQPVKKSFLVYRNDCSLPRSSSDSESSSSSSSSAASDRTSTTPSKQGRGKPSFSRGTFPEDSSEDTSGTENEAYSVGTGRGVGHSMVRKSLGRGAGWLSEDEDSPLDALDLVWAKCRGYPSYPALIIDPKMPREGMFHHGVPIPVPPLEVLKLGEQMTQEAREHLYLVLFFDNKRTWQWLPRTKLVPLGVNQDLDKEKMLEGRKSNIRKSVQIAYHRALQHRSKVQGEQSSETSDSD

SEQ ID NO: 15185 - protein, 1213 aa, Homo sapiens
MGVDFDVKTFCHNLRATKPPYECPVETCRKVYKSYSGIEYHLYHYDHDNPPPPQQTPLRKHKKKGRQSRPANKQSPSPSEVSQSPGREVMSYAQAQRMVEVDLHGRVHRISIFDNLDVVSEDEEAPEEAPENGSNKENTETPAATPKSGKHKNKEKRKDSNHHHHHNVSASTTPKLPEVVYRELEQDTPDAPPRPTSYYRYIEKSAEELDEEVEYDMDEEDYIWLDIMNERRKTEGVSPIPQEIFEYLMDRLEKESYFESHNKGDPNALVDEDAVCCICNDGECQNSNVILFCDMCNLAVHQECYGVPYIPEGQWLCRRCLQSPSRAVDCALCPNKGGAFKQTDDGRWAHVVCALWIPEVCFANTVFLEPIDSIEHIPPARWKLTCYICKQRGSGACIQCHKANCYTAFHVTCAQQAGLYMKMEPVRETGANGTSFSVRKTAYCDIHTPPGSARRLPALSHSEGEEDEDEEEDEGKGWSSEKVKKAKAKSRIKMKKARKILAEKRAAAPVVSVPCIPPHRLSKITNRLTIQRKSQFMQRLHSYWTLKRQSRNGVPLLRRLQTHLQSQRNCDQVGRDSEDKNWALKEQLKSWQRLRHDLERARLLVELIRKREKLKRETIKVQQIAMEMQLTPFLILLRKTLEQLQEKDTGNIFSEPVPLSEVPDYLDHIKKPMDFFTMKQNLEAYRYLNFDDFEEDFNLIVSNCLKYNAKDTIFYRAAVRLREQGGAVLRQARRQAEKMGIDFETGMHIPHSLAGDEATHHTEDAEEERLVLLENQKHLPVEEQLKLLLERLDEVNASKQSVGRSRRAKMIKKEMTALRRKLAHQRETGRDGPERHGPSSRGSLTPHPAACDKDGQTDSAAEESSSQETSKGLGPNMSSTPAHEVGRRTSVLFSKKNPKTAGPPKRPGRPPKNRESQMTPSHGGSPVGPPQLPIMSSLRQRKRGRSPRPSSSSDSDSDKSTEDPPMDLPANGFSGGNQPVKKSFLVYRNDCSLPRSSSDSESSSSSSSSAASDRTSTTPSKQGRGKPSFSRGTFPEDSSEDTSGTENEAYSVGTGRGVGHSMVRKSLGRGAGWLSEDEDSPLDALDLVWAKCRGYPSYPALIIDPKMPREGMFHHGVPIPVPPLEVLKLGEQMTQEAREHLYLVLFFDNKRTWQWLPRTKLVPLGVNQDLDKEKMLEGRKSNIRKSVQIAYHRALQHRSKVQGEQSSETSDSD

SEQ ID NO: 15186 - protein, 1119 aa, Homo sapiens
MGVDFDVKTFCHNLRATKPPYECPVETCRKVYKSYSGIEYHLYHYDHDNPPPPQQTPLRKHKKKGRQSRPANKQSPSPSEVSQSPGREVMSYAQAQRMVEVDLHGRVHRISIFDNLDVVSEDEEAPEEAPENGSNKENTETPAATPKSGKHKNKEKRKDSNHHHHHNVSASTTPKLPEVVYRELEQDTPDAPPRPTSYYRYIEKSAEELDEEVEYDMDEEDYIWLDIMNERRKTEGVSPIPQEIFEYLMDRLEKESYFESHNKGDPNALVDEDAVCCICNDGECQNSNVILFCDMCNLAVHQECYGVPYIPEGQWLCRRCLQSPSRAVDCALCPNKGGAFKQTDDGRWAHVVCALWIPEVCFANTVFLEPIDSIEHIPPARWKLTCYICKQRGSGACIQCHKANCYTAFHVTCAQQAGLYMKMEPVRETGANGTSFSVRKTAYCDIHTPPGSARRLPALSHSEGEEDEDEEEDEGKGWSSEKVKKAKAKSRIKMKKARKILAEKRAAAPVVSVPCIPPHRLSKITNRLTIQRKSQFMQRLHSYWTLKRQSRNGVPLLRRLQTHLQSQRNCDQVGRDSEDKNWALKEQLKSWQRLRHDLERARLLVELIRKREKLKRETIKVQQIAMEMQLTPFLILLRKTLEQLQEKDTGNIFSEPVPLSEVPDYLDHIKKPMDFFTMKQNLEAYRYLNFDDFEEDFNLIVSNCLKYNAKDTIFYRAAVRLREQGGAVLRQARRQAEKMGIDFETGMHIPHSLAGDEATHHTEDAAEEERLVLLENQKHLPVEEQLKLLLERLDEVNASKQSVGRSRRAKMIKKEMTALRRKLAHQRETGRDGPERHGPSSRGSLTPHPAACDKDGQTDSAAEESSSQETSKDLPANGFSGGNQPVKKSFLVYRNDCSLPRSSSDSESSSSSSSSAASDRTSTTPSKQGRGKPSFSRGTFPEDSSEDTSGTENEAYSVGTGRGVGHSMVRKSLGRGAGWLSEDEDSPLDALDLVWAKCRGYPSYPALIIDPKMPREGMFHHGVPIPVPPLEVLKLGEQMTQEAREHLYLVLFFDNKRTWQWLPRTKLVPLGVNQDLDKEKMLEGRKSNIRKSVQIAYHRALQHRSKVQGEQSSETSDSD

SEQ ID NO: 15187 - protein, 483 aa, Homo sapiens
MSNKLLSPHPHSVVLRSEFKMASSPAVLRASRLYQWSLKSSAQFLGSPQLRQVGQIIRVPARMAATLILEPAGRCCWDEPVRIAVRGLAPEQPVTLRASLRDEKGALFQAHARYRADTLGELDLERAPALGGSFAGLEPMGLLWALEPEKPLVRLVKRDVRTPLAVELEVLDGHDPDPGRLLCQTRHERYFLPPGVRREPVRVGRVRGTLFLPPEPGPFPGIVDMFGTGGGLLEYRASLLAGKGFAVMALAYYNYEDLPKTMETLHLEYFEEAMNYLLSHPEVKGPGVGLLGISKGGELCLSMASFLKGITAAVVINGSVANVGGTLHYKGETLPPVGVNRNRIKVTKDGYADIVDVLNSPLEGPDQKSFIPVERAESTFLFLVGQDDHNWKSEFYANEACKRLQAHGRRKPQIICYPETGHYIEPPYFPLCRASLHALVGSPIIWGGEPRAHAMAQVDAWKQLQTFFHKHLGGHEGTIPSKV

SEQ ID NO: 15188 - protein, 301 aa, Homo sapiens
MASSPAVLRASRLYQWSLKSSAQFLGSPQLRQEPGPFPGIVDMFGTGGGLLEYRASLLAGKGFAVMALAYYNYEDLPKTMETLHLEYFEEAMNYLLSHPEVKGPGVGLLGISKGGELCLSMASFLKGITAAVVINGSVANVGGTLHYKGETLPPVGVNRNRIKVTKDGYADIVDVLNSPLEGPDQKSFIPVERAESTFLFLVGQDDHNWKSEFYANEACKRLQAHGRRKPQIICYPETGHYIEPPYFPLCRASLHALVGSPIIWGGEPRAHAMAQVDAWKQLQTFFHKHLGGHEGTIPSKV

SEQ ID NO: 15189 - protein, 319 aa, Homo sapiens
MSSPQAPEDGQGCGDRGDPPGDLRSVLVTTVLNLEPLDEDLFRGRHYWVPAKRLFGGQIVGQALVAAAKSVSEDVHVHSLHCYFVRAGDPKLPVLYQVERTRTGSSFSVRSVKAVQHGKPIFICQASFQQAQPSPMQHQFSMPTVPPPEELLDCETLIDQYLRDPNLQKRYPLALNRIAAQEVPIEIKPVNPSPLSQLQRMEPKQMFWVRARGYIGEGDMKMHCCVAAYISDYAFLGTALLPHQWQHKVHFMVSLDHSMWFHAPFRADHWMLYECESPWAGGSRGLVHGRLWRQDGVLAVTCAQEGVIRVKPQVSESKL

SEQ ID NO: 15190 - protein, 665 aa, Homo sapiens
MYRRSYVFQTRKEQYEHADEASRAAEPERPADEGWAGATSLAALQGLGERVAAHVQRARALEQRHAGLRRQLDAFQRLGELAGPEDALARQVESNRQRVRDLEAERARLERQGTEAQRALDEFRSKYENECECQLLLKEMLERLNKEADEALLHNLRLQLEAQFLQDDISAAKDRHKKNLLEVQTYISILQQIIHTTPPASIVTSGMREEKLLTEREVAALRSQLEEGREVLSHLQAQRVELQAQTTTLEQAIKSAHECYDDEIQLYNEQIETLRKEIEETERVLEKSSYDCRQLAVAQQTLKNELDRYHRIIEIEGNRLTSAFIETPIPLFTQSHGVSLSTGSGGKDLTRALQDITAAKPRQKALPKNVPRRKEIITKDKTNGALEDAPLKGLEDTKLVQVVLKEESESKFESESKEVSPLTQEGAPEDVPDGGQISKGFGKLYRKVKEKVRSPKEPETPTELYTKERHVLVTGDANYVDPRFYVSSITAKGGVAVSVAEDSVLYDGQVEPSPESPKPPLENGQVGLQEKEDGQPIDQQPIDKEIEPDGAELEGPEEKREGEERDEESRRPCAMVTPGAEEPSIPEPPKPAADQDGAEVLGTRSRSLPEKGPPKALAYKTVEVVESIEKISTESIQTYEETAVIVETMIGKTKSDKKKSGEKSS

SEQ ID NO: 15191 - protein, 540 aa, Homo sapiens
MYENECECQLLLKEMLERLNKEADEALLHNLRLQLEAQFLQDDISAAKDRHKKNLLEVQTYISILQQIIHTTPPASIVTSGMREEKLLTEREVAALRSQLEEGREVLSHLQAQRVELQAQTTTLEQAIKSAHECYDDEIQLYNEQIETLRKEIEETERVLEKSSYDCRQLAVAQQTLKNELDRYHRIIEIEGNRLTSAFIETPIPLFTQSHGVSLSTGSGGKDLTRALQDITAAKPRQKALPKNVPRRKEIITKDKTNGALEDAPLKGLEDTKLVQVVLKEESESKFESESKEVSPLTQEGAPEDVPDGGQISKGFGKLYRKVKEKVRSPKEPETPTELYTKERHVLVTGDANYVDPRFYVSSITAKGGVAVSVAEDSVLYDGQVEPSPESPKPPLENGQVGLQEKEDGQPIDQQPIDKEIEPDGAELEGPEEKREGEERDEESRRPCAMVTPGAEEPSIPEPPKPAADQDGAEVLGTRSRSLPEKGPPKALAYKTVEVVESIEKISTESIQTYEETAVIVETMIGKTKSDKKKSGEKSS

SEQ ID NO: 15192 - protein, 526 aa, Homo sapiens
MLERLNKEADEALLHNLRLQLEAQFLQDDISAAKDRHKKNLLEVQTYISILQQIIHTTPPASIVTSGMREEKLLTEREVAALRSQLEEGREVLSHLQAQRVELQAQTTTLEQAIKSAHECYDDEIQLYNEQIETLRKEIEETERVLEKSSYDCRQLAVAQQTLKNELDRYHRIIEIEGNRLTSAFIETPIPLFTQSHGVSLSTGSGGKDLTRALQDITAAKPRQKALPKNVPRRKEIITKDKTNGALEDAPLKGLEDTKLVQVVLKEESESKFESESKEVSPLTQEGAPEDVPDGGQISKGFGKLYRKVKEKVRSPKEPETPTELYTKERHVLVTGDANYVDPRFYVSSITAKGGVAVSVAEDSVLYDGQVEPSPESPKPPLENGQVGLQEKEDGQPIDQQPIDKEIEPDGAELEGPEEKREGEERDEESRRPCAMVTPGAEEPSIPEPPKPAADQDGAEVLGTRSRSLPEKGPPKALAYKTVEVVESIEKISTESIQTYEETAVIVETMIGKTKSDKKKSGEKSS

SEQ ID NO: 15193 - protein, 340 aa, Homo sapiens
MRKELQLSLSVTLLLVCGFLYQFTLKSSCLFCLPSFKSHQGLEALLSHRRGIVFLETSERMEPPHLVSCSVESAAKIYPEWPVVFFMKGLTDSTPMPSNSTYPAFSFLSAIDNVFLFPLDMKRLLEDTPLFSWYNQINASAERNWLHISSDASRLAIIWKYGGIYMDTDVISIRPIPEENFLAAQASRYSSNGIFGFLPHHPFLWECMENFVEHYNSAIWGNQGPELMTRMLRVWCKLEDFQEVSDLRCLNISFLHPQRFYPISYREWRRYYEVWDTEPSFNVSYALHLWNHMNQEGRAVIRGSNTLVENLYRKHCPRTYRDLIKGPEGSVTGELGPGNK

SEQ ID NO: 15194 - protein, 493 aa, Homo sapiens
MARAPLGVLLLLGLLGRGVGKNEELRLYHHLFNNYDPGSRPVREPEDTVTISLKVTLTNLISLNEKEETLTTSVWIGIDWQDYRLNYSKDDFGGIETLRVPSELVWLPEIVLENNIDGQFGVAYDANVLVYEGGSVTWLPPAIYRSVCAVEVTYFPFDWQNCSLIFRSQTYNAEEVEFTFAVDNDGKTINKIDIDTEAYTENGEWAIDFCPGVIRRHHGGATDGPGETDVIYSLIIRRKPLFYVINIIVPCVLISGLVLLAYFLPAQAGGQKCTVSINVLLAQTVFLFLIAQKIPETSLSVPLLGRFLIFVMVVATLIVMNCVIVLNVSQRTPTTHAMSPRLRHVLLELLPRLLGSPPPPEAPRAASPPRRASSVGLLLRAEELILKKPRSELVFEGQRHRQGTWTAAFCQSLGAAAPEVRCCVDAVNFVAESTRDQEATGEEVSDWVRMGNALDNICFWAALVLFSVGSSLIFLGAYFNRVPDLPYAPCIQP

SEQ ID NO: 15195 - protein, 142 aa, Homo sapiens
MGAPTLPPAWQPFLKDHRISTFKNWPFLEGCACTPERMAEAGFIHCPTENEPDLAQCFFCFKELEGWEPDDDPIEEHKKHSSGCAFLSVKKQFEELTLGEFLKLDRERAKNKIAKETNNKKKEFEETAKKVRRAIEQLAAMD

SEQ ID NO: 15196 - protein, 165 aa, Homo sapiens
MGAPTLPPAWQPFLKDHRISTFKNWPFLEGCACTPERMAEAGFIHCPTENEPDLAQCFFCFKELEGWEPDDDPIGPGTVAYACNTSTLGGRGGRITREEHKKHSSGCAFLSVKKQFEELTLGEFLKLDRERAKNKIAKETNNKKKEFEETAKKVRRAIEQLAAMD

SEQ ID NO: 15197 - protein, 137 aa, Homo sapiens
MGAPTLPPAWQPFLKDHRISTFKNWPFLEGCACTPERMAEAGFIHCPTENEPDLAQCFFCFKELEGWEPDDDPMQRKPTIRRKNLRKLRRKCAVPSSSWLPWIEASGRSCLVPEWLHHFQGLFPGATSLPVGPLAMS

SEQ ID NO: 15198 - protein, 120 aa, Homo sapiens
MGAPTLPPAWQPFLKDHRISTFKNWPFLEGCACTPERMAEAGFIHCPTENEPDLAQCFFCFKELEGWEPDDDPIEEHKKHSSGCAFLSVKKQFEELTLGEFLKLDRERAKNKIERALLAE

SEQ ID NO: 15199 - protein, 117 aa, Homo sapiens
MGAPTLPPAWQPFLKDHRISTFKNWPFLEGCACTPERMAEAGFIHCPTENEPDLAQCFFCFKELEGWEPDDDPIEEHKKHSSGCAFLSVKKQFEELTLGEFLKLVRETLPPPRSFIR

SEQ ID NO: 15200 - protein, 78 aa, Homo sapiens
MGAPTLPPAWQPFLKDHRISTFKNWPFLEGCACTPERMAEAGFIHCPTENEPDLAQCFFCFKELEGWEPDDDPMRELC

SEQ ID NO: 15201 - protein, 74 aa, Homo sapiens
MGAPTLPPAWQPFLKDHRISTFKNWPFLEGCACTPERMAEAGFIHCPTENEPDLAQCFFCFKELEGWEPDDDPM

SEQ ID NO: 15202 - protein, 547 aa, Homo sapiens
MRALTVQRVKFAMDLPLLKRAGQDLAEKTKNFVSRSLVIGEVLSMADMATGVKCGIIYWLFGGAIRNLGSPEHVTKWFQPLQEQKYTGMFAMTERGHGSNARGIQTEATFDLSAQEFVIDTPCENAEKMYIGNAMYGNYAAVFAQLIIDGRSQGPHCFIVPVRDENGSLYPGVTAIDMMYKEGLHGVDNGILIFDKVRIPRENLLDKFGSVAPDGQYHSPIRNKSARFNAMLAALTPSRLAVAFQAMGAMKLGLTIAIRYSHSRRQFGPKTKEEVKIIEHQTQTLRLMPHLATALALTFVSRYAGALLDEDVFQGKELVNSRSLQALVAGLKAYSTWENIRCLQDCRECTGGMGYMMENRISGLKCDTDVFATFEGDDVVMLQVVGRELLAQYTKQYEEKPLFGLLQNWAESVGDKLRTSFLAFNMDTVDDLAFLLKAVKFRERVLQRGLVARIYYKVKTKKEDFFHAWNSCLHHVASLSLAHTHRVTLEQFSLAVKSCPDQEDQTLLMKFCLLYGTKLVFQERAWYLEHKYLTPMASTRIRNQERC

SEQ ID NO: 15203 - protein, 517 aa, Homo sapiens
MRALTVQRVKFAMDLPLLKRAGQDLAEKTKNFVSRSLVIGEVLSMADMATGVKCGIIYWLFGGAIRNLGSPEHVTKWFQPLQEQKYTGMFAMTERGHGSNARGIQTEATFDLSAQEFVIDTPCENAEKMYIGNAMYGNYAAVFAQLIIDGRSQGPHCFIVPVRDENGSLYPGVTAIDMMYKEGLHGVDNGILIFDKVRIPRENLLDKFGSVAPDGQYHSPIRNKSARFNAMLAALTPSRLAVAFQAMGAMKLGLTIAIRYSHSRRQFGPKTKEEVKIIEHQTQTLRLMPHLATALALTFVSRYAGALLDEDVFQGKELVNSRSLQALVAGLKAYSTWENIRCLQDCRECTGGMVVGRELLAQYTKQYEEKPLFGLLQNWAESVGDKLRTSFLAFNMDTVDDLAFLLKAVKFRERVLQRGLVARIYYKVKTKKEDFFHAWNSCLHHVASLSLAHTHRVTLEQFSLAVKSCPDQEDQTLLMKFCLLYGTKLVFQERAWYLEHKYLTPMASTRIRNQERC

SEQ ID NO: 15204 - protein, 279 aa, Homo sapiens
MRALTVQRVKFAMDLPLLKRAGQDLAEKTKNFVSRSLVIGEVLSMADMATGVKCGIIYWLFGGAIRNLGSPEHVTKWFQPLQEQKYTGMFAMTERGHGSNARGIQTEATFDLSAQEFVIDTPCENAEKMYIGNAMYGNYAAVFAQLIIDGRSQGPHCFIVPVRDENGSLYPGVTAIDMMYKEGLHGVDNGILIFDKVRIPRENLLDKFGSVAPDGQYHSPIRNKSARFNAMLAALTPSRLAVAFQAMGAMKLGLTIAIRYSHRSRIISQNCCSAPAGLY

SEQ ID NO: 15205 - protein, 580 aa, Homo sapiens
MRALTVQRVKFAMDLPLLKRAGQDLAEKTKNFVSRSLVIGEVLSMADMATGVKCGIIYWLFGGAIRNLGSPEHVTKWFQPLQEQKYTGMFAMTERGHGSNARGIQTEATFDLSAQEFVIDTPCENAEKMYIGNAMYGNYAAVFAQLIIDGRSQGPHCFIVPVRDENGSLYPGVTAIDMMYKEGLHGVDNGILIFDKVRIPRENLLDKFGSVAPDGQYHSPIRNKSARFNAMLAALTPSRLAVAFQAMGAMKLGLTIAIRYSHSRRQFGPKTKEEVKIIEHQTQTLRLMPHLATALALTFVSRYAGALLDEDVFQGKELVNSRSLQALVAGLKAYSTWENIRCLQDCRECTGGMVVGRELLAQYTKQYEEKPLFGLLQNWAESVGDKLRTSFLAFNMDTVDDLAFLLKAVKFRERVLQRGLVARIYYKVKTKKEDFFHAWNSCLHHVASLSLAHTHRVTLEQFSLAVKSCPDQEDQTLLMKFCLLYGTKLVFQERAWYLEHKYLTPMASTRIRNQLLDLCDSVKDDARRVISTFNIPHTYLHAPIAGISNPRAAWAFYPAPLQPRPREEARSRRPKLGAKL

SEQ ID NO: 15206 - protein, 503 aa, Homo sapiens
MPNVAETERSNDSGNGEHKSERKSPEENLQGAVKSFCTSASGAPLGPKGDGHYPWSCPVTHTREKIYAICSDYAFLNQATSIYKTPNPSRSPCLPDSTSLSAGNNSSRYIGIPTSTSEIIYNEENSLENLSNSLGKLPLAWEIDKSEFDGVTTNSKHKSGNAKKQVSKRKTSDKKGRYQKECPQHSPLEDIKQRKVLDLRRWYCISRPQYKTSCGISSLISCWNFLYSTMGAGNLPPITQEEALHILGFQPPFEDIRFGPFTGNTTLMRWFRQINDHFHVKGCSYVLYKPHGKNKTAGETASGALSKLTRGLKDESLAYIYHCQNHYFCPIGFEATPVKANKAFSRGPLSPQEVEYWILIGESSRKHPAIHCKKWADIVTDLNTQNPEYLDIRHLERGLQYRKTKKVGGNLHCIIAFQRLNWQRFGLWNFPFGTIRQESQPPTHAQGIAKSESEDNISKKQHGRLGRSFSASFHQDSAWKKMSSIHERRNSGYQGYSDYDGND

SEQ ID NO: 15207 - protein, 281 aa, Homo sapiens
MGAGNLPPITQEEALHILGFQPPFEDIRFGPFTGNTTLMRWFRQINDHFHVKGCSYVLYKPHGKNKTAGETASGALSKLTRGLKDESLAYIYHCQNHYFCPIGFEATPVKANKAFSRGPLSPQEVEYWILIGESSRKHPAIHCKKWADIVTDLNTQNPEYLDIRHLERGLQYRKTKKPTFFSSQVGGNLHCIIAFQRLNWQRFGLWNFPFGTIRQESQPPTHAQGIAKSESEDNISKKQHGRLGRSFSASFHQDSAWKKMSSIHERRNSGYQGYSDYDGND

SEQ ID NO: 15208 - protein, 323 aa, Homo sapiens
MPVHSRGDKKETNHHDEMEVDYAENEGSSSEDEDTESSSVSEDGDSSEMDDEDCERRRMECLDEMSNLEKQFTDLKDQLYKERLSQVDAKLQEVIAGKAPEYLEPLATLQENMQIRTKVAGIYRELCLESVKNKYECEIQASRQHCESEKLLLYDTVQSELEEKIRRLEEDRHSIDITSELWNDELQSRKKRKDPFSPDKKKPVVVSGPYIVYMLQDLDILEDWTTIRKAMATLGPHRVKTEPPVKLEKHLHSARSEEGRLYYDGEWYIRGQTICIDKKDECPTSAVITTINHDEVWFKRPDGSKSKLYISQLQKGKYSIKHS

SEQ ID NO: 15209 - protein, 275 aa, Homo sapiens
MDDEDCERRRMECLDEMSNLEKQFTDLKDQLYKERLSQVDAKLQEVIAGKAPEYLEPLATLQENMQIRTKVAGIYRELCLESVKNKYECEIQASRQHCESEKLLLYDTVQSELEEKIRRLEEDRHSIDITSELWNDELQSRKKRKDPFSPDKKKPVVVSGPYIVYMLQDLDILEDWTTIRKAMATLGPHRVKTEPPVKLEKHLHSARSEEGRLYYDGEWYIRGQTICIDKKDECPTSAVITTINHDEVWFKRPDGSKSKLYISQLQKGKYSIKHS

SEQ ID NO: 15210 - protein, 1306 aa, Homo sapiens
MGAASGRRGPGLLLPLPLLLLLPPQPALALDPGLQPGNFSADEAGAQLFAQSYNSSAEQVLFQSVAASWAHDTNITAENARRQEEAALLSQEFAEAWGQKAKELYEPIWQNFTDPQLRRIIGAVRTLGSANLPLAKRQQYNALLSNMSRIYSTAKVCLPNKTATCWSLDPDLTNILASSRSYAMLLFAWEGWHNAAGIPLKPLYEDFTALSNEAYKQDGFTDTGAYWRSWYNSPTFEDDLEHLYQQLEPLYLNLHAFVRRALHRRYGDRYINLRGPIPAHLLGDMWAQSWENIYDMVVPFPDKPNLDVTSTMLQQGWNATHMFRVAEEFFTSLELSPMPPEFWEGSMLEKPADGREVVCHASAWDFYNRKDFRIKQCTRVTMDQLSTVHHEMGHIQYYLQYKDLPVSLRRGANPGFHEAIGDVLALSVSTPEHLHKIGLLDRVTNDTESDINYLLKMALEKIAFLPFGYLVDQWRWGVFSGRTPPSRYNFDWWYLRTKYQGICPPVTRNETHFDAGAKFHVPNVTPYIRYFVSFVLQFQFHEALCKEAGYEGPLHQCDIYRSTKAGAKLRKVLQAGSSRPWQEVLKDMVGLDALDAQPLLKYFQPVTQWLQEQNQQNGEVLGWPEYQWHPPLPDNYPEGIDLVTDEAEASKFVEEYDRTSQVVWNEYAEANWNYNTNITTETSKILLQKNMQIANHTLKYGTQARKFDVNQLQNTTIKRIIKKVQDLERAALPAQELEEYNKILLDMETTYSVATVCHPNGSCLQLEPDLTNVMATSRKYEDLLWAWEGWRDKAGRAILQFYPKYVELINQAARLNGYVDAGDSWRSMYETPSLEQDLERLFQELQPLYLNLHAYVRRALHRHYGAQHINLEGPIPAHLLGNMWAQTWSNIYDLVVPFPSAPSMDTTEAMLKQGWTPRRMFKEADDFFTSLGLLPVPPEFWNKSMLEKPTDGREVVCHASAWDFYNGKDFRIKQCTTVNLEDLVVAHHEMGHIQYFMQYKDLPVALREGANPGFHEAIGDVLALSVSTPKHLHSLNLLSSEGGSDEHDINFLMKMALDKIAFIPFSYLVDQWRWRVFDGSITKENYNQEWWSLRLKYQGLCPPVPRTQGDFDPGAKFHIPSSVPYIRYFVSFIIQFQFHEALCQAAGHTGPLHKCDIYQSKEAGQRLATAMKLGFSRPWPEAMQLITGQPNMSASAMLSYFKPLLDWLRTENELHGEKLGWPQYNWTPNSARSEGPLPDSGRVSFLGLDLDAQQARVGQWLLLFLGIALLVATLGLSQRLFSIRHRSLHRHSHGPQFGSEVELRHS

SEQ ID NO: 15211 - protein, 1145 aa, Homo sapiens
MGAASGRRGPGLLLPLPLLLLLPPQPALALDPGLQPGNFSADEAGAQLFAQSYNSSAEQVLFQSVAASWAHDTNITAENARRQEEAALLSQEFAEAWGQKAKELYEPIWQNFTDPQLRRIIGAVRTLGSANLPLAKRQQYNALLSNMSRIYSTAKVCLPNKTATCWSLDPDLTNILASSRSYAMLLFAWEGWHNAAGIPLKPLYEDFTALSNEAYKQDGFTDTGAYWRSWYNSPTFEDDLEHLYQQLEPLYLNLHAFVRRALHRRYGDRYINLRGPIPAHLLGDMWAQSWENIYDMVVPFPDKPNLDVTSTMLQQGWNATHMFRVAEEFFTSLELSPMPPEFWEGSMLEKPADGREVVCHASAWDFYNRKDFRIKQCTRVTMDQLSTVHHEMGHIQYYLQYKDLPVSLRRGANPGFHEAIGDVLALSVSTPEHLHKIGLLDRVTNDTESDINYLLKMALEKIAFLPFGYLVDQWRWGVFSGRTPPSRYNFDWWYLRTKYQGICPPVTRNETHFDAGAKFHVPNVTPYIRYFVSFVLQFQFHEALCKEAGYEGPLHQCDIYRSTKAGAKLRKVLQAGSSRPWQEVLKDMVGLDALDAQPLLKYFQPVTQWLQEQNQQNGEVLGWPEYQWHPPLPDNYPEGIDLVTDEAEASKFVEEYDRTSQVVWNEYAEANWNYNTNITTETSKILLQKNMQIANHTLKYGTQARKFDVNQLQNTTIKRIIKKVQDLERAALPAQELEEYNKILLDMETTYSVATVCHPNGSCLQLEPDLTNVMATSRKYEDLLWAWEGWRDKAGRAILQFYPKYVELINQAARLNGYVDAGDSWRSMYETPSLEQDLERLFQELQPLYLNLHAYVRRALHRHYGAQHINLEGPIPAHLLGNMWAQTWSNIYDLVVPFPSAPSMDTTEAMLKQGWTPRRMFKEADDFFTSLGLLPVPPEFWNKSMLEKPTDGREVVCHASAWDFYNGKDFRIKQCTTVNLEDLVVAHHEMGHIQYFMQYKDLPVALREGANPGFHEAIGDVLALSVSTPKHLHSLNLLSSEGGSDEHDINFLMKMALDKIAFIPFSYLVDQWRWRVFDGSITKENYNQEWWSLRLKYQGLCPPVPRTQGDFDPGAKFHIPSSVPYIRYFVSFIIQFHPFSQHTAA

SEQ ID NO: 15212 - protein, 732 aa, Homo sapiens
MGQGWATAGLPSLLFLLLCYGHPLLVPSQEASQQVTVTHGTSSQATTSSQTTTHQATAHQTSAQSPNLVTDEAEASKFVEEYDRTSQVVWNEYAEANWNYNTNITTETSKILLQKNMQIANHTLKYGTQARKFDVNQLQNTTIKRIIKKVQDLERAALPAQELEEYNKILLDMETTYSVATVCHPNGSCLQLEPDLTNVMATSRKYEDLLWAWEGWRDKAGRAILQFYPKYVELINQAARLNGYVDAGDSWRSMYETPSLEQDLERLFQELQPLYLNLHAYVRRALHRHYGAQHINLEGPIPAHLLGNMWAQTWSNIYDLVVPFPSAPSMDTTEAMLKQGWTPRRMFKEADDFFTSLGLLPVPPEFWNKSMLEKPTDGREVVCHASAWDFYNGKDFRIKQCTTVNLEDLVVAHHEMGHIQYFMQYKDLPVALREGANPGFHEAIGDVLALSVSTPKHLHSLNLLSSEGGSDEHDINFLMKMALDKIAFIPFSYLVDQWRWRVFDGSITKENYNQEWWSLRLKYQGLCPPVPRTQGDFDPGAKFHIPSSVPYIRYFVSFIIQFQFHEALCQAAGHTGPLHKCDIYQSKEAGQRLATAMKLGFSRPWPEAMQLITGQPNMSASAMLSYFKPLLDWLRTENELHGEKLGWPQYNWTPNSARSEGPLPDSGRVSFLGLDLDAQQARVGQWLLLFLGIALLVATLGLSQRLFSIRHRSLHRHSHGPQFGSEVELRHS

SEQ ID NO: 15213 - protein, 691 aa, Homo sapiens
MGQGWATAGLPSLLFLLLCYGHPLLVPSQEASQQVTVTHGTSSQATTSSQTTTHQATAHQTSAQSPNLVTDEAEASKFVEEYDRTSQVVWNEYAEANWNYNTNITTETSKILLQKNMQIANHTLKYGTQARKFDVNQLQNTTIKRIIKKVQDLERAALPAQELEEYNKILLDMETTYSVATVCHPNGSCLQLEPDLTNVMATSRKYEDLLWAWEGWRDKAGRAILQFYPKYVELINQAARLNGYVDAGDSWRSMYETPSLEQDLERLFQELQPLYLNLHAYVRRALHRHYGAQHINLEGPIPAHLLGNMWAQTWSNIYDLVVPFPSAPSMDTTEAMLKQGWTPRRMFKEADDFFTSLGLLPVPPEFWNKSMLEKPTDGREVVCHASAWDFYNGKDFRIKQCTTVNLEDLVVAHHEMGHIQYFMQYKDLPVALREGANPGFHEAIGDVLALSVSTPKHLHSLNLLSSEGGSDEHDINFLMKMALDKIAFIPFSYLVDQWRWRVFDGSITKENYNQEWWSLRLKYQGLCPPVPRTQGDFDPGAKFHIPSSVPYIRTAMKLGFSRPWPEAMQLITGQPNMSASAMLSYFKPLLDWLRTENELHGEKLGWPQYNWTPNSARSEGPLPDSGRVSFLGLDLDAQQARVGQWLLLFLGIALLVATLGLSQRLFSIRHRSLHRHSHGPQFGSEVELRHS

SEQ ID NO: 15214 - protein, 84 aa, Homo sapiens
MGRTPTAVQVKSFTKQGQQRRVCRDLPLKNTKNGLSPGMRTCFLYLRFFPCLSWMSLKWTQAVHCARNIVLSFMLLLLLLNYNM

SEQ ID NO: 15215 - protein, 986 aa, Homo sapiens
MPGVARLPLLLGLLLLPRPGRPLDLADYTYDLAEEDDSEPLNYKDPCKAAAFLGDIALDEEDLRAFQVQQAVDLRRHTARKSSIKAAVPGNTSTPSCQSTNGQPQRGACGRWRGRSRSRRAATSRPERVWPDGVIPFVIGGNFTGSQRAVFRQAMRHWEKHTCVTFLERTDEDSYIVFTYRPCGCCSYVGRRGGGPQAISIGKNCDKFGIVVHELGHVVGFWHEHTRPDRDRHVSIVRENIQPGQEYNFLKMEPQEVESLGETYDFDSIMHYARNTFSRGIFLDTIVPKYEVNGVKPPIGQRTRLSKGDIAQARKLYKCPACGETLQDSTGNFSSPEYPNGYSAHMHCVWRISVTPGEKIILNFTSLDLYRSRLCWYDYVEVRDGFWRKAPLRGRFCGSKLPEPIVSTDSRLWVEFRSSSNWVGKGFFAVYEAICGGDVKKDYGHIQSPNYPDDYRPSKVCIWRIQVSEGFHVGLTFQSFEIERHDSCAYDYLEVRDGHSESSTLIGRYCGYEKPDDIKSTSSRLWLKFVSDGSINKAGFAVNFFKEVDECSRPNRGGCEQRCLNTLGSYKCSCDPGYELAPDKRRCEAACGGFLTKLNGSITSPGWPKEYPPNKNCIWQLVAPTQYRISLQFDFFETEGNDVCKYDFVEVRSGLTADSKLHGKFCGSEKPEVITSQYNNMRVEFKSDNTVSKKGFKAHFFSDKDECSKDNGGCQQDCVNTFGSYECQCRSGFVLHDNKHDCKEAGCDHKVTSTSGTITSPNWPDKYPSKKECTWAISSTPGHRVKLTFMEMDIESQPECAYDHLEVFDGRDAKAPVLGRFCGSKKPEPVLATGSRMFLRFYSDNSVQRKGFQASHATECGGQVRADVKTKDLYSHAQFGDNNYPGGVDCEWVIVAEEGYGVELVFQTFEVEEETDCGYDYMELFDGYDSTAPRLGRYCGSGPPEEVYSAGDSVLVKFHSDDTITKKGFHLRYTSTKFQDTLHSRK

SEQ ID NO: 15216 - protein, 730 aa, Homo sapiens
MPGVARLPLLLGLLLLPRPGRPLDLADYTYDLAEEDDSEPLNYKDPCKAAAFLGDIALDEEDLRAFQVQQAVDLRRHTARKSSIKAAVPGNTSTPSCQSTNGQPQRGACGRWRGRSRSRRAATSRPERVWPDGVIPFVIGGNFTGSQRAVFRQAMRHWEKHTCVTFLERTDEDSYIVFTYRPCGCCSYVGRRGGGPQAISIGKNCDKFGIVVHELGHVVGFWHEHTRPDRDRHVSIVRENIQPGQEYNFLKMEPQEVESLGETYDFDSIMHYARNTFSRGIFLDTIVPKYEVNGVKPPIGQRTRLSKGDIAQARKLYKCPACGETLQDSTGNFSSPEYPNGYSAHMHCVWRISVTPGEKIILNFTSLDLYRSRLCWYDYVEVRDGFWRKAPLRGRFCGSKLPEPIVSTDSRLWVEFRSSSNWVGKGFFAVYEAICGGDVKKDYGHIQSPNYPDDYRPSKVCIWRIQVSEGFHVGLTFQSFEIERHDSCAYDYLEVRDGHSESSTLIGRYCGYEKPDDIKSTSSRLWLKFVSDGSINKAGFAVNFFKEVDECSRPNRGGCEQRCLNTLGSYKCSCDPGYELAPDKRRCEAACGGFLTKLNGSITSPGWPKEYPPNKNCIWQLVAPTQYRISLQFDFFETEGNDVCKYDFVEVRSGLTADSKLHGKFCGSEKPEVITSQYNNMRVEFKSDNTVSKKGFKAHFFSEKRPALQPPRGRPHQLKFRVQKRNRTPQ

SEQ ID NO: 15217 - protein, 302 aa, Homo sapiens
MPGVARLPLLLGLLLLPRPGRPLDLADYTYDLAEEDDSEPLNYKDPCKAAAFLGDIALDEEDLRAFQVQQAVDLRRHTARKSSIKAAVPGNTSTPSCQSTNGQPQRGACGRWRGRSRSRRAATSRPERVWPDGVIPFVIGGNFTGSQRAVFRQAMRHWEKHTCVTFLERTDEDSYIVFTYRPCGCCSYVGRRGGGPQAISIGKNCDKFGIVVHELGHVVGFWHEHTRPDRDRHVSIVRENIQPGVLHSSLLLLSCGSRNGASFPCSLESSTHQALCWTGLFLRPSPFPRLPLAAPRTLRAGV

SEQ ID NO: 15218 - protein, 622 aa, Homo sapiens
MPGVARLPLLLGLLLLPRPGRPLDLADYTYDLAEEDDSEPLNYKDPCKAAAFLGDIALDEEDLRAFQVQQAVDLRRHTARKSSIKAAVPGNTSTPSCQSTNGQPQRGACGRWRGRSRSRRAATSRPERVWPDGVIPFVIGGNFTGSQRAVFRQAMRHWEKHTCVTFLERTDEDSYIVFTYRPCGCCSYVGRRGGGPQAISIGKNCDKFGIVVHELGHVVGFWHEHTRPDRDRHVSIVRENIQPGQEYNFLKMEPQEVESLGETYDFDSIMHYARNTFSRGIFLDTIVPKYEVNGVKPPIGQRTRLSKGDIAQARKLYKCPACGETLQDSTGNFSSPEYPNGYSAHMHCVWRISVTPGEKIILNFTSLDLYRSRLCWYDYVEVRDGFWRKAPLRGRFCGSKLPEPIVSTDSRLWVEFRSSSNWVGKGFFAVYEAICGGDVKKDYGHIQSPNYPDDYRPSKVCIWRIQVSEGFHVGLTFQSFEIERHDSCAYDYLEVRDGHSESSTLIGRYCGYEKPDDIKSTSSRLWLKFVSDGSINKAGFAVNFFKEVDECSRPNRGGCEQRCLNTLGSYKCSCDPGYELAPDKRRCEGCYDLQVGKPLLWDRHCFRLSTHGPEMLGTALRG

SEQ ID NO: 15219 - protein, 717 aa, Homo sapiens
MPGVARLPLLLGLLLLPRPGRPLDLADYTYDLAEEDDSEPLNYKDPCKAAAFLGDIALDEEDLRAFQVQQAVDLRRHTARKSSIKAAVPGNTSTPSCQSTNGQPQRGACGRWRGRSRSRRAATSRPERVWPDGVIPFVIGGNFTGSQRAVFRQAMRHWEKHTCVTFLERTDEDSYIVFTYRPCGCCSYVGRRGGGPQAISIGKNCDKFGIVVHELGHVVGFWHEHTRPDRDRHVSIVRENIQPGQEYNFLKMEPQEVESLGETYDFDSIMHYARNTFSRGIFLDTIVPKYEVNGVKPPIGQRTRLSKGDIAQARKLYKCPACGETLQDSTGNFSSPEYPNGYSAHMHCVWRISVTPGEKIILNFTSLDLYRSRLCWYDYVEVRDGFWRKAPLRGRFCGSKLPEPIVSTDSRLWVEFRSSSNWVGKGFFAVYEAICGGDVKKDYGHIQSPNYPDDYRPSKVCIWRIQVSEGFHVGLTFQSFEIERHDSCAYDYLEVRDGHSESSTLIGRYCGYEKPDDIKSTSSRLWLKFVSDGSINKAGFAVNFFKEVDECSRPNRGGCEQRCLNTLGSYKCSCDPGYELAPDKRRCEAACGGFLTKLNGSITSPGWPKEYPPNKNCIWQLVAPTQYRISLQFDFFETEGNDVCKYDFVEVRSGLTADSKLHGKFCGSEKPEVITSQYNNMRVEFKSDNTVSKKGFKAHFFSGGELFGLLGHPPRRP

SEQ ID NO: 15220 - protein, 823 aa, Homo sapiens
MPGVARLPLLLGLLLLPRPGRPLDLADYTYDLAEEDDSEPLNYKDPCKAAAFLGDIALDEEDLRAFQVQQAVDLRRHTARKSSIKAAVPGNTSTPSCQSTNGQPQRGACGRWRGRSRSRRAATSRPERVWPDGVIPFVIGGNFTGSQRAVFRQAMRHWEKHTCVTFLERTDEDSYIVFTYRPCGCCSYVGRRGGGPQAISIGKNCDKFGIVVHELGHVVGFWHEHTRPDRDRHVSIVRENIQPGQEYNFLKMEPQEVESLGETYDFDSIMHYARNTFSRGIFLDTIVPKYEVNGVKPPIGQRTRLSKGDIAQARKLYKCPACGETLQDSTGNFSSPEYPNGYSAHMHCVWRISVTPGEKIILNFTSLDLYRSRLCWYDYVEVRDGFWRKAPLRGRFCGSKLPEPIVSTDSRLWVEFRSSSNWVGKGFFAVYEAICGGDVKKDYGHIQSPNYPDDYRPSKVCIWRIQVSEGFHVGLTFQSFEIERHDSCAYDYLEVRDGHSESSTLIGRYCGYEKPDDIKSTSSRLWLKFVSDGSINKAGFAVNFFKEVDECSRPNRGGCEQRCLNTLGSYKCSCDPGYELAPDKRRCEAACGGFLTKLNGSITSPGWPKEYPPNKNCIWQLVAPTQYRISLQFDFFETEGNDVCKYDFVEVRSGLTADSKLHGKFCGSEKPEVITSQYNNMRVEFKSDNTVSKKGFKAHFFSVLEGAGDRHSHLSGLELLLCPHALVDTVPAPPSALHGDTHAHTHTHVHTHCPIAQETCRGPPLGASRLSPQGPGHLTLAPQEGSYLDFWDTHRGDPKPRRRRKSLKTFSLTPATFRGIWAL

SEQ ID NO: 15221 - protein, 1849 aa, Homo sapiens
MYEGKKTKNMFLTRALEKILADKEVKKAHHSQLRKACEVALEEIKAETEKQSPPHGEAKAGSSTLPPVKSKTNFIEADKYFLPFELACQSKCPRIVSTSLDCLQKLIAYGHLTGNAPDSTTPGKKLIDRIIETICGCFQGPQTDEGVQLQIIKALLTAVTSQHIEIHEGTVLQAVRTCYNIYLASKNLINQTTAKATLTQMLNVIFARMENQALQEAKQMEKERHRQHHHLLQSPVSHHEPESPQLRYLPPQTVDHISQEHEGDLDLHTNDVDKSLQDDTEPENGSDISSAENEQTEADQATAAETLSKNEVLYDGENHDCEEKPQDIVQNIVEEMVNIVVGDMGEGTTINASADGNIGTIEDGSDSENIQANGIPGTPISVAYTPSLPDDRLSVSSNDTQESGNSSGPSPGAKFSHILQKDAFLVFRSLCKLSMKPLSDGPPDPKSHELRSKILSLQLLLSILQNAGPIFRTNEMFINAIKQYLCVALSKNGVSSVPEVFELSLSIFLTLLSNFKTHLKMQIEVFFKEIFLYILETSTSSFDHKWMVIQTLTRICADAQSVVDIYVNYDCDLNAANIFERLVNDLSKIAQGRGSQELGMSNVQELSLRKKGLECLVSILKCMVEWSKDQYVNPNSQTTLGQEKPSEQEMSEIKHPETINRYGSLNSLESTSSSGIGSYSTQMSGTDNPEQFEVLKQQKEIIEQGIDLFNKKPKRGIQYLQEQGMLGTTPEDIAQFLHQEERLDSTQVGEFLGDNDKFNKEVMYAYVDQHDFSGKDFVSALRMFLEGFRLPGEAQKIDRLMEKFAARYLECNQGQTLFASADTAYVLAYSIIMLTTDLHSPQVKNKMTKEQYIKMNRGINDSKDLPEEYLSAIYNEIAGKKISMKETKELTIPTKSSKQNVASEKQRRLLYNLEMEQMAKTAKALMEAVSHVQAPFTSATHLEHVRPMFKLAWTPFLAAFSVGLQDCDDTEVASLCLEGIRCAIRIACIFSIQLERDAYVQALARFTLLTVSSGITEMKQKNIDTIKTLITVAHTDGNYLGNSWHEILKCISQLELAQLIGTGVKPRYISGTVRGREGSLTGTKDQAPDEFVGLGLVGGNVDWKQIASIQESIGETSSQSVVVAVDRIFTGSTRLDGNAIVDFVRWLCAVSMDELLSTTHPRMFSLQKIVEISYYNMGRIRLQWSRIWEVIGDHFNKVGCNPNEDVAIFAVDSLRQLSMKFLEKGELANFRFQKDFLRPFEHIMKRNRSPTIRDMVVRCIAQMVNSQAANIRSGWKNIFSVFHLAASDQDESIVELAFQTTGHIVTLVFEKHFPATIDSFQDAVKCLSEFACNAAFPDTSMEAIRLIRHCAKYVSDRPQAFKEYTSDDMNVAPEDRVWVRGWFPILFELSCIINRCKLDVRTRGLTVMFEIMKTYGHTYEKHWWQDLFRIVFRIFDNMKLPEQQTEKAEWMTTTCNHALYAICDVFTQYLEVLSDVLLDDIFAQLYWCVQQDNEQLARSGTNCLENVVILNGEKFTLEIWDKTCNCTLDIFKTTIPHALLTWRPNSGETAPPPPSPVSEKPLDTISQKSVDIHDSIQPRSVDNRPQAPLVSASAVNEEVSKIKSTAKFPEQKLFAALLIKCVVQLELIQTIDNIVFFPATSKKEDAENLAAAQRDAVDFDVRVDTQDQGMYRFLTSQQLFKLLDCLLESHRFAKAFNSNNEQRTALWKAGFKGKSKPNLLKQETSSLACGLRILFRMYMDESRVSAWEEVQQRLLNVCSEALSYFLTLTSESHREAWTNLLLLFLTKVLKISDNRFKAHASFYYPLLCEIMQFDLIPELRAVLRRFFLRIGVVFQISQPPEQELGINKQ

SEQ ID NO: 15222 - protein, 279 aa, Homo sapiens
MQKIVQTDEITNTQAFRKGKRKRTETMDSENANSDMDKGQRDPYSGNAFLPGESSSEDEEPLAELSKEELCAKIKSLKEKLTNTRKENSRLRQSLVMLQVLPQAVTQFEELVGMAEALLKGGGTMSTSASTLWRATNNSSPDSFASTCSNSNSNSSSPVSLKPEEEHQTDEKQFQIEKWQIARCNKSKPQKFINDLMQVLYTNEYMATHSLTGAKSSTSRDKAVKPAMNQNEVQEIIGVTKQLFPNTDDVSIRRMIGQKLNNCTKKPNLSKNLNSQDIK

SEQ ID NO: 15223 - protein, 106 aa, Homo sapiens
MQKIVQTDEITNTQAFRKGKRKRTETMDSENANSDMDKGQRDPYSGNAFLPGESSSEDEEPLAELSKEELCAKIKSLKEKLTNTRKENSRLRQSLVMLQAWSRELP

SEQ ID NO: 15224 - protein, 181 aa, Homo sapiens
MLLPQAVTQFEELVGMAEALLKGGGTMSTSASTLWRATNNSSPDSFASTCSNSNSNSSSPVSLKPEEEHQTDEKQFQIEKWQIARCNKSKPQKFINDLMQVLYTNEYMATHSLTGAKSSTSRDKAVKPAMNQNEVQEIIGVTKQLFPNTDDVSIRRMIGQKLNNCTKKPNLSKNLNSQDIK

SEQ ID NO: 15225 - protein, 189 aa, Homo sapiens
MQKIVQTDEITNTQAFRKGKRKRTETMDSENANSDMDKGQRDPYSGNAFLPGESSSEDEEPLAELSKEELCAKIKSLKEKLTNTRKENSRLRQSLVMLQVLPQAVTQFEELVGMAEALLKGGGTMSTSASTLWRATNNSSPDSFASTCSNSNSNSSSPVSLKPEEEHQTDEKQFQIEKWQNPLLQGTKL

SEQ ID NO: 15226 - protein, 619 aa, Homo sapiens
MAAAPPLSKAEYLKRYLSGADAGVDRGSESGRKRRKKRPKPGGAGGKGMRIVDDDVSWTAISTTKLEKEEEEDDGDLPVVAEFVDERPEEVKQMEAFRSSAKWKLLGGHNEDLPSNRHFRHDTPDSSPRRVRHGTPDPSPRKDRHDTPDPSPRRARHDTPDPSPLRGARHDSDTSPPRRIRHDSSDTSPPRRARHDSPDPSPPRRPQHNSSGASPRRVRHDSPDPSPPRRARHGSSDISSPRRVHNNSPDTSRRTLGSSDTQQLRRARHDSPDLAPNVTYSLPRTKSGKAPERASSKTSPHWKESGASHLSFPKNSKYEYDPDISPPRKKQAKSHFGDKKQLDSKGDCQKATDSDLSSPRHKQSPGHQDSDSDLSPPRNRPRHRSSDSDLSPPRRRQRTKSSDSDLSPPRRSQPPGKKAAHMYSGAKTGLVLTDIQREQQELKEQDQETMAFEAEFQYAETVFRDKSGRKRNLKLERLEQRRKAEKDSERDELYAQWGKGLAQSRQQQQNVEDAMKEMQKPLARYIDDEDLDRMLREQEREGDPMANFIKKNKAKENKNKKVRPRYSGPAPPPNRFNIWPGYRWDGVDRSNGFEQKRFARLASKKAVEELAYKWSVEDM

SEQ ID NO: 15227 - protein, 485 aa, Homo sapiens
MAAAPPLSKAEYLKRYLSGADAGVDRGSESGRKRRKKRPKPGGAGGKGMRIVDDDVSWTAISTTKLEKEEEEDDGDLPVVAEFVDERPEEVKQMEAFRSSAKWKLLGGHNEDLPSNRHFRHDTPDSSPRRVRHGTPDPSPRKDRHDTPDPSPRRARHDTPDPSPLRGARHDSDTSPPRRIRHDSSDTSPPRRARHDSPDPSPPRRPQHNSSGDCQKATDSDLSSPRHKQSPGHQDSDSDLSPPRNRPRHRSSDSDLSPPRRRQRTKSSDSDLSPPRRSQPPGKKAAHMYSGAKTGLVLTDIQREQQELKEQDQETMAFEAEFQYAETVFRDKSGRKRNLKLERLEQRRKAEKDSERDELYAQWGKGLAQSRQQQQNVEDAMKEMQKPLARYIDDEDLDRMLREQEREGDPMANFIKKNKAKENKNKKVRPRYSGPAPPPNRFNIWPGYRWDGVDRSNGFEQKRFARLASKKAVEELAYKWSVEDM

SEQ ID NO: 15228 - protein, 233 aa, Homo sapiens
MEGGGGIPLETLKEESQSRHVLPASFEVNSLQKSNWGFLLTGLVGGTLVAVYAVATPFVTPALRKVCLPFVPATTKQIENVVKMLRCRRGSLVDIGSGDGRIVIAAAKKGFTAVGYELNPWLVWYSRYRAWREGVHGSAKFYISDLWKVTFSQYSNVVIFGVPQMMLQLEKKLERELEDDARVIACRFPFPHWTPDHVTGEGIDTVWAYDASTFRGREKRPCTSMHFQLPIQA

SEQ ID NO: 15229 - protein, 216 aa, Homo sapiens
MEGGGGIPLETLKEESQSRHVLPASFEVNSLQKSNWGFLLTGLVGGTLVAVYAVATPFVTPALRKVCLPFVPATTKQIENVVKMLRCRRGSLVDIGSGDGRIVIAAAKKGFTAVGYELNPWLVWYSRYRAWREGVHGSAKFYISDLWKMLQLEKKLERELEDDARVIACRFPFPHWTPDHVTGEGIDTVWAYDASTFRGREKRPCTSMHFQLPIQA

SEQ ID NO: 15230 - protein, 502 aa, Homo sapiens
MRCSPGGVWLALAASLLHVSLQGEFQRKLYKELVKNYNPLERPVANDSQPLTVYFSLSLLQIMDVDEKNQVLTTNIWLQMSWTDHYLQWNVSEYPGVKTVRFPDGQIWKPDILLYNSADERFDATFHTNVLVNSSGHCQYLPPGIFKSSCYIDVRWFPFDVQHCKLKFGSWSYGGWSLDLQMQEADISGYIPNGEWDLVGIPGKRSERFYECCKEPYPDVTFTVTMRRRTLYYGLNLLIPCVLISALALLVFLLPADSGEKISLGITVLLSLTVFMLLVAEIMPATSDSVPLIAQYFASTMIIVGLSVVVTVIVLQYHHHDPDGGKMPKWTRVILLNWCAWFLRMKRPGEDKVRPACQHKQRRCSLASVEMSAVAPPPASNGNLLYIGFRGLDGVHCVPTPDSGVVCGRMACSPTHDEHLLHGGQPPEGDPDLAKILEEVRYIANRFRCQDESEAVCSEWKFAACVVDRLCLMAFSVFTIICTIGILMSAPNFVEAVSKDFA

SEQ ID NO: 15231 - protein, 531 aa, Homo sapiens
MRCSPGGVWLALAASLLHGKATASPPSTPPWDPGHIPGASVRPAPGPVSLQGEFQRKLYKELVKNYNPLERPVANDSQPLTVYFSLSLLQIMDVDEKNQVLTTNIWLQMSWTDHYLQWNVSEYPGVKTVRFPDGQIWKPDILLYNSADERFDATFHTNVLVNSSGHCQYLPPGIFKSSCYIDVRWFPFDVQHCKLKFGSWSYGGWSLDLQMQEADISGYIPNGEWDLVGIPGKRSERFYECCKEPYPDVTFTVTMRRRTLYYGLNLLIPCVLISALALLVFLLPADSGEKISLGITVLLSLTVFMLLVAEIMPATSDSVPLIAQYFASTMIIVGLSVVVTVIVLQYHHHDPDGGKMPKWTRVILLNWCAWFLRMKRPGEDKVRPACQHKQRRCSLASVEMSAVAPPPASNGNLLYIGFRGLDGVHCVPTPDSGVVCGRMACSPTHDEHLLHGGQPPEGDPDLAKILEEVRYIANRFRCQDESEAVCSEWKFAACVVDRLCLMAFSVFTIICTIGILMSAPNFVEAVSKDFA

SEQ ID NO: 15232 - protein, 102 aa, Homo sapiens
MRCSPGGVWLALAASLLHVSLQGEFQRKLYKELVKNYNPLERPVANDSQPLTVYFSLSLLQIMDVDEKNQVLTTNIWLQMAYSRVPATSMYAGFPLMCSTAN

SEQ ID NO: 15233 - protein, 502 aa, Homo sapiens
MLLRSAGKLNVGTKKEDGESTAPTPRPKVLRCKCHHHCPEDSVNNICSTDGYCFTMIEEDDSGLPVVTSGCLGLEGSDFQCRDTPIPHQRRSIECCTERNECNKDLHPTLPPLKNRDFVDGPIHHRALLISVTVCSLLLVLIILFCYFRYKRQETRPRYSIGLEQDETYIPPGESLRDLIEQSQSSGSGSGLPLLVQRTIAKQIQMVKQIGKGRYGEVWMGKWRGEKVAVKVFFTTEEASWFRETEIYQTVLMRHENILGFIAADIKGTGSWTQLYLITDYHENGSLYDYLKSTTLDAKSMLKLAYSSVSGLCHLHTEIFSTQGKPAIAHRDLKSKNILVKKNGTCCIADLGLAVKFISDTNEVDIPPNTRVGTKRYMPPEVLDESLNRNHFQSYIMADMYSFGLILWEVARRCVSGGIVEEYQLPYHDLVPSDPSYEDMREIVCIKKLRPSFPNRWSSDECLRQMGKLMTECWAHNPASRLTALRVKKTLAKMSESQDIKL

SEQ ID NO: 15234 - protein, 532 aa, Homo sapiens
MGWLEELNWQLHIFLLILLSMHTRANFLDNMLLRSAGKLNVGTKKEDGESTAPTPRPKVLRCKCHHHCPEDSVNNICSTDGYCFTMIEEDDSGLPVVTSGCLGLEGSDFQCRDTPIPHQRRSIECCTERNECNKDLHPTLPPLKNRDFVDGPIHHRALLISVTVCSLLLVLIILFCYFRYKRQETRPRYSIGLEQDETYIPPGESLRDLIEQSQSSGSGSGLPLLVQRTIAKQIQMVKQIGKGRYGEVWMGKWRGEKVAVKVFFTTEEASWFRETEIYQTVLMRHENILGFIAADIKGTGSWTQLYLITDYHENGSLYDYLKSTTLDAKSMLKLAYSSVSGLCHLHTEIFSTQGKPAIAHRDLKSKNILVKKNGTCCIADLGLAVKFISDTNEVDIPPNTRVGTKRYMPPEVLDESLNRNHFQSYIMADMYSFGLILWEVARRCVSGGIVEEYQLPYHDLVPSDPSYEDMREIVCIKKLRPSFPNRWSSDECLRQMGKLMTECWAHNPASRLTALRVKKTLAKMSESQDIKL

SEQ ID NO: 15235 - protein, 415 aa, Homo sapiens
MATRNSPMPLGTAQGDPGEAGTRPGPDASLRDTGAATQLKMKPRKVHKIKAVIIDLGSQYCKCGYAGEPRPTYFISSTVGKRCPEAADAGDTRKWTLVGHELLNTEAPLKLVNPLKHGIVVDWDCVQDIWEYIFRTAMKILPEEHAVLVSDPPLSPSSNREKYAELMFETFGIPAMHVTSQSLLSIYSYGKTSGLVVESGHGVSHVVPISEGDVLPGLTSRADYAGGDLTNYLMQLLNEAGHAFTDDHLHIIEHIKKKCCYAAFLPEEELGLVPEELRVDYELPDGKLITIGQERFRCSEMLFQPSLAGSTQPGLPELTAACLGRCQDTGFKEEMAANVLLCGGCTMLDGFPERFQRELSLLCPGDSPAVAAAPERKTSVWTGGSILASLQAFQQLWVSKEEFEERGSVAIYSKC

SEQ ID NO: 15236 - protein, 354 aa, Homo sapiens
MAEVLRTLAGKPKCHALRPMILFLIMLVLVLFGYGVLSPRSLMPGSLERGFCMAVREPDHLQRVSLPRMVYPQPKVLTPCRKDVLVVTPWLAPIVWEGTFNIDILNEQFRLQNTTIGLTVFAIKKYVAFLKLFLETAEKHFMVGHRVHYYVFTDQPAAVPRVTLGTGRQLSVLEVRAYKRWQDVSMRRMEMISDFCERRFLSEVDYLVCVDVDMEFRDHVGVEILTPLFGTLHPGFYGSSREAFTYERRPQSQAYIPKDEGDFYYLGGFFGGSVQEVQRLTRACHQAMMVDQANGIEAVWHDESHLNKYLLRHKPTKVLSPEYLWDQQLLGWPAVLRKLRFTAVPKNHQAVRNP

SEQ ID NO: 15237 - protein, 300 aa, Homo sapiens
MAEEVSTLMKATVLMRQPGRVQEIVGALRKGGGDRLQVISDFDMTLSRFAYNGKRCPSSYNILDNSKIISEECRKELTALLHHYYPIEIDPHRTVKEKLPHMVEWWTKAHNLLCQQKIQKFQIAQVVRESNAMLREGYKTFFNTLYHNNIPLFIFSAGIGDILEEIIRQMKVFHPNIHIVSNYMDFNEDGFLQGFKGQLIHTYNKNSSACENSGYFQQLEGKTNVILLGDSIGDLTMADGVPGVQNILKIGFLNDKVEERRERYMDSYDIVLEKDETLDVVNGLLQHILCQGVQLEMQGP

SEQ ID NO: 15238 - protein, 292 aa, Homo sapiens
MKATVLMRQPGRVQEIVGALRKGGGDRLQVISDFDMTLSRFAYNGKRCPSSYNILDNSKIISEECRKELTALLHHYYPIEIDPHRTVKEKLPHMVEWWTKAHNLLCQQKIQKFQIAQVVRESNAMLREGYKTFFNTLYHNNIPLFIFSAGIGDILEEIIRQMKVFHPNIHIVSNYMDFNEDGFLQGFKGQLIHTYNKNSSACENSGYFQQLEGKTNVILLGDSIGDLTMADGVPGVQNILKIGFLNDKVEERRERYMDSYDIVLEKDETLDVVNGLLQHILCQGVQLEMQGP

SEQ ID NO: 15239 - protein, 366 aa, Homo sapiens
MDFLNSSDQNLTSEELLNRMPSKILVSLTLSGLALMTTTINSLVIAAIIVTRKLHHPANYLICSLAVTDFLVAVLVMPFSIVYIVRESWIMGQVVCDIWLSVDITCCTCSILHLSAIALDRYRAITDAVEYARKRTPKHAGIMITIVWIISVFISMPPLFWRHQGTSRDDECIIKHDHIVSTIYSTFGAFYIPLALILILYYKIYRAAKTLYHKRQASRIAKEEVNGQVLLESGEKSTKSVSTSYVLEKSLSDPSTDFDKIHSTVRSLRSEFKHEKSWRRQKISGTRERKAATTLGLILGAFVICWLPFFVKELVVNVCDKCKISEEMSNFLAWLGYLNSLINPLIYTIFNEDFKKAFQKLVRCRC

SEQ ID NO: 15240 - protein, 430 aa, Homo sapiens
MALLHSGRVLPGIAAAFHPGLAAAASARASSWWTHVEMGPPDPILGVTEAFKRDTNSKKMNLGVGAYRDDNGKPYVLPSVRKAEAQIAAKNLDKEYLPIGGLAEFCKASAELALGENSEVLKSGRFVTVQTISGTGALRIGASFLQRFFKFSRDVFLPKPTWGNHTPIFRDAGMQLQGYRYYDPKTCGFDFTGAVEDISKIPEQSVLLLHACAHNPTGVDPRPEQWKEIATVVKKRNLFAFFDMAYQGFASGDGDKDAWAVRHFIEQGINVCLCQSYAKNMGLYGERVGAFTMVCKDADEAKRVESQLKILIRPMYSNPPLNGARIAAAILNTPDLRKQWLQEVKVMADRIIGMRTQLVSNLKKEGSTHNWQHITDQIGMFCFTGLKPEQVERLIKEFSIYMTKDGRISVAGVTSSNVGYLAHAIHQVTK

SEQ ID NO: 15241 - protein, 387 aa, Homo sapiens
MALLHSGRVLPGIAAAFHPGLAAAASARASSWWTHVEMGPPDPILGVTEAFKRDTNSKKMNLGVGAYRDDNGKPYVLPSVRKFVTVQTISGTGALRIGASFLQRFFKFSRDVFLPKPTWGNHTPIFRDAGMQLQGYRYYDPKTCGFDFTGAVEDISKIPEQSVLLLHACAHNPTGVDPRPEQWKEIATVVKKRNLFAFFDMAYQGFASGDGDKDAWAVRHFIEQGINVCLCQSYAKNMGLYGERVGAFTMVCKDADEAKRVESQLKILIRPMYSNPPLNGARIAAAILNTPDLRKQWLQEVKVMADRIIGMRTQLVSNLKKEGSTHNWQHITDQIGMFCFTGLKPEQVERLIKEFSIYMTKDGRISVAGVTSSNVGYLAHAIHQVTK

SEQ ID NO: 15242 - protein, 458 aa, Homo sapiens
MVNLRNAVHSFLVHLIGLLVWQCDISVSPVAAIVTDIFNTSDGGRFKFPDGVQNWPALSIVIIIIMTIGGNILVIMAVSMEKKLHNATNYFLMSLAIADMLVGLLVMPLSLLAILYDYVWPLPRYLCPVWISLDVLFSTASIMHLCAISLDRYVAIRNPIEHSRFNSRTKAIMKIAIVWAISIGVSVPIPVIGLRDEEKVFVNNTTCVLNDPNFVLIGSFVAFFIPLTIMVITYCLTIYVLRRQALMLLHGHTEEPPGLSLDFLKCCKRNTAEEENSANPNQDQNARRRKKKERRPRGTMQAINNERKASKVLGIVFFVFLIMWCPFFITNILSVLCEKSCNQKLMEKLLNVFVWIGYVCSGINPLVYTLFNKIYRRAFSNYLRCNYKVEKKPPVRQIPRVAATALSGRELNVNIYRHTNEPVIEKASDNEPGIEMQVENLELPVNPSSVVSERISSV

SEQ ID NO: 15243 - protein, 248 aa, Homo sapiens
MVNLRNAVHSFLVHLIGLLVWQCDISVSPVAAIVTDIFNTSDGGRFKFPDGVQNWPALSIVIIIIMTIGGNILVIMAVSMEKKLHNATNYFLMSLAIADMLVGLLVMPLSLLAILYDYVWPLPRYLCPVWISLDVLFSTASIMHLCAISLDRCISSYPCDWTEGRRKGVREQHDVRAQRPKFRSYWVLRSFLHTADDYGDYVLPDHLRSAPTSFDVTARPHRGTAWTKSGFPEVLQEEYGRGRELCKP

SEQ ID NO: 15244 - protein, 280 aa, Homo sapiens
MAPRKGSSRVAKTNSLRRRKLASFLKDFDREVEIRIKQIESDRQNLLKEVDNLYNIEILRLPKALREMNWLDYFALGGNKQALEEAATADLDITEINKLTAEAIQTPLKSAKTRKVIQVDEMIVEEEEEEENERKNLQTARVKRCPPSKKRTQSIQGKGKGKRSSRANTVTPAVGRLEVSMVKPTPGLTPRFDSRVFKTPGLRTPAAGERIYNISGNGSPLADSKEIFLTVPVGGGESLRLLASDLQRHSIAQLDPEALGNIKKLSNRLAQICSSIRTHK

SEQ ID NO: 15245 - protein, 204 aa, Homo sapiens
MVDQLRERTTMADPLRERTELLLADYLGYCAREPGTPEPAPSTPEAAVLRSAAARLRQIHRSFFSAYLGYPGNRFELVALMADSVLSDSPGPTWGRVVTLVTFAGTLLERGPLVTARWKKWGFQPRLKEQEGDVARDCQRLVALLSSRLMGQHRAWLQAQGGWDGFCHFFRTPFPLAFWRKQLVQAFLSCLLTTAFIYLWTRLL

SEQ ID NO: 15246 - protein, 254 aa, Homo sapiens
MPAKTPIYLKAANNKKGKKFKLRDILSPDMISPPLGDFRHTIHIGKEGQHDVFGDISFLQGNYELLPGNQEKAHLGQFPGHNEFFRANSTSDSVFTETPSPVLKNAISLPTIGGSQALMLPLLSPVTFNSKQESFGPAKLPRLSCEPVMEEKAQEKSSLLENGTVHQGDTSWGSSGSASQSSQGRDSHSSSLSEQYPDWPAEDMFDHPTPCELIKGKTKSEESLSDLTGSLLSLQLDLGPSLLDEVLNVMDKNK

SEQ ID NO: 15247 - protein, 92 aa, Homo sapiens
MLKAAAKRPELSGKNTISNNSDMAEVKSMFREVLPKQGPLFVEDIMTMVLCKPKLLPLKSLTLEKLEKMHQAAQNTIRQQEMAEKDQRQITH

SEQ ID NO: 15248 - protein, 70 aa, Homo sapiens
MAEVKSMFREVLPKQGPLFVEDIMTMVLCKPKLLPLKSLTLEKLEKMHQAAQNTIRQQEMAEKDQRQITH

SEQ ID NO: 15249 - protein, 67 aa, Homo sapiens
MLKAAAKRPELSGPLFVEDIMTMVLCKPKLLPLKSLTLEKLEKMHQAAQNTIRQQEMAEKDQRQITH

SEQ ID NO: 15250 - protein, 103 aa, Homo sapiens
MLKAAAKRPELSGLLKFNNYGILSESPLTSQRTTWLLYQSPSFIPGFAYPSRCLKTIGGVYKQARKKHYIQQLRYGRSEVNVPGSSSKARATVCGRYNDNGAV

SEQ ID NO: 15251 - protein, 482 aa, Homo sapiens
MDEGIPHLQERQLLEHRDFIGLDYSSLYMCKPKRSMKRDDTKDTYKLPHRLIEKKRRDRINECIAQLKDLLPEHLKLTTLGHLEKAVVLELTLKHLKALTALTEQQHQKIIALQNGERSLKSPIQSDLDAFHSGFQTCAKEVLQYLSRFESWTPREPRCVQLINHLHAVATQFLPTPQLLTQQVPLSKGTGAPSAAGSAAAPCLERAGQKLEPLAYCVPVIQRTQPSAELAAENDTDTDSGYGGEAEARPDREKGKGAGASRVTIKQEPPGEDSPAPKRMKLDSRGGGSGGGPGGGAAAAAAALLGPDPAAAAALLRPDAALLSSLVAFGGGGGAPFPQPAAAAAPFCLPFCFLSPSAAAAYVQPFLDKSGLEKYLYPAAAAAPFPLLYPGIPAPAAAAAAAAAAAAAAAAFPCLSSVLSPPPEKAGAAAATLLPHEVAPLGAPHPQHPHGRTHLPFAGPREPGNPESSAQEDPSQPGKEAP

SEQ ID NO: 15252 - protein, 2813 aa, Homo sapiens
MKLNPQQAPLYGDCVVTVLLAEEDKAEDDVVFYLVFLGSTLRHCTSTRKVSSDTLETIAPGHDCCETVKVQLCASKEGLPVFVVAEEDFHFVQDEAYDAAQFLATSAGNQQALNFTRFLDQSGPPSGDVNSLDKKLVLAFRHLKLPTEWNVLGTDQSLHDAGPRETLMHFAVRLGLLRLTWFLLQKPGGRGALSIHNQEGATPVSLALERGYHKLHQLLTEENAGEPDSWSSLSYEIPYGDCSVRHHRELDIYTLTSESDSHHEHPFPGDGCTGPIFKLMNIQQQLMKTNLKQMDSLMPLMMTAQDPSSAPETDGQFLPCAPEPTDPQRLSSSEETESTQCCPGSPVAQTESPCDLSSIVEEENTDRSCRKKNKGVERKGEEVEPAPIVDSGTVSDQDSCLQSLPDCGVKGTEGLSSCGNRNEETGTKSSGMPTDQESLSSGDAVLQRDLVMEPGTAQYSSGGELGGISTTNVSTPDTAGEMEHGLMNPDATVWKNVLQGGESTKERFENSNIGTAGASDVHVTSKPVDKISVPNCAPAASSLDGNKPAESSLAFSNEETSTEKTAETETSRSREESADAPVDQNSVVIPAAAKDKISDGLEPYTLLAAGIGEAMSPSDLALLGLEEDVMPHQNSETNSSHAQSQKGKSSPICSTTGDDKLCADSACQQNTVTSSGDLVAKLCDNIVSESESTTARQPSSQDPPDASHCEDPQAHTVTSDPVRDTQERADFCPFKVVDNKGQRKDVKLDKPLTNMLEVVSHPHPVVPKMEKELVPDQAVISDSTFSLANSPGSESVTKDDALSFVPSQKEKGTATPELHTATDYRDGPDGNSNEPDTRPLEDRAVGLSTSSTAAELQHGMGNTSLTGLGGEHEGPAPPAIPEALNIKGNTDSSLQSVGKATLALDSVLTEEGKLLVVSESSAAQEQDKDKAVTCSSIKENALSSGTLQEEQRTPPPGQDTQQFHEKSISADCAKDKALQLSNSPGASSAFLKAETEHNKEVAPQVSLLTQGGAAQSLVPPGASLATESRQEALGAEHNSSALLPCLLPDGSDGSDALNCSQPSPLDVGVKNTQSQGKTSACEVSGDVTVDVTGVNALQGMAEPRRENISHNTQDILIPNVLLSQEKNAVLGLPVALQDKAVTDPQGVGTPEMIPLDWEKGKLEGADHSCTMGDAEEAQIDDEAHPVLLQPVAKELPTDMELSAHDDGAPAGVREVMRAPPSGRERSTPSLPCMVSAQDAPLPKGADLIEEAASRIVDAVIEQVKAAGALLTEGEACHMSLSSPELGPLTKGLESAFTEKVSTFPPGESLPMGSTPEEATGSLAGCFAGREEPEKIILPVQGPEPAAEMPDVKAEDEVDFRASSISEEVAVGSIAATLKMKQGPMTQAINRENWCTIEPCPDAASLLASKQSPECENFLDVGLGRECTSKQGVLKRESGSDSDLFHSPSDDMDSIIFPKPEEEHLACDITGSSSSTDDTASLDRHSSHGSDVSLSQILKPNRSRDRQSLDGFYSHGMGAEGRESESEPADPGDVEEEEMDSITEVPANCSVLRSSMRSLSPFRRHSWGPGKNAASDAEMNHRSSMRVLGDVVRRPPIHRRSFSLEGLTGGAGVGNKPSSSLEVSSANAEELRHPFSGEERVDSLVSLSEEDLESDQREHRMFDQQICHRSKQQGFNYCTSAISSPLTKSISLMTISHPGLDNSRPFHSTFHNTSANLTESITEENYNFLPHSPSKKDSEWKSGTKVSRTFSYIKNKMSSSKKSKEKEKEKDKIKEKEKDSKDKEKDKKTVNGHTFSSIPVVGPISCSQCMKPFTNKDAYTCANCSAFVHKGCRESLASCAKVKMKQPKGSLQAHDTSSLPTVIMRNKPSQPKERPRSAVLLVDETATTPIFANRRSQQSVSLSKSVSIQNITGVGNDENMSNTWKFLSHSTDSLNKISKVNESTESLTDEGVGTDMNEGQLLGDFEIESKQLEAESWSRIIDSKFLKQQKKDVVKRQEVIYELMQTEFHHVRTLKIMSGVYSQGMMADLLFEQQMVEKLFPCLDELISIHSQFFQRILERKKESLVDKSEKNFLIKRIGDVLVNQFSGENAERLKKTYGKFCGQHNQSVNYFKDLYAKDKRFQAFVKKKMSSSVVRRLGIPECILLVTQRITKYPVLFQRILQCTKDNEVEQEDLAQSLSLVKDVIGAVDSKVASYEKKVRLNEIYTKTDSKSIMRMKSGQMFAKEDLKRKKLVRDGSVFLKNAAGRLKEVQAVLLTDILVFLQEKDQKYIFASLDQKSTVISLKKLIVREVAHEEKGLFLISMGMTDPEMVEVHASSKEERNSWIQIIQDTINTLNRDEDEGIPSENEEEKKMLDTRARELKEQLHQKDQKILLLLEEKEMIFRDMAECSTPLPEDCSPTHSPRVLFRSNTEEALKGGPLMKSAINEVEILQGLVSGNLGGTLGPTVSSPIEQDVVGPVSLPRRAETFGGFDSHQMNASKGGEKEEGDDGQDLRRTESDSGLKKGGNANLVFMLKRNSEQVVQSVVHLYELLSALQGVVLQQDSYIEDQKLVLSERALTRSLSRPSSLIEQEKQRSLEKQRQDLANLQKQQAQYLEEKRRREREWEARERELREREALLAQREEEVQQGQQDLEKEREELQQKKGTYQYDLERLRAAQKQLEREQEQLRREAERLSQRQTERDLCQVSHPHTKLMRIPSFFPSPEEPPSPSAPSIAKSGSLDSELSVSPKRNSISRTHKDKGPFHILSSTSQTNKGPEGQSQAPASTSASTRLFGLTKPKEKKEKKKKNKTSRSQPGDGPASEVSAEGEEIFC

SEQ ID NO: 15253 - protein, 2817 aa, Homo sapiens
MKLNPQQAPLYGDCVVTVLLAEEDKAEDDVVFYLVFLGSTLRHCTSTRKVSSDTLETIAPGHDCCETVKVQLCASKEGLPVFVVAEEDFHFVQDEAYDAAQFLATSAGNQQALNFTRFLDQSGPPSGDVNSLDKKLVLAFRHLKLPTEWNVLGTDQSLHDAGPRETLMHFAVRLGLLRLTWFLLQKPGGRGALSIHNQEGATPVSLALERGYHKLHQLLTEENAGEPDSWSSLSYEIPYGDCSVRHHRELDIYTLTSESDSHHEHPFPGDGCTGPIFKLMNIQQQLMKTNLKQMDSLMPLMMTAQDPSSAPETDGQFLPCAPEPTDPQRLSSSEETESTQCCPGSPVAQTESPCDLSSIVEEENTDRSCRKKNKGVERKGEEVEPAPIVDSGTVSDQDSCLQSLPDCGVKGTEGLSSCGNRNEETGTKSSGMPTDQESLSSGDAVLQRDLVMEPGTAQYSSGGELGGISTTNVSTPDTAGEMEHGLMNPDATVWKNVLQGGESTKERFENSNIGTAGASDVHVTSKPVDKISVPNCAPAASSLDGNKPAESSLAFSNEETSTEKTAETETSRSREESADAPVDQNSVVIPAAAKDKISDGLEPYTLLAAGIGEAMSPSDLALLGLEEDVMPHQNSETNSSHAQSQKGKSSPICSTTGDDKLCADSACQQNTVTSSGDLVAKLCDNIVSESESTTARQPSSQDPPDASHCEDPQAHTVTSDPVRDTQERADFCPFKVVDNKGQRKDVKLDKPLTNMLEVVSHPHPVVPKMEKELVPDQAVISDSTFSLANSPGSESVTKDDALSFVPSQKEKGTATPELHTATDYRDGPDGNSNEPDTRPLEDRAVGLSTSSTAAELQHGMGNTSLTGLGGEHEGPAPPAIPEALNIKGNTDSSLQSVGKATLALDSVLTEEGKLLVVSESSAAQEQDKDKAVTCSSIKENALSSGTLQEEQRTPPPGQDTQQFHEKSISADCAKDKALQLSNSPGASSAFLKAETEHNKEVAPQVSLLTQGGAAQSLVPPGASLATESRQEALGAEHNSSALLPCLLPDGSDGSDALNCSQPSPLDVGVKNTQSQGKTSACEVSGDVTVDVTGVNALQGMAEPRRENISHNTQDILIPNVLLSQEKNAVLGLPVALQDKAVTDPQGVGTPEMIPLDWEKGKLEGADHSCTMGDAEEAQIDDEAHPVLLQPVAKELPTDMELSAHDDGAPAGVREVMRAPPSGRERSTPSLPCMVSAQDAPLPKGADLIEEAASRIVDAVIEQVKAAGALLTEGEACHMSLSSPELGPLTKGLESAFTEKVSTFPPGESLPMGSTPEEATGSLAGCFAGREEPEKIILPVQGPEPAAEMPDVKAEDEVDFRASSISEEVAVGSIAATLKMKQGPMTQAINRENWCTIEPCPDAASLLASKQSPECENFLDVGLGRECTSKQGVLKRESGSDSDLFHSPSDDMDSIIFPKPEEEHLACDITGSSSSTDDTASLDRHSSHGSDVSLSQILKPNRSRDRQSLDGFYSHGMGAEGRESESEPADPGDVEEEEMDSITEVPANCSVLRSSMRSLSPFRRHSWGPGKNAASDAEMNHRSMSWCPSGVQYSAGLSADFNYRSFSLEGLTGGAGVGNKPSSSLEVSSANAEELRHPFSGEERVDSLVSLSEEDLESDQREHRMFDQQICHRSKQQGFNYCTSAISSPLTKSISLMTISHPGLDNSRPFHSTFHNTSANLTESITEENYNFLPHSPSKKDSEWKSGTKVSRTFSYIKNKMSSSKKSKEKEKEKDKIKEKEKDSKDKEKDKKTVNGHTFSSIPVVGPISCSQCMKPFTNKDAYTCANCSAFVHKGCRESLASCAKVKMKQPKGSLQAHDTSSLPTVIMRNKPSQPKERPRSAVLLVDETATTPIFANRRSQQSVSLSKSVSIQNITGVGNDENMSNTWKFLSHSTDSLNKISKVNESTESLTDEGVGTDMNEGQLLGDFEIESKQLEAESWSRIIDSKFLKQQKKDVVKRQEVIYELMQTEFHHVRTLKIMSGVYSQGMMADLLFEQQMVEKLFPCLDELISIHSQFFQRILERKKESLVDKSEKNFLIKRIGDVLVNQFSGENAERLKKTYGKFCGQHNQSVNYFKDLYAKDKRFQAFVKKKMSSSVVRRLGIPECILLVTQRITKYPVLFQRILQCTKDNEVEQEDLAQSLSLVKDVIGAVDSKVASYEKKVRLNEIYTKTDSKSIMRMKSGQMFAKEDLKRKKLVRDGSVFLKNAAGRLKEVQAVLLTDILVFLQEKDQKYIFASLDQKSTVISLKKLIVREVAHEEKGLFLISMGMTDPEMVEVHASSKEERNSWIQIIQDTINTLNRDEDEGIPSENEEEKKMLDTRARELKEQLHQKDQKILLLLEEKEMIFRDMAECSTPLPEDCSPTHSPRVLFRSNTEEALKGGPLMKSAINEVEILQGLVSGNLGGTLGPTVSSPIEQDVVGPVSLPRRAETFGGFDSHQMNASKGGEKEEGDDGQDLRRTESDSGLKKGGNANLVFMLKRNSEQVVQSVVHLYELLSALQGVVLQQDSYIEDQKLVLSERALTRSLSRPSSLIEQEKQRSLEKQRQDLANLQKQQAQYLEEKRRREREWEARERELREREALLAQREEEVQQGQQDLEKEREELQQKKGTYQYDLERLRAAQKQLEREQEQLRREAERLSQRQTERDLCQVSHPHTKLMRIPSFFPSPEEPPSPSAPSIAKSGSLDSELSVSPKRNSISRTHKDKGPFHILSSTSQTNKGPEGQSQAPASTSASTRLFGLTKPKEKKEKKKKNKTSRSQPGDGPASEVSAEGEEIFC

SEQ ID NO: 15254 - protein, 2793 aa, Homo sapiens
MKLNPQQAPLYGDCVVTVLLAEEDKAEDDVVFYLVFLGSTLRHCTSTRKVSSDTLETIAPGHDCCETVKVQLCASKEGLPVFVVAEEDFHFVQDEAYDAAQFLATSAGNQQALNFTRFLDQSGPPSGDVNSLDKKLVLAFRHLKLPTEWNVLGTDQSLHDAGPRETLMHFAVRLGLLRLTWFLLQKPGGRGALSIHNQEGATPVSLALERGYHKLHQLLTEENAGEPDSWSSLSYEIPYGDCSVRHHRELDIYTLTSESDSHHEHPFPGDGCTGPIFKLMNIQQQLMKTNLKQMDSLMPLMMTAQDPSSAPETDGQFLPCAPEPTDPQRLSSSEETESTQCCPGSPVAQTESPCDLSSIVEEENTDRSCRKKNKGVERKGEEVEPAPIVDSGTVSDQDSCLQSLPDCGVKGTEGLSSCGNRNEETGTKSSGMPTDQESLSSGDAVLQRDLVMEPGTAQYSSGGELGGISTTNVSTPDTAGEMEHGLMNPDATVWKNVLQGGESTKERFENSNIGTAGASDVHVTSKPVDKISVPNCAPAASSLDGNKPAESSLAFSNEETSTEKTAETETSRSREESADAPVDQNSVVIPAAAKDKISDGLEPYTLLAAGIGEAMSPSDLALLGLEEDVMPHQNSETNSSHAQSQKGKSSPICSTTGDDKLCADSACQQNTVTSSGDLVAKLCDNIVSESESTTARQPSSQDPPDASHCEDPQAHTVTSDPVRDTQERADFCPFKVVDNKGQRKDVKLDKPLTNMLEVVSHPHPVVPKMEKELVPDQAVISDSTFSLANSPGSESVTKDDALSFVPSQKEKGTATPELHTATDYRDGPDGNSNEPDTRPLEDRAVGLSTSSTAAELQHGMGNTSLTGLGGEHEGPAPPAIPEALNIKGNTDSSLQSVGKATLALDSVLTEEGKLLVVSESSAAQEQDKDKAVTCSSIKENALSSGTLQEEQRTPPPGQDTQQFHEKSISADCAKDKALQLSNSPGASSAFLKAETEHNKEVAPQVSLLTQGGAAQSLVPPGASLATESRQEALGAEHNSSALLPCLLPDGSDGSDALNCSQPSPLDVGVKNTQSQGKTSACEVSGDVTVDVTGVNALQGMAEPRRENISHNTQDILIPNVLLSQEKNAVLGLPVALQDKAVTDPQGVGTPEMIPLDWEKGKLEGADHSCTMGDAEEAQIDDEAHPVLLQPVAKELPTDMELSAHDDGAPAGVREVMRAPPSGRERSTPSLPCMVSAQDAPLPKGADLIEEAASRIVDAVIEQVKAAGALLTEGEACHMSLSSPELGPLTKGLESAFTEKVSTFPPGESLPMGSTPEEATGSLAGCFAGREEPEKIILPVQGPEPAAEMPDVKAEDEVDFRASSISEEVAVGSIAATLKMKQGPMTQAINRENWCTIEPCPDAASLLASKQSPECENFLDVGLGRECTSKQGVLKRESGSDSDLFHSPSDDMDSIIFPKPEEEHLACDITGSSSSTDDTASLDRHSSHGSDVSLSQILKPNRSRDRQSLDGFYSHGMGAEGRESESEPADPGDVEEEEMDSITEVPANCSVLRSSMRSLSPFRRHSWGPGKNAASDAEMNHRSFSLEGLTGGAGVGNKPSSSLEVSSANAEELRHPFSGEERVDSLVSLSEEDLESDQREHRMFDQQICHRSKQQGFNYCTSAISSPLTKSISLMTISHPGLDNSRPFHSTFHNTSANLTESITEENYNFLPHSPSKKDSEWKSGTKVSRTFSYIKNKMSSSKKSKEKEKEKDKIKEKEKDSKDKEKDKKTVNGHTFSSIPVVGPISCSQCMKPFTNKDAYTCANCSAFVHKGCRESLASCAKVKMKQPKGSLQAHDTSSLPTVIMRNKPSQPKERPRSAVLLVDETATTPIFANRRSQQSVSLSKSVSIQNITGVGNDENMSNTWKFLSHSTDSLNKISKVNESTESLTDEGTDMNEGQLLGDFEIESKQLEAESWSRIIDSKFLKQQKKDVVKRQEVIYELMQTEFHHVRTLKIMSGVYSQGMMADLLFEQQMVEKLFPCLDELISIHSQFFQRILERKKESLVDKSEKNFLIKRIGDVLVNQFSGENAERLKKTYGKFCGQHNQSVNYFKDLYAKDKRFQAFVKKKMSSSVVRRLGIPECILLVTQRITKYPVLFQRILQCTKDNEVEQEDLAQSLSLVKDVIGAVDSKVASYEKKVRLNEIYTKTDSKSIMRMKSGQMFAKEDLKRKKLVRDGSVFLKNAAGRLKEVQAVLLTDILVFLQEKDQKYIFASLDQKSTVISLKKLIVREVAHEEKGLFLISMGMTDPEMVEVHASSKEERNSWIQIIQDTINTLNRDEDEGIPSENEEEKKMLDTRARELKEQLHQKDQKILLLLEEKEMIFRDMAECSTPLPEDCSPTHSPRVLFRSNTEEALKGGPLMKSAINEVEILQGLVSGNLGGTLGPTVSSPIEQDVVGPVSLPRRAETFGGFDSHQMNASKGGEKEEGDDGQDLRRTESDSGLKKGGNANLVFMLKRNSEQVVQSVVHLYELLSALQGVVLQQDSYIEDQKLVLSERALTRSLSRPSSLIEQEKQRSLEKQRQDLANLQKQQAQYLEEKRRREREWEARERELREREALLAQREEEVQQGQQDLEKEREELQQKKGTYQYDLERLRAAQKQLEREQEQLRREAERLSQRQTERDLCQVSHPHTKLMRIPSFFPSPEEPPSPSAPSIAKSGSLDSELSVSPKRNSISRTHKDKGPFHILSSTSQTNKGPEGQSQAPASTSASTRLFGLTKPKEKKEKKKKNKTSRSQPGDGPASEVSAEGEEIFC

SEQ ID NO: 15255 - protein, 179 aa, Homo sapiens
MKLNPQQAPLYGDCVVTVLLAEEDKAEDDVVFYLVFLGSTLRHCTSTRKVSSDTLETIAPGHDCCETVKVQLCASKEGLPVFVVAEEDFHFVQDEAYDAAQFLATSAGNQQALNFTRFLDQSGPPSGDVNSLDKKLVLAFRHLKLPTEWNVLGTDQSLHGENLYDLQTHFKFVIFLLFF

SEQ ID NO: 15256 - protein, 848 aa, Homo sapiens
MNSSSANITYASRKRRKPVQKTVKPIPAEGIKSNPSKRHRDRLNTELDRLASLLPFPQDVINKLDKLSVLRLSVSYLRAKSFFDVALKSSPTERNGGQDNCRAANFREGLNLQEGEFLLQALNGFVLVVTTDALVFYASSTIQDYLGFQQSDVIHQSVYELIHTEDRAEFQRQLHWALNPSQCTESGQGIEEATGLPQTVVCYNPDQIPPENSPLMERCFICRLRCLLDNSSGFLAMNFQGKLKYLHGQKKKGKDGSILPPQLALFAIATPLQPPSILEIRTKNFIFRTKHKLDFTPIGCDAKGRIVLGYTEAELCTRGSGYQFIHAADMLYCAESHIRMIKTGESGMIVFRLLTKNNRWTWVQSNARLLYKNGRPDYIIVTQRPLTDEEGTEHLRKRNTKLPFMFTTGEAVLYEATNPFPAIMDPLPLRTKNGTSGKDSATTSTLSKDSLNPSSLLAAMMQQDESIYLYPASSTSSTAPFENNFFNESMNECRNWQDNTAPMGNDTILKHEQIDQPQDVNSFAGGHPGLFQDSKNSDLYSIMKNLGIDFEDIRHMQNEKFFRNDFSGEVDFRDIDLTDEILTYVQDSLSKSPFIPSDYQQQQSLALNSSCMVQEHLHLEQQQQHHQKQVVVEPQQQLCQKMKHMQVNGMFENWNSNQFVPFNCPQQDPQQYNVFTDLHGISQEFPYKSEMDSMPYTQNFISCNQPVLPQHSKCTELDYPMGSFEPSPYPTTSSLEDFVTCLQLPENQKHGLNPQSAIITPQTCYAGAVSMYQCQPEPQHTHVGQMQYNPVLPGQQAFLNKFQNGVLNETYPAELNNINNTQTTTHLQPLHHPSEARPFPDLTSSGFL

SEQ ID NO: 15257 - protein, 480 aa, Homo sapiens [sequence omitted]

SEQ ID NO: 15258 - protein, 418 aa, Homo sapiens
MKTERPRPNTFIIRCLQWTTVIERTFHVETPEEREEWTTAIQTVADGLKKQEEEEMDFRSGSPSDNSGAEEMEVSLAKPKHRVTMNEFEYLKLLGKGTFGKVILVKEKATGRYYAMKILKKEVIVAKDEVAHTLTENRVLQNSRHPFLTALKYSFQTHDRLCFVMEYANGGELFFHLSRERVFSEDRARFYGAEIVSALDYLHSEKNVVYRDLKLENLMLDKDGHIKITDFGLCKEGIKDGATMKTFCGTPEYLAPEVLEDNDYGRAVDWWGLGVVMYEMMCGRLPFYNQDHEKLFELILMEEIRFPRTLGPEAKSLLSGLLKKDPKQRLGGGSEDAKEIMQHRFFAGIVWQHVYEKKLSPPFKPQVTSETDTRYFDEEFTAQMITITPPDQDDSMECVDSERRPHFPQFSYSASGTA

SEQ ID NO: 15259 - protein, 613 aa, Homo sapiens
MFRCGGLAAGALKQKLVPLVRTVCVRSPRQRNRLPGNLFQRWHVPLELQMTRQMASSGASGGKIDNSVLVLIVGLSTVGAGAYAYKTMKEDEKRYNERISGLGLTPEQKQKKAALSASEGEEVPQDKAPSHVPFLLIGGGTAAFAAARSIRARDPGARVLIVSEDPELPYMRPPLSKELWFSDDPNVTKTLRFKQWNGKERSIYFQPPSFYVSAQDLPHIENGGVAVLTGKKVVQLDVRDNMVKLNDGSQITYEKCLIATGGTPRSLSAIDRAGAEVKSRTTLFRKIGDFRSLEKISREVKSITIIGGGFLGSELACALGRKARALGTEVIQLFPEKGNMGKILPEYLSNWTMEKVRREGVKVMPNAIVQSVGVSSGKLLIKLKDGRKVETDHIVAAVGLEPNVELAKTGGLEIDSDFGGFRVNAELQARSNIWVAGDAACFYDIKLGRRRVEHHDHAVVSGRLAGENMTGAAKPYWHQSMFWSDLGPDVGYEAIGLVDSSLPTVGVFAKATAQDNPKSATEQSGTGIRSESETESEASEITIPPSTPAVPQAPVQGEDYGKGVIFYLRDKVVVGIVLWNIFNRMPIARKIIKDGEQHEDLNEVAKLFNIHED

SEQ ID NO: 15260 - protein, 326 aa, Homo sapiens
MFRCGGLAAGALKQKLVPLVRTVCVRSPRQRNRLPARALGTEVIQLFPEKGNMGKILPEYLSNWTMEKVRREGVKVMPNAIVQSVGVSSGKLLIKLKDGRKVETDHIVAAVGLEPNVELAKTGGLEIDSDFGGFRVNAELQARSNIWVAGDAACFYDIKLGRRRVEHHDHAVVSGRLAGENMTGAAKPYWHQSMFWSDLGPDVGYEAIGLVDSSLPTVGVFAKATAQDNPKSATEQSGTGIRSESETESEASEITIPPSTPAVPQAPVQGEDYGKGVIFYLRDKVVVGIVLWNIFNRMPIARKIIKDGEQHEDLNEVAKLFNIHED

SEQ ID NO: 15261 - protein, 609 aa, Homo sapiens
MFRCGGLAAGALKQKLVPLVRTVCVRSPRQRNRLPVVQSHHLGSPSRSLASTGASGKDGSNLVYFLIVGATVTGAGVYYAYKTMKEDEKRYNERISGLGLTPEQKQKKAALSASEGEEVPQDKAPSHVPFLLIGGGTAAFAAARSIRARDPGARVLIVSEDPELPYMRPPLSKELWFSDDPNVTKTLRFKQWNGKERSIYFQPPSFYVSAQDLPHIENGGVAVLTGKKVVQLDVRDNMVKLNDGSQITYEKCLIATGGTPRSLSAIDRAGAEVKSRTTLFRKIGDFRSLEKISREVKSITIIGGGFLGSELACALGRKARALGTEVIQLFPEKGNMGKILPEYLSNWTMEKVRREGVKVMPNAIVQSVGVSSGKLLIKLKDGRKVETDHIVAAVGLEPNVELAKTGGLEIDSDFGGFRVNAELQARSNIWVAGDAACFYDIKLGRRRVEHHDHAVVSGRLAGENMTGAAKPYWHQSMFWSDLGPDVGYEAIGLVDSSLPTVGVFAKATAQDNPKSATEQSGTGIRSESETESEASEITIPPSTPAVPQAPVQGEDYGKGVIFYLRDKVVVGIVLWNIFNRMPIARKIIKDGEQHEDLNEVAKLFNIHED

SEQ ID NO: 15262 - protein, 324 aa, Homo sapiens
MFRCGGLAAGALKQKLVPLVRTVCVRSPRQRNRLPGNLFQRWHVPLELQMTRQMASSGASGGKIDNSVLVLIVGLSTVGAGAYAYKTMKEDEKRYNERISGLGLTPEQKQKKAALSASEGEEVPQDKAPSHVPFLLIGGGTAAFAAARSIRARDPGARVLIVSEDPELPYMRPPLSKELWFSDDPNVTKTLRFKQWNGKERSIYFQPPSFYVSAQDLPHIENGGVAVLTGKKVVQLDVRDNMVKLNDGSQITYEKCLIATGGTPRSLSAIDRAGAEVKSRTTLFRKIGDFRSLEKISREVKSITIIGGGFLGSELACALGRKDI

SEQ ID NO: 15263 - protein, 261 aa, Homo sapiens
MEKVRREGVKVMPNAIVQSVGVSSGKLLIKLKDGRKVETDHIVAAVGLEPNVELAKTGGLEIDSDFGGFRVNAELQARSNIWVAGDAACFYDIKLGRRRVEHHDHAVVSGRLAGENMTGAAKPYWHQSMFWSDLGPDVGYEAIGLVDSSLPTVGVFAKATAQDNPKSATEQSGTGIRSESETESEASEITIPPSTPAVPQAPVQGEDYGKGVIFYLRDKVVVGIVLWNIFNRMPIARKIIKDGEQHEDLNEVAKLFNIHED

SEQ ID NO: 15264 - protein, 43 aa, Homo sapiens
MFRCGGLAAGALKQKLVPLVRTVCVRSPRQRNRLPGLQDYERG

SEQ ID NO: 15265 - protein, 292 aa, Homo sapiens
MNPFWSMSTSSVRKRSEGEEKTLTGDVKTSPPRTAPKKQLPSIPKNALPITKPTSPAPAAQSTNGTHASYGPFYLEYSLLAEFTLVVKQKLPGVYVQPSYRSALMWFGVIFIRHGLYQDGVFKFTVYIPDNYPDGDCPRLVFDIPVFHPLVDPTSGELDVKRAFAKWRRNHNHIWQVLMYARRVFYKIDTASPLNPEAAVLYEKDIQLFKSKVVDSVKVCTARLFDQPKIEDPYAISFSPWNPSVHDEAREKMLTQKKPEEQHNKSVHVAGLSWVKPGSVQPFSKEEKTVAT

SEQ ID NO: 15266 - protein, 293 aa, Homo sapiens
MNPFWSMSTSSVRKRSEGEEKTLTGDVKTSPPRTAPKKQLPSIPKNALPITKPTSPAPAAQSTNGTHASYGPFYLEYSLLAEFTLVVKQKLPGVYVQPSYRSALMWFGVIFIRHGLYQDGVFKFTVYIPDNYPDGDCPRLVFDIPVFHPLVDPTSGELDVKRAFAKWRRNHNHIWQVLMYARRVFYKIDTASPLNPEAAVLYEKDIQLFKSKVVDSVKVCTARLFDQPKIEDPYAISFSPWNPSVHDEAREKMLTQKKKPEEQHNKSVHVAGLSWVKPGSVQPFSKEEKTVAT

SEQ ID NO: 15267 - protein, 528 aa, Homo sapiens
MDHCGALFLCLCLLTLQNATTETWEELLSYMENMQVSRGRSSVFSSRQLHQLEQMLLNTSFPGYNLTLQTPTIQSLAFKLSCDFSGLSLTSATLKRVPQAGGQHARGQHAMQFPAELTRDACKTRPRELRLICIYFSNTHFFKDENNSSLLNNYVLGAQLSHGHVNNLRDPVNISFWHNQSLEGYTLTCVFWKEGARKQPWGGWSPEGCRTEQPSHSQVLCRCNHLTYFAVLMQLSPALVPAELLAPLTYISLVGCSISIVASLITVLLHFHFRKQSDSLTRIHMNLHASVLLLNIAFLLSPAFAMSPVPGSACTALAAALHYALLSCLTWMAIEGFNLYLLLGRVYNIYIRRYVFKLGVLGWGAPALLVLLSLSVKSSVYGPCTIPVFDSWENGTGFQNMSICWVRSPVVHSVLVMGYGGLTSLFNLVVLAWALWTLRRLRERADAPSVRACHDTVTVLGLTVLLGTTWALAFFSFGVFLLPQLFLFTILNSLYGFFLFLWFCSQRCRSEAEAKAQIEAFSSSQTTQ

SEQ ID NO: 15268 - protein, 368 aa, Homo sapiens
MSTTGQVIRCKAAILWKPGAPFSIEEVEVAPPKAKEVRIKVVATGLCGTEMKVLGSKHLDLLYPTILGHEGAGIVESIGEGVSTVKPGDKVITLFLPQCGECTSCLNSEGNFCIQFKQSKTQLMSDGTSRFTCKGKSIYHFGNTSTFCEYTVIKEISVAKIDAVAPLEKVCLISCGFSTGFGAAINTAKVTPGSTCAVFGLGGVGLSVVMGCKAAGAARIIGVDVNKEKFKKAQELGATECLNPQDLKKPIQEVLFDMTDAGIDFCFEAIGNLDVLAAALASCNESYGVCVVVGVLPASVQLKISGQLFFSGRSLKGSVFGGWKSRQHIPKLVADYMAEKLNLDPLITHTLNLDKINEAVELMKTGKW

SEQ ID NO: 15269 - protein, 375 aa, Homo sapiens
MSTTGQVIRCKAAILWKPGAPFSIEEVEVAPPKAKEVRIKVVATGLCGTEMKVLGSKHLDLLYPTILGHEGAGIVESIGEGVSTVKPGDKVITLFLPQCGECTSCLNSEGNFCIQFKQSKTQLMSDGTSRFTCKGKSIYHFGNTSTFCEYTVIKEISVAKIDAVAPLEKVCLISCGFSTGFGAAINTAKVTPGSTCAVFGLGGVGLSVVMGCKAAGAARIIGVDVNKEKFKKAQELGATECLNPQDLKKPIQEVLFDMTDAGIDFCFEAIGNLDVLAAALASCNESYGVCVVVGVLPASVQLKISGQLFFSGRSLKGSVFGGWKSRQHIPKLVADYMAEKLNLDPLITHTLNLDKINEAVELMKTGKCIRCILLL

SEQ ID NO: 15270 - protein, 861 aa, Homo sapiens
MELKRGKTFIKSSLQVSHEKPPDPAAVAAAREGTGPWSVLPGGQQRPHSEKGPQASPSAQEYDRCPNKGAQLDPKGGPAALCGATFKPVRKCKTHDSMSGAGRATAATGQLVGSASFPGSPGSRRMIDYRHFVPQMPFVPAVAKSIPRKRISLKRPKKCFRNLFHIRRNKTEDLASLAAEGKSLPSPGDPSDPGGRRSKAFLPPGEGPGLDGLCQDLLDSELLADASFGLCRALCEDVASLQSFDSLTGCGEVFADESSVPSLELNEGPESPTQAAQGLESKVPRGPLQGSVEQLASPAQNEASDFTRFWDSVNRSVRQQQRALLGPWLSGPQGTDRDQSRLDTAGLAELPLCPCRDPRSGSKASSIDTGTPKSEQPESVSTSDEGYYDSFSPGLEEDKKEAESPGTPAATFPRDSYSGDALYELFHDPSEGPLGPSPDDDLCVSESLSGPALGTPLSICSFRVGAEENLAPAPGPDLLSQGFLQSSWKGKECLLKLCDTELAITMGIVSWLRRGPTPRAPPTPGQPAAPPGSQGAPRAPTEKLGGREGLASDAGGATVCSAPSRQELWAHPGTTGLLAGESKALGGATQGTGTLSRDASREEETRGHSEGLFSSMESAATSTTDTSGKNKAPVPSTWPCSQKEPGPPGVLGCFRGPWRPGHGGDTLDAEPMLAGCVARVAALKISSNEQPPAAWPPRQDMGSGLFGQRWARGPDMLEQKQSSSSPSMTTIHGLPYSASTQDQRCRDRVQDLSWLRVEPTGLGVQAWASVEDQPLQLSTEAVEQVAHGSQLDSEPRSAPAARWSSQGHHPESLGLTLNSQQEGGVSASAPECRCSLLAREGLLCGQPEVGASGPAMAEPHL

SEQ ID NO: 15271 - protein, 386 aa, Homo sapiens
MFAEIQIQDKDRMGTAGKVIKCKAAVLWEQKQPFSIEEIEVAPPKTKEVRIKILATGICRTDDHVIKGTMVSKFPVIVGHEATGIVESIGEGVTTVKPGDKVIPLFLPQCRECNACRNPDGNLCIRSDITGRGVLADGTTRFTCKGKPVHHFMNTSTFTEYTVVDESSVAKIDDAAPPEKVCLIGCGFSTGYGAAVKTGKVKPGSTCVVFGLGGVGLSVIMGCKSAGASRIIGIDLNKDKFEKAMAVGATECISPKDSTKPISEVLSEMTGNNVGYTFEVIGHLETMIDALASCHMNYGTSVVVGVPPSAKMLTYDPMLLFTGRTWKGCVFGGLKSRDDVPKLVTEFLAKKFDLDQLITHVLPFKKISEGFELLNSGQSIRTVLTF

SEQ ID NO: 15272 - protein, 394 aa, Homo sapiens
MKCLVSRHTVRETLDMVFQRMSVEAGVIKCKAAVLWEQKQPFSIEEIEVAPPKTKEVRIKILATGICRTDDHVIKGTMVSKFPVIVGHEATGIVESIGEGVTTVKPGDKVIPLFLPQCRECNACRNPDGNLCIRSDITGRGVLADGTTRFTCKGKPVHHFMNTSTFTEYTVVDESSVAKIDDAAPPEKVCLIGCGFSTGYGAAVKTGKVKPGSTCVVFGLGGVGLSVIMGCKSAGASRIIGIDLNKDKFEKAMAVGATECISPKDSTKPISEVLSEMTGNNVGYTFEVIGHLETMIDALASCHMNYGTSVVVGVPPSAKMLTYDPMLLFTGRTWKGCVFGGLKSRDDVPKLVTEFLAKKFDLDQLITHVLPFKKISEGFELLNSGQSIRTVLTF

SEQ ID NO: 15273 - protein, 468 aa, Homo sapiens
MDPLGDTLRRLREAFHAGRTRPAEFRAAQLQGLGRFLQENKQLLHDALAQDLHKSAFESEVSEVAISQGEVTLALRNLRAWMKDERVPKNLATQLDSAFIRKEPFGLVLIIAPWNYPLNLTLVPLVGALAAGNCVVLKPSEISKNVEKILAEVLPQYVDQSCFAVVLGGPQETGQLLEHRFDYIFFTGSPRVGKIVMTAAAKHLTPVTLELGGKNPCYVDDNCDPQTVANRVAWFRYFNAGQTCVAPDYVLCSPEMQERLLPALQSTITRFYGDDPQSSPNLGRIINQKQFQRLRALLGCGRVAIGGQSDESDRYIAPTVLVDVQEMEPVMQEEIFGPILPIVNVQSLDEAIEFINRREKPLALYAFSNSSQVVKRVLTQTSSGGFCGNDGFMHMTLASLPFGGVGASGMGRYHGKFSFDTFSHHRACLLRSPGMEKLNALRYPPQSPRRLRMLLVAMEAQGCSCTLL

SEQ ID NO: 15274 - protein, 431 aa, Homo sapiens
MDPLGDTLRRLREAFHAGRTRPAEFRAAQLQGLGRFLQENKQLLHDALAQDLHKATQLDSAFIRKEPFGLVLIIAPWNYPLNLTLVPLVGALAAGNCVVLKPSEISKNVEKILAEVLPQYVDQSCFAVVLGGPQETGQLLEHRFDYIFFTGSPRVGKIVMTAAAKHLTPVTLELGGKNPCYVDDNCDPQTVANRVAWFRYFNAGQTCVAPDYVLCSPEMQERLLPALQSTITRFYGDDPQSSPNLGRIINQKQFQRLRALLGCGRVAIGGQSDESDRYIAPTVLVDVQEMEPVMQEEIFGPILPIVNVQSLDEAIEFINRREKPLALYAFSNSSQVVKRVLTQTSSGGFCGNDGFMHMTLASLPFGGVGASGMGRYHGKFSFDTFSHHRACLLRSPGMEKLNALRYPPQSPRRLRMLLVAMEAQGCSCTLL

SEQ ID NO: 15275 - protein, 376 aa, Homo sapiens
MESYDVIANQPVVIDNGSGVIKAGFAGDQIPKYCFPNYVGRPKHVRVMAGALEGDIFIGPKAEEHRGLLSIRYPMEHGIVKDWNDMERIWQYVYSKDQLQTFSEEHPVLLTEAPLNPRKNRERAAEVFFETFNVPALFISMQAVLSLYATGRTTGVVLDSGDGVTHAVPIYEGFAMPHSIMRIDIAGRDVSRFLRLYLRKEGYDFHSSSEFEIVKAIKERACYLSINPQKDETLETEKAQYYLPDGSTIEIGPSRFRAPELLFRPDLIGEESEGIHEVLVFAIQKSDMDLRRTLFSNIVLSGGSTLFKGFGDRLLSEVKKLAPKDVKIRISAPQERLYSTWIGGSILASLDTFKKMWVSKKEYEEDGARSIHRKTF

SEQ ID NO: 15276 - protein, 466 aa, Homo sapiens
MVFLSGNASDSSNCTQPPAPVNISKAILLGVILGGLILFGVLGNILVILSVACHRHLHSVTHYYIVNLAVADLLLTSTVLPFSAIFEVLGYWAFGRVFCNIWAAVDVLCCTASIMGLCIISIDRYIGVSYPLRYPTIVTQRRGLMALLCVWALSLVISIGPLFGWRQPAPEDETICQINEEPGYVLFSALGSFYLPLAIILVMYCRVYVVAKRESRGLKSGLKTDKSDSEQVTLRIHRKNAPAGGSGMASAKTKTHFSVRLLKFSREKKAAKTLGIVVGCFVLCWLPFFLVMPIGSFFPDFKPSETVFKIVFWLGYLNSCINPIIYPCSSQEFKKAFQNVLRIQCLCRKQSSKHALGYTLHPPSQAVEGQHKDMVRIPVGSRETFYRISKTDGVCEWKFFSSMPRGSARITVSKDQSSCTTARVRSKSFLQVCCCVGPSTPSLDKNHQVPTIKVHTISLSENGEEV

SEQ ID NO: 15277 - protein, 475 aa, Homo sapiens
MVFLSGNASDSSNCTQPPAPVNISKAILLGVILGGLILFGVLGNILVILSVACHRHLHSVTHYYIVNLAVADLLLTSTVLPFSAIFEVLGYWAFGRVFCNIWAAVDVLCCTASIMGLCIISIDRYIGVSYPLRYPTIVTQRRGLMALLCVWALSLVISIGPLFGWRQPAPEDETICQINEEPGYVLFSALGSFYLPLAIILVMYCRVYVVAKRESRGLKSGLKTDKSDSEQVTLRIHRKNAPAGGSGMASAKTKTHFSVRLLKFSREKKAAKTLGIVVGCFVLCWLPFFLVMPIGSFFPDFKPSETVFKIVFWLGYLNSCINPIIYPCSSQEFKKAFQNVLRIQCLCRKQSSKHALGYTLHPPSQAVEGQHKDMVRIPVGSRETFYRISKTDGVCEWKFFSSMPRGSARITVSKDQSSCTTARTKSRSVTRLECSGMILAHCNLRLPGSRDSPASASQAAGTTGMCHQADATRPS

SEQ ID NO: 15278 - protein, 429 aa, Homo sapiens
MVFLSGNASDSSNCTQPPAPVNISKAILLGVILGGLILFGVLGNILVILSVACHRHLHSVTHYYIVNLAVADLLLTSTVLPFSAIFEVLGYWAFGRVFCNIWAAVDVLCCTASIMGLCIISIDRYIGVSYPLRYPTIVTQRRGLMALLCVWALSLVISIGPLFGWRQPAPEDETICQINEEPGYVLFSALGSFYLPLAIILVMYCRVYVVAKRESRGLKSGLKTDKSDSEQVTLRIHRKNAPAGGSGMASAKTKTHFSVRLLKFSREKKAAKTLGIVVGCFVLCWLPFFLVMPIGSFFPDFKPSETVFKIVFWLGYLNSCINPIIYPCSSQEFKKAFQNVLRIQCLCRKQSSKHALGYTLHPPSQAVEGQHKDMVRIPVGSRETFYRISKTDGVCEWKFFSSMPRGSARITVSKDQSSCTTARGHTPMT

SEQ ID NO: 15279 - protein, 455 aa, Homo sapiens
MVFLSGNASDSSNCTQPPAPVNISKAILLGVILGGLILFGVLGNILVILSVACHRHLHSVTHYYIVNLAVADLLLTSTVLPFSAIFEVLGYWAFGRVFCNIWAAVDVLCCTASIMGLCIISIDRYIGVSYPLRYPTIVTQRRGLMALLCVWALSLVISIGPLFGWRQPAPEDETICQINEEPGYVLFSALGSFYLPLAIILVMYCRVYVVAKRESRGLKSGLKTDKSDSEQVTLRIHRKNAPAGGSGMASAKTKTHFSVRLLKFSREKKAAKTLGIVVGCFVLCWLPFFLVMPIGSFFPDFKPSETVFKIVFWLGYLNSCINPIIYPCSSQEFKKAFQNVLRIQCLCRKQSSKHALGYTLHPPSQAVEGQHKDMVRIPVGSRETFYRISKTDGVCEWKFFSSMPRGSARITVSKDQSSCTTARRGMDCRYFTKNCREHIKHVNFMMPPWRKGSEC

SEQ ID NO: 15280 - protein, 297 aa, Homo sapiens
MVFLSGNASDSSNCTQPPAPVNISKAILLGVILGGLILFGVLGNILVILSVACHRHLHSVTHYYIVNLAVADLLLTSTVLPFSAIFEVLGYWAFGRVFCNIWAAVDVLCCTASIMGLCIISIDRYIGVSYPLRYPTIVTQRRGLMALLCVWALSLVISIGPLFGWRQPAPEDETICQINEEPGYVLFSALGSFYLPLAIILVMYCRVYVVAKRESRGLKSGLKTDKSDSEQVTLRIHRKNAPAGGSGMASAKTKTHFSVRLLKFSREKKAAKTLGIVVGCFVLCWLPFFLVMPIGKS

SEQ ID NO: 15281 - protein, 342 aa, Homo sapiens
MVFLSGNASDSSNCTQPPAPVNISKAILLGVILGGLILFGVLGNILVILSVACHRHLHSVTHYYIVNLAVADLLLTSTVLPFSAIFEVLGYWAFGRVFCNIWAAVDVLCCTASIMGLCIISIDRYIGVSYPLRYPTIVTQRRGLMALLCVWALSLVISIGPLFGWRQPAPEDETICQINEEPGYVLFSALGSFYLPLAIILVMYCRVYVVAKRESRGLKSGLKTDKSDSEQVTLRIHRKNAPAGGSGMASAKTKTHFSVRLLKFSREKKAAKTLGIVVGCFVLCWLPFFLVMPIDEETEAQEGKNDSPSFKQPVHHAAVLGLEVMEKENLEGVSRKDTCGVW

SEQ ID NO: 15282 - protein, 324 aa, Homo sapiens
MVFLSGNASDSSNCTQPPAPVNISKAILLGVILGGLILFGVLGNILVILSVACHRHLHSVTHYYIVNLAVADLLLTSTVLPFSAIFEVLGYWAFGRVFCNIWAAVDVLCCTASIMGLCIISIDRYIGVSYPLRYPTIVTQRRGLMALLCVWALSLVISIGPLFGWRQPAPEDETICQINEEPGYVLFSALGSFYLPLAIILVMYCRVYVVAKRESRGLKSGLKTDKSDSEQVTLRIHRKNAPAGGSGMASAKTKTHFSVRLLKFSREKKAAKTLGIVVGCFVLCWLPFFLVMPIGTYILKYDVLFWRKGLSVCTRLRERKEIKN

SEQ ID NO: 15283 - protein, 370 aa, Homo sapiens
MVFLSGNASDSSNCTQPPAPVNISKAILLGVILGGLILFGVLGNILVILSVACHRHLHSVTHYYIVNLAVADLLLTSTVLPFSAIFEVLGYWAFGRVFCNIWAAVDVLCCTASIMGLCIISIDRYIGVSYPLRYPTIVTQRRGLMALLCVWALSLVISIGPLFGWRQPAPEDETICQINEEPGYVLFSALGSFYLPLAIILVMYCRVYVVAKRESRGLKSGLKTDKSDSEQVTLRIHRKNAPAGGSGMASAKTKTHFSVRLLKFSREKKAAKTLGIVVGCFVLCWLPFFLVMPIDEVSLCHQAGVQWHDLGSLQPPPPGFKRFSCLSLPSSWDYRDVPPGRRHQAQLIFVFLVETGFHHVGQDDLDLLTS

SEQ ID NO: 15284 - protein, 372 aa, Homo sapiens
MVFLSGNASDSSNCTQPPAPVNISKAILLGVILGGLILFGVLGNILVILSVACHRHLHSVTHYYIVNLAVADLLLTSTVLPFSAIFEVLGYWAFGRVFCNIWAAVDVLCCTASIMGLCIISIDRYIGVSYPLRYPTIVTQRRGLMALLCVWALSLVISIGPLFGWRQPAPEDETICQINEEPGYVLFSALGSFYLPLAIILVMYCRVYVVAKRESRGLKSGLKTDKSDSEQVTLRIHRKNAPAGGSGMASAKTKTHFSVRLLKFSREKKAAKTLGIVVGCFVLCWLPFFLVMPIGTHTHDMKPASRPRLLSLLPKEGEHETHHWSCDPLSLESTPGAQEPCLTLGFTSLSSIHLTKAQIQHVTVTDTGKTVT

SEQ ID NO: 15285 - protein, 577 aa, Homo sapiens
MHWLRKVQGLCTLWGTQMSSRTLYINSRQLVSLQWGHQEVPAKFNFASDVLDHWADMEKAGKRLPSPALWWVNGKGKELMWNFRELSENSQQAANILSGACGLQRGDRVAVMLPRVPEWWLVILGCIRAGLIFMPGTIQMKSTDILYRLQMSKAKAIVAGDEVIQEVDTVASECPSLRIKLLVSEKSCDGWLNFKKLLNEASTTHHCVETGSQEASAIYFTSGTSGLPKMAEHSYSSLGLKAKMDAGWTGLQASDIMWTISDTGWILNILGSLLESWTLGACTFVHLLPKFDPLVILKTLSSYPIKSMMGAPIVYRMLLQQDLSSYKFPHLQNCLAGGESLLPETLENWRAQTGLDIREFYGQTETGLTCMVSKTMKIKPGYMGTAASCYDVQVIDDKGNVLPPGTEGDIGIRVKPIRPIGIFSGYVENPDKTAANIRGDFWLLGDRGIKDEDGYFQFMGRADDIINSSGYRIGPSEVENALMKHPAVVETAVISSPDPVRGEVVKAFVILASQFLSHDPEQLTKELQQHVKSVTAPYKYPRKIEFVLNLPKTVTGKIQRTKLRDKEWKMSGKARAQ

SEQ ID NO: 15286 - protein, 493 aa, Homo sapiens
MTRALCSALRQALLLLAAAAELSPGLKCVCLLCDSSNFTCQTEGACWASVMLTNGKEQVIKSCVSLPELNAQVFCHSSNNVTKTECCFTDFCNNITLHLPTASPNAPKLGPMELAIIITVPVCLLSIAAMLTVWACQGRQCSYRKKKRPNVEEPLSECNLVNAGKTLKDLIYDVTASGSGSGLPLLVQRTIARTIVLQEIVGKGRFGEVWHGRWCGEDVAVKIFSSRDERSWFREAEIYQTVMLRHENILGFIAADNKDNGTWTQLWLVSEYHEQGSLYDYLNRNIVTVAGMIKLALSIASGLAHLHMEIVGTQGKPAIAHRDIKSKNILVKKCETCAIADLGLAVKHDSILNTIDIPQNPKVGTKRYMAPEMLDDTMNVNIFESFKRADIYSVGLVYWEIARRCSVGGIVEEYQLPYYDMVPSDPSIEEMRKVVCDQKFRPSIPNQWQSCEALRVMGRIMRECWYANGAARLTALRIKKTISQLCVKEDCKA

SEQ ID NO: 15287 - protein, 336 aa, Homo sapiens
MTRALCSALRQALLLLAAAAELSPGLKCVCLLCDSSNFTCQTEGACWASVMLTNGKEQVIKSCVSLPELNAQVFCHSSNNVTKTECCFTDFCNNITLHLPTDNGTWTQLWLVSEYHEQGSLYDYLNRNIVTVAGMIKLALSIASGLAHLHMEIVGTQGKPAIAHRDIKSKNILVKKCETCAIADLGLAVKHDSILNTIDIPQNPKVGTKRYMAPEMLDDTMNVNIFESFKRADIYSVGLVYWEIARRCSVGGIVEEYQLPYYDMVPSDPSIEEMRKVVCDQKFRPSIPNQWQSCEALRVMGRIMRECWYANGAARLTALRIKKTISQLCVKEDCKA

SEQ ID NO: 15288 - protein, 413 aa, Homo sapiens
MTRALCSALRQALLLLAAAAELSPGLKCVCLLCDSSNFTCQTEGACWASVMLTNGKEQVIKSCVSLPELNAQVFCHSSNNVTKTECCFTDFCNNITLHLPTGLPLLVQRTIARTIVLQEIVGKGRFGEVWHGRWCGEDVAVKIFSSRDERSWFREAEIYQTVMLRHENILGFIAADNKDNGTWTQLWLVSEYHEQGSLYDYLNRNIVTVAGMIKLALSIASGLAHLHMEIVGTQGKPAIAHRDIKSKNILVKKCETCAIADLGLAVKHDSILNTIDIPQNPKVGTKRYMAPEMLDDTMNVNIFESFKRADIYSVGLVYWEIARRCSVGGIVEEYQLPYYDMVPSDPSIEEMRKVVCDQKFRPSIPNQWQSCEALRVMGRIMRECWYANGAARLTALRIKKTISQLCVKEDCKA

SEQ ID NO: 15289 - protein, 443 aa, Homo sapiens
MLTNGKEQVIKSCVSLPELNAQVFCHSSNNVTKTECCFTDFCNNITLHLPTASPNAPKLGPMELAIIITVPVCLLSIAAMLTVWACQGRQCSYRKKKRPNVEEPLSECNLVNAGKTLKDLIYDVTASGSGSGLPLLVQRTIARTIVLQEIVGKGRFGEVWHGRWCGEDVAVKIFSSRDERSWFREAEIYQTVMLRHENILGFIAADNKDNGTWTQLWLVSEYHEQGSLYDYLNRNIVTVAGMIKLALSIASGLAHLHMEIVGTQGKPAIAHRDIKSKNILVKKCETCAIADLGLAVKHDSILNTIDIPQNPKVGTKRYMAPEMLDDTMNVNIFESFKRADIYSVGLVYWEIARRCSVGGIVEEYQLPYYDMVPSDPSIEEMRKVVCDQKFRPSIPNQWQSCEALRVMGRIMRECWYANGAARLTALRIKKTISQLCVKEDCKA

SEQ ID NO: 15290 - protein, 701 aa, Homo sapiens [sequence omitted]

SEQ ID NO: 15291 - protein, 714 aa, Homo sapiens
MGLPEERVRSGSGSRGQEEAGAGGRARSWSPPPEVSRSAHVPSLQRYRELHRRSVEEPREFWGDIAKEFYWKTPCPGPFLRYNFDVTKGKIFIEWMKGATTNICYNVLDRNVHEKKLGDKVAFYWEGNEPGETTQITYHQLLVQVCQFSNVLRKQGIQKGDRVAIYMPMIPELVVAMLACARIGALHSIVFAGFSSESLCERILDSSCSLLITTDAFYRGEKLVNLKELADEALQKCQEKGFPVRCCIVVKHLGRAELGMGDSTSQSPPIKRSCPDVQGKLKEKSKRVQPQISWNQGIDLWWHELMQEAGDECEPEWCDAEDPLFILYTSGSTGKPKGVVHTVGGYMLYVATTFKYVFDFHAEDVFWCTADIGWITGHSYVTYGPLANGATSVLFEGIPTYPDVNRLWSIVDKYKVTKFYTAPTAIRLLMKFGDEPVTKHSRASLQVLGTVGEPINPEAWLWYHRVVGAQRCPIVDTFWQTETGGHMLTPLPGATPMKPGSATFPFFGVAPAILNESGEELEGEAEGYLVFKQPWPGIMRTVYGNHERFETTYFKKFPGYYVTGDGCQRDQDGYYWITGRIDDMLNVSGHLLSTAEVESALVEHEAVAEAAVVGHPHPVKGECLYCFVTLCDGHTFSPKLTEELKKQIREKIGPIATPDYIQNAPGLPKTRSGKIMRRVLRKIAQNDHDLGDMSTVADPSVISHLFSHRCLTIQ

SEQ ID NO: 15292 - protein, 261 aa, Homo sapiens
MDRFLVKGAQGGLLRKQEEQEPTGEEPAVLGGDKESTRKRPRREAPGNGGHSAGPSWRHIRAEGLDCSYTVLFGKAEADEIFQELEKEVEYFTGALARVQVFGKWHSVPRKQATYGDAGLTYTFSGLTLSPKPWIPVLERIRDHVSGVTGQTFNFVLINRYKDGCDHIGEHRDDERELAPGSPIASVSFGACRDFVFRHKDSRGKSPSRRVAVVRLPLAHGSLLMMNHPTNTHWYHSLPVRKKVLAPRVNLTFRKILLTKK

SEQ ID NO: 15293 - protein, 157 aa, Homo sapiens
MDRFLVKGAQGGLLRKQEEQEPTGEEPAVLGGDKESTRKRPRREAPGNGGHSAGPSWRHIRAEGLDCSYTVLFGKAEADEIFQELEKEVEYFTGIKMAVTTSGSTEMMKENWPLGAPLPLSPSVPAETLSSGIRIPVGKAPPGGWRWSGCRWPTGAY

SEQ ID NO: 15294 - protein, 462 aa, Homo sapiens
MASPALAAALAVAAAAGPNASGAGERGSGGVANASGASWGPPRGQYSAGAVAGLAAVVGFLIVFTVVGNVLVVIAVLTSRALRAPQNLFLVSLASADILVATLVMPFSLANELMAYWYFGQVWCGVYLALDVLFCTSSIVHLCAISLDRYWSVTQAVEYNLKRTPRRVKATIVAVWLISAVISFPPLVSLYRQPDGAAYPQCGLNDETWYILSSCIGSFFAPCLIMGLVYARIYRVAKLRTRTLSEKRAPVGPDGASPTTENGLGAAAGAGENGHCAPPPADVEPDESSAAAERRRRRGALRRGGRRRAGAEGGAGGADGQGAGPGAAESGALTASRSPGPGGRLSRASSRSVEFFLSRRRRARSSVCRRKVAQAREKRFTFVLAVVMGVFVLCWFPFFFSYSLYGICREACQVPGPLFKFFFWIGYCNSSLNPVIYTVFNQDFRRSFKHILFRRRRRGFRQ

SEQ ID NO: 15295 - protein, 375 aa, Homo sapiens
MDDDTAVLVIDNGSGMCKAGFAGDDAPQAVFPSIVGRPRHQGMMEGMHQKESYVGKEAQSKRGMLTLKYPMEHGIITNWDDMEKIWHHTFYNELRVAPEEHPILLTEAPLNPKANREKMTQIMFETFNTPAMYVAIQAVLSLYTSGRTTGIVMDSGDGFTHTVPIYEGNALPHATLRLDLAGRELTDYLMKILTERGYRFTTTAEQEIVRDIKEKLCYVALDSEQEMAMAASSSSVEKSYELPDGQVITIGNERFRCPEALFQPCFLGMESCGIHKTTFNSIVKSDVDIRKDLYTNTVLSGGTTMYPGIAHRMQKEITALAPSIMKIKIIAPPKRKYSVWVGGSILASLSTFQQMWISKQEYDESGPSIVHRKCF

SEQ ID NO: 15296 - protein, 903 aa, Homo sapiens
MAIQFRSLFPLALPGMLALLGWWWFFSRKKGHVSSHDEQQVEAGAVQLRADPAIKEPLPVEDVCPKVVSTPPSVTEPPEKELSTVSKLPAEPPALLQTHPPCRRSESSGILPNTTDMRLRPGTRRDDSTKLELALTGGEAKSIPLECPLSSPKGVLFSSKSAEVCKQDSPFSRVPRKVQPGYPVVPAEKRSSGERARETGGAEGTGDAVLGEKVLEEALLSREHVLELENSKGPSLASLEGEEDKGKSSSSQVVGPVQEEEYVAEKLPSRFIESAHTELAKDDAAPAPPVADAKAQDRGVEGELGNEESLDRNEEGLDRNEEGLDRNEESLDRNEEGLDRNEEIKRAAFQIISQVISEATEQVLATTVGKVAGRVCQASQLQGQKEESCVPVHQKTVLGPDTAEPATAEAAVAPPDAGLPLPGLPAEGSPPPKTYVSCLKSLLSSPTKDSKPNISAHHISLASCLALTTPSEELPDRAGILVEDATCVTCMSDSSQSVPLVASPGHCSDSFSTSGLEDSCTETSSSPRDKAITPPLPESTVPFSNGVLKGELSDLGAEDGWTMDAEADHSGGSDRNSMDSVDSCCSLKKTESFQNAQAGSNPKKVDLIIWEIEVPKHLVGRLIGKQGRYVSFLKQTSGAKIYISTLPYTQSVQICHIEGSQHHVDKALNLIGKKFKELNLTNIYAPPLPSLALPSLPMTSWLMLPDGITVEVIVVNQVNAGHLFVQQHTHPTFHALRSLDQQMYLCYSQPGIPTLPTPVEITVICAAPGADGAWWRAQVVASYEETNEVEIRYVDYGGYKRVKVDVLRQIRSDFVTLPFQGAEVLLDSVMPLSDDDQFSPEADAAMSEMTGNTALLAQVTSYSPTGLPLIQLWSVVGDEVVLINRSLVERGLAQWVDSYYTSL

SEQ ID NO: 15297 - protein, 593 aa, Homo sapiens
MAIQFRSLFPLALPGMLALLGWWWFFSRKKGHVSSHDEQQVEAGAVQLRADPAIKEPLPVEDVCPKVVSTPPSVTEPPEKELSTVSKLPAEPPALLQTHPPCRRSESSGILPNTTDMRLRPGTRRDDSTKLELALTGGEAKSIPLECPLSSPKGVLFSSKSAEVCKQDSPFSRVPRKVQPGYPVVPAEKRSSGERARETGGAEGTGDAVLGEKVLEEALLSREHVLELENSKGPSLASLEGEEDKGKSSSSQVVGPVQEEEYVAEKLPSRFIESAHTELAKDDAAPAPPVADAKAQDRGVEGELGNEESLDRNEEGLDRNEEGLDRNEESLDRNEEGLDRNEEIKRAAFQIISQVISEATEQVLATTVGKVAGRVCQASQLQGQKEESCVPVHQKTVLGPDTAEPATAEAAVAPPDAGLPLPGLPAEGSPPPKTYVSCLKSLLSSPTKDSKPNISAHHISLASCLALTTPSEELPDRAGILVEDATCVTCMSDSSQSVPLVASPGHCSDSFSTSGLEDSCTETSSSPRDKAITPPLPESTVPFSNGVLKGELSDLGAEDGWTMDAEADHSGVAAPPPGKRGTLITRCPGFFEC

SEQ ID NO: 15298 - protein, 1210 aa, Homo sapiens
MAAQSSLYNDDRNLLRIREKERRNQEAHQEKEAFPEKIPLFGEPYKTAKGDELSSRIQNMLGNYEEVKEFLSTKSHTHRLDASENRLGKPKYPLIPDKGSSIPSSSFHTSVHHQSIHTPASGPLSVGNISHNPKMAQPRTEPMPSLHAKSCGPPDSQHLTQDRLGQEGFGSSHHKKGDRRADGDHCASVTDSAPERELSPLISLPSPVPPLSPIHSNQQTLPRTQGSSKVHGSSNNSKGYCPAKSPKDLAVKVHDKETPQDSLVAPAQPPSQTFPPPSLPSKSVAMQQKPTAYVRPMDGQDQAPSESPELKPLPEDYRQQTFEKTDLKVPAKAKLTKLKMPSQSVEQTYSNEVHCVEEILKEMTHSWPPPLTAIHTPSTAEPSKFPFPTKDSQHVSSVTQNQKQYDTSSKTHSNSQQGTSSMLEDDLQLSDSEDSDSEQTPEKPPSSSAPPSAPQSLPEPVASAHSSSAESESTSDSDSSSDSESESSSSDSEENEPLETPAPEPEPPTTNKWQLDNWLTKVSQPAAPPEGPRSTEPPRRHPESKGSSDSATSQEHSESKDPPPKSSSKAPRAPPEAPHPGKRSCQKSPAQQEPPQRQTVGTKQPKKPVKASARAGSRTSLQGEREPGLLPYGSRDQTSKDKPKVKTKGRPRAAASNEPKPAVPPSSEKKKHKSSLPAPSKALSGPEPAKDNVEDRTPEHFALVPLTESQGPPHSGSGSRTSGCRQAVVVQEDSRKDRLPLPLRDTKLLSPLRDTPPPQSLMVKITLDLLSRIPQPPGKGSRQRKAEDKQPPAGKKHSSEKRSSDSSSKLAKKRKGEAERDCDNKKIRLEKEIKSQSSSSSSSHKESSKTKPSRPSSQSSKKEMLPPPPVSSSSQKPAKPALKRSRREADTCGQDPPKSASSTKSNHKDSSIPKQRRVEGKGSRSSSEHKGSSGDTANPFPVPSLPNGNSKPGKPQVKFDKQQADLHMREAKKMKQKAELMTDRVGKAFKYLEAVLSFIECGIATESESQSSKSAYSVYSETVDLIKFIMSLKSFSDATAPTQEKIFAVLCMRCQSILNMAMFRCKKDIAIKYSRTLNKHFESSSKVAQAPSPCIASTGTPSPLSPMPSPASSVGSQSSAGSVGSSGVAATISTPVTIQNMTSSYVTITSHVLTAFDLWEQAEALTRKNKEFFARLSTNVCTLALNSSLVDLVHYTRQGFQQLQELTKTP

SEQ ID NO: 15299 - protein, 1218 aa, Homo sapiens
MAFTERVNSSGNSLYNDDRNLLRIREKERRNQEAHQEKEAFPEKIPLFGEPYKTAKGDELSSRIQNMLGNYEEVKEFLSTKSHTHRLDASENRLGKPKYPLIPDKGSSIPSSSFHTSVHHQSIHTPASGPLSVGNISHNPKMAQPRTEPMPSLHAKSCGPPDSQHLTQDRLGQEGFGSSHHKKGDRRADGDHCASVTDSAPERELSPLISLPSPVPPLSPIHSNQQTLPRTQGSSKVHGSSNNSKGYCPAKSPKDLAVKVHDKETPQDSLVAPAQPPSQTFPPPSLPSKSVAMQQKPTAYVRPMDGQDQAPSESPELKPLPEDYRQQTFEKTDLKVPAKAKLTKLKMPSQSVEQTYSNEVHCVEEILKEMTHSWPPPLTAIHTPSTAEPSKFPFPTKDSQHVSSVTQNQKQYDTSSKTHSNSQQGTSSMLEDDLQLSDSEDSDSEQTPEKPPSSSAPPSAPQSLPEPVASAHSSSAESESTSDSDSSSDSESESSSSDSEENEPLETPAPEPEPPTTNKWQLDNWLTKVSQPAAPPEGPRSTEPPRRHPESKGSSDSATSQEHSESKDPPPKSSSKAPRAPPEAPHPGKRSCQKSPAQQEPPQRQTVGTKQPKKPVKASARAGSRTSLQGEREPGLLPYGSRDQTSKDKPKVKTKGRPRAAASNEPKPAVPPSSEKKKHKSSLPAPSKALSGPEPAKDNVEDRTPEHFALVPLTESQGPPHSGSGSRTSGCRQAVVVQEDSRKDRLPLPLRDTKLLSPLRDTPPPQSLMVKITLDLLSRIPQPPGKGSRQRKAEDKQPPAGKKHSSEKRSSDSSSKLAKKRKGEAERDCDNKKIRLEKEIKSQSSSSSSSHKESSKTKPSRPSSQSSKKEMLPPPPVSSSSQKPAKPALKRSRREADTCGQDPPKSASSTKSNHKDSSIPKQRRVEGKGSRSSSEHKGSSGDTANPFPVPSLPNGNSKPGKPQVKFDKQQADLHMREAKKMKQKAELMTDRVGKAFKYLEAVLSFIECGIATESESQSSKSAYSVYSETVDLIKFIMSLKSFSDATAPTQEKIFAVLCMRCQSILNMAMFRCKKDIAIKYSRTLNKHFESSSKVAQAPSPCIARSTGTPSPLSPMPSPASSVGSQSSAGSVGSSGVAATISTPVTIQNMTSSYVTITSHVLTAFDLWEQAEALTRKNKEFFARLSTNVCTLALNSSLVDLVHYTRQGFQQLQELTKTP

SEQ ID NO: 15300 - protein, 1211 aa, Homo sapiens
MAAQSSLYNDDRNLLRIREKERRNQEAHQEKEAFPEKIPLFGEPYKTAKGDELSSRIQNMLGNYEEVKEFLSTKSHTHRLDASENRLGKPKYPLIPDKGSSIPSSSFHTSVHHQSIHTPASGPLSVGNISHNPKMAQPRTEPMPSLHAKSCGPPDSQHLTQDRLGQEGFGSSHHKKGDRRADGDHCASVTDSAPERELSPLISLPSPVPPLSPIHSNQQTLPRTQGSSKVHGSSNNSKGYCPAKSPKDLAVKVHDKETPQDSLVAPAQPPSQTFPPPSLPSKSVAMQQKPTAYVRPMDGQDQAPSESPELKPLPEDYRQQTFEKTDLKVPAKAKLTKLKMPSQSVEQTYSNEVHCVEEILKEMTHSWPPPLTAIHTPSTAEPSKFPFPTKDSQHVSSVTQNQKQYDTSSKTHSNSQQGTSSMLEDDLQLSDSEDSDSEQTPEKPPSSSAPPSAPQSLPEPVASAHSSSAESESTSDSDSSSDSESESSSSDSEENEPLETPAPEPEPPTTNKWQLDNWLTKVSQPAAPPEGPRSTEPPRRHPESKGSSDSATSQEHSESKDPPPKSSSKAPRAPPEAPHPGKRSCQKSPAQQEPPQRQTVGTKQPKKPVKASARAGSRTSLQGEREPGLLPYGSRDQTSKDKPKVKTKGRPRAAASNEPKPAVPPSSEKKKHKSSLPAPSKALSGPEPAKDNVEDRTPEHFALVPLTESQGPPHSGSGSRTSGCRQAVVVQEDSRKDRLPLPLRDTKLLSPLRDTPPPQSLMVKITLDLLSRIPQPPGKGSRQRKAEDKQPPAGKKHSSEKRSSDSSSKLAKKRKGEAERDCDNKKIRLEKEIKSQSSSSSSSHKESSKTKPSRPSSQSSKKEMLPPPPVSSSSQKPAKPALKRSRREADTCGQDPPKSASSTKSNHKDSSIPKQRRVEGKGSRSSSEHKGSSGDTANPFPVPSLPNGNSKPGKPQVKFDKQQADLHMREAKKMKQKAELMTDRVGKAFKYLEAVLSFIECGIATESESQSSKSAYSVYSETVDLIKFIMSLKSFSDATAPTQEKIFAVLCMRCQSILNMAMFRCKKDIAIKYSRTLNKHFESSSKVAQAPSPCIARSTGTPSPLSPMPSPASSVGSQSSAGSVGSSGVAATISTPVTIQNMTSSYVTITSHVLTAFDLWEQAEALTRKNKEFFARLSTNVCTLALNSSLVDLVHYTRQGFQQLQELTKTP

SEQ ID NO: 15301 - protein, 502 aa, Homo sapiens
MWTADEIAQLCYEHYGIRLPKKGKPEPNHEWTLLAAVVKIQSPADKACDTPDKPVQVTKEVVSMGTGTKCIGQSKMRKNGDILNDSHAEVIARRSFQRYLLHQLQLAATLKEDSIFVPGTQKGVWKLRRDLIFVFFSSHTPCGDASIIPMLEFEDQPCCPVFRNWAHNSSVEASSNLEAPGNERKCEDPDSPVTKKMRLEPGTAAREVTNGAAHHQSFGKQKSGPISPGIHSCDLTVEGLATVTRIAPGSAKVIDVYRTGAKCVPGEAGDSGKPGAAFHQVGLLRVKPGRGDRTRSMSCSDKMARWNVLGCQGALLMHLLEEPIYLSAVVIGKCPYSQEAMQRALIGRCQNVSALPKGFGVQELKILQSDLLFEQSRSAVQAKRADSPGRLVPCGAAISWSAVPEQPLDVTANGFPQGTTKKTIGSLQARSQISKVELFRSFQKLLSRIARDKWPHSLRVQKLDTYQEYKEAASSYQEAWSTLRKQVFGSWIRNPPDYHQFK

SEQ ID NO: 15302 - protein, 353 aa, Homo sapiens
MLEFEDQPCCPVFRNWAHNSSVEASSNLEAPGNERKCEDPDSPVTKKMRLEPGTAAREVTNGAAHHQSFGKQKSGPISPGIHSCDLTVEGLATVTRIAPGSAKVIDVYRTGAKCVPGEAGDSGKPGAAFHQVGLLRVKPGRGDRTRSMSCSDKMARWNVLGCQGALLMHLLEEPIYLSAVVIGKCPYSQEAMQRALIGRCQNVSALPKGFGVQELKILQSDLLFEQSRSAVQAKRADSPGRLVPCGAAISWSAVPEQPLDVTANGFPQGTTKKTIGSLQARSQISKVELFRSFQKLLSRIARDKWPHSLRVQKLDTYQEYKEAASSYQEAWSTLRKQVFGSWIRNPPDYHQFK

SEQ ID NO: 15303 - protein, 412 aa, Homo sapiens
MQTSILIKSSCRPQFQRRFHHRMQKQIQNIISILSSASVINSYDENDIRHSKPLLVQMDCNYNGYVAGIPNSLVTLSVCSGLRGTMQLKNISYGIEPMEAVSGFIHKIYEEKYADTNILLEENDTYTWFNSEYQVRKSSEKTDFIKLFPRYIEMHIVVDKNLFKPANMICRKSVGKECDFTEYCNGDLPYCLPDTYVRDGEYCDSGGAFCFQGKCRTFDKQCDDLIGRGSRGAPVFCYDEINTRGDNFGNCGTAHCLFQHILCGKLVCTWEHRDLISRPNLSVIYAHVRDQTCVSTYLPRRTPPPVNSPISITSYYSAEDRDETFVQDGSMCGPDMYCFEMHCKHVRFLMNLKLCDASNHCDRHGVCNNFNHCHCEKGYNPPYCQPKQGAFGSIDDGHLVPPTERSYMEEGR

SEQ ID NO: 15304 - protein, 113 aa, Homo sapiens
MDCNYNGYVAGIPNSLVTLSVCSGLRGTMQLKNISYGIEPMEAVSGFIHKIYEEKYADTNILLEENDTYTWFNSEYQVRKSSEKTDFIKLFPRYIEMHIVVDKNLVLWWCKGF

SEQ ID NO: 15305 - protein, 326 aa, Homo sapiens
MTLILGLIQSIKSEKVQKYSGGVKDFNICSLDDFKYISSHNGLTCLQTNPLEMPHRRICGNGLLEGSEECDCGTKDFKPANMICRKSVGKECDFTEYCNGDLPYCLPDTYVRDGEYCDSGGAFCFQGKCRTFDKQCDDLIGRGSRGAPVFCYDEINTRGDNFGNCGTAHCLFQHILCGKLVCTWEHRDLISRPNLSVIYAHVRDQTCVSTYLPRRTPPPVNSPISITSYYSAEDRDETFVQDGSMCGPDMYCFEMHCKHVRFLMNLKLCDASNHCDRHGVCNNFNHCHCEKGYNPPYCQPKQGAFGSIDDGHLVPPTERSYMEEGR

SEQ ID NO: 15306 - protein, 355 aa, Homo sapiens
MDCNYNGYVAGIPNSLVTLSVCSGLRGTMQLKNISYGIEPMEAVSGFIHKIYEEKYADTNILLEENDTYTWFNSEYQVRKSSEKTDFIKLFPRYIEMHIVVDKNLFKPANMICRKSVGKECDFTEYCNGDLPYCLPDTYVRDGEYCDSGGAFCFQGKCRTFDKQCDDLIGRGSRGAPVFCYDEINTRGDNFGNCGTAHCLFQHILCGKLVCTWEHRDLISRPNLSVIYAHVRDQTCVSTYLPRRTPPPVNSPISITSYYSAEDRDETFVQDGSMCGPDMYCFEMHCKHVRFLMNLKLCDASNHCDRHGVCNNFNHCHCEKGYNPPYCQPKQGAFGSIDDGHLVPPTERSYMEEGR

SEQ ID NO: 15307 - protein, 333 aa, Homo sapiens
MDCNYNGYVAGIPNSLVTLSVCSGLRGTMQLKNISYGIEPMEAVSGFIHKIYEEKYADTNILLEENDTYTWFNSEYQVRKSSEFKPANMICRKSVGKECDFTEYCNGDLPYCLPDTYVRDGEYCDSGGAFCFQGKCRTFDKQCDDLIGRGSRGAPVFCYDEINTRGDNFGNCGTAHCLFQHILCGKLVCTWEHRDLISRPNLSVIYAHVRDQTCVSTYLPRRTPPPVNSPISITSYYSAEDRDETFVQDGSMCGPDMYCFEMHCKHVRFLMNLKLCDASNHCDRHGVCNNFNHCHCEKGYNPPYCQPKQGAFGSIDDGHLVPPTERSYMEEGR

SEQ ID NO: 15308 - protein, 383 aa, Homo sapiens
MQTSILIKSSCRPQFQRRFHHRMQKQIQNIISILSSASVINSYDENDIRHSKPLLVQMDCNYNGYVAGIPNSLVTLSVCSGLRGTMQLKNISYGIEPMEAVSGFIHKIYEEKYADTNILLEENDTYTWFNSEYQVRKSSEKTDFIKLFPRYIEMHIVVDKNLFKPANMICRKSVGKECDFTEYCNGDLPYCLPDTYVRDGEYCDSGGAFCFQGKCRTFDKQCDDLIGRGSRGAPVFCYDEINTRGDNFGNCGTAHCLFQHILCGKLVCTWEHRDLISRPNLSVIYAHVRDQTCVSTYLPRRTPPPVNSPISITSYYSAEDRDETFVQDGSMCGPDMVCNNFNHCHCEKGYNPPYCQPKQGAFGSIDDGHLVPPTERSYMEEGR

SEQ ID NO: 15309 - protein, 407 aa, Homo sapiens
MQTSILIKSSCRPQFQRRFHHRMQKQIQNIISILSSASVINSYDENDIRHSKPLLVQMDCNYNGYVAGIPNSLVTLSVCSGLRGTMQLKNISYGIEPMEAVSGFIHKIYEEKYADTNILLEENDTYTWFNSEYQVRKSSEKTDFIKLFPRYIEMHIVVDKNLFKPANMICRKSVGKECDFTEYCNGDLPYCLPDTYVRDGEYCDSGGAFCFQGKCRTFDKQCDDLIGRGSRGAPVFCYDEINTRGDNFGNCGTAHCLFQHILCGKLVCTWEHRDLISRPNLSVIYAHVRDQTCVSTYLPRRTPPPVNSPISITSYYSAEDRDETFVQDGSMCGPDMYCFEMHCKHVRFLMNLKLCDASNHCDRHGVCNNFNHCHCEKGYNPPYCQPKQGAFGSIDDGHLVPPTAPVS

SEQ ID NO: 15310 - protein, 703 aa, Homo sapiens
MAAATGDPGLSKLQFAPFSSALDVGFWHELTQKKLNEYRLDEAPKDIKGYYYNGDSAGLPARLTLEFSAFDMSAPTPARCCPAIGTLYNTNTLESFKTADKKLLLEQAANEIWESIKSGTALENPVLLNKFLLLTFADLKKYHFYYWFCYPALCLPESLPLIQGPVGLDQRFSLKQIEALECAYDNLCQTEGVTALPYFLIKYDENMVLVSLLKHYSDFFQGQRTKITIGVYDPCNLAQYPGWPLRNFLVLAAHRWSSSFQSVEVVCFRDRTMQGARDVAHSIIFEVKLPEMAFSPDCPKAVGWEKNQKGGMGPRMVNLSECMDPKRLAESSVDLNLKLMCWRLVPTLDLDKVVSVKCLLLGAGTLGCNVARTLMGWGVRHITFVDNAKISYSNPVRQPLYEFEDCLGGGKPKALAAADRLQKIFPGVNARGFNMSIPMPGHPVNFSSVTLEQARRDVEQLEQLIESHDVVFLLMDTRESRWLPAVIAASKRKLVINAALGFDTFVVMRHGLKKPKQQGAGDLCPNHPVASADLLGSSLFANIPGYKLGCYFCNDVVAPGDSTRDRTLDQQCTVSRPGLAVIAGALAVELMVSVLQHPEGGYAIASSSDDRMNEPPTSLGLVPHQIRGFLSRFDNVLPVSLAFDKCTACSSKVLDQYEREGFNFLAKVFNSSHSFLEDLTGLTLLHQETQAAEIWDMSDDETI

SEQ ID NO: 15311 - protein, 676 aa, Homo sapiens
MAAATGDPGLSKLQFAPFSSALDVGFWHELTQKKLNEYRLDEAPKDIKGYYYNGDSAGLPARLTLEFSAFDMSAPTPARCCPAIGTLYNTNTLESFKTADKKLLLEQAANEIWESIKSGTALENPVLLNKFLLLTFADLKKYHFYYWFCYPALCLPESLPLIQGPVGLDQRFSLKQIEALECAYDNLCQTEGVTALPYFLIKYDENMVLVSLLKHYSDFFQGQRTKITIGVYDPCNLAQYPGWPLRNFLVLAAHRWSSSFQSVEVVCFRDRTMQGARDVAHSIIFEVKLPEMAFSPDCPKAVGWEKNQKGGMGPRMVNLSECMDPKRLAESSVDLNLKLMCWRLVPTLDLDKVVSVKCLLLGAGTLGCNVARTLMGWGVRHITFVDNAKISYSNPVRQPLYEFEDCLGGGKPKALAAADRLQKIFPGVNARGFNMSIPMPGHPVNFSSVTLEQARRDVEQLEQLIESHDVVFLLMDTRESRWLPAVIAASKRKLVINAALGFDTFVVMRHGLKKPKQQGAGDLCPNHPVASADLLGSSLFANIPGYKLGCYFCNDVVAPGDSTRDRTLDQQCTVSRPGLAVIAGALAVELMVSVLQHPEGGYAIASSSDDRMNEPPTSLGLVPHQVLDQYEREGFNFLAKVFNSSHSFLEDLTGLTLLHQETQAAEIWDMSDDETI

SEQ ID NO: 15312 - protein, 623 aa, Homo sapiens
MAAATGDPGLSKLQFAPFSSALDVGFWHELTQKKLNEYRLDEAPKDIKGYYYNGDSAGLPARLTLEFSAFDMSAPTPARCCPAIGTLYNTNTLESFKTADKKLLLEQAANEIWESIKSGTALENPVLLNKFLLLTFAIEALECAYDNLCQTEGVTALPYFLIKYDENMVLVSLLKHYSDFFQGQRTKITIGVYDPCNLAQYPGWPLRNFLVLAAHRWSSSFQSVEVVCFRDRTMQGARDVAHSIIFEVKLPEMAFSPDCPKAVGWEKNQKGGMGPRMVNLSECMDPKRLAESSVDLNLKLMCWRLVPTLDLDKVVSVKCLLLGAGTLGCNVARTLMGWGVRHITFVDNAKISYSNPVRQPLYEFEDCLGGGKPKALAAADRLQKIFPGVNARGFNMSIPMPGHPVNFSSVTLEQARRDVEQLEQLIESHDVVFLLMDTRESRWLPAVIAASKRKLVINAALGFDTFVVMRHGLKKPKQQGAGDLCPNHPVASADLLGSSLFANIPGYKLGCYFCNDVVAPGDSTRDRTLDQQCTVSRPGLAVIAGALAVELMVSVLQHPEGGYAIASSSDDRMNEPPTSLGLVPHQIRGFLSRFDNVLPVSLAFDKCTACSSKIWDMSDDETI

SEQ ID NO: 15313 - protein, 1204 aa, Homo sapiens
MAAAAAVGNAVPCGARPCGVRPDGQPKPGPQPRALLAAGPALIANGDELVAAVWPYRRLALLRRLTVLPFAGLLYPAWLGAAAAGCWGWGSSWVQIPEAALLVLATICLAHALTVLSGHWSVHAHCALTCTPEYDPSKATFVKVVPTPNNGSTELVALHRNEGEDGLEVLSFEFQKIKYSYDALEKKQFLPVAFPVGNAFSYYQSNRGFQEDSEIRAAEKKFGSNKAEMVVPDFSELFKERATAPFFVFQVFCVGLWCLDEYWYYSVFTLSMLVAFEASLVQQQMRNMSEIRKMGNKPHMIQVYRSRKWRPIASDEIVPGDIVSIGRSPQENLVPCDVLLLRGRCIVDEAMLTGESVPQMKEPIEDLSPDRVLDLQADSRLHVIFGGTKVVQHIPPQKATTGLKPVDSGCVAYVLRTGFNTSQGKLLRTILFGVKRVTANNLETFIFILFLLVFAIAAAAYVWIEGTKDPSRNRYKLFLECTLILTSVVPPELPIELSLAVNTSLIALAKLYMYCTEPFRIPFAGKVEVCCFDKTGTLTSDSLVVRGVAGLRDGKEVTPVSSIPVETHRALASCHSLMQLDDGTLVGDPLEKAMLTAVDWTLTKDEKVFPRSIKTQGLKIHQRFHFASALKRMSVLASYEKLGSTDLCYIAAVKGAPETLHSMFSQCPPDYHHIHTEISREGARVLALGYKELGHLTHQQAREVKREALECSLKFVGFIVVSCPLKADSKAVIREIQNASHRVVMITGDNPLTACHVAQELHFIEKAHTLILQPPSEKGRQCEWRSIDGSIVLPLARGSPKALALEYALCLTGDGLAHLQATDPQQLLRLIPHVQVFARVAPKQKEFVITSLKELGYVTLMCGDGTNDVGALKHADVGVALLANAPERVVERRRRPRDSPTLSNSGIRATSRTAKQRSGLPPSEEQPTSQRDRLSQVLRDLEDESTPIVKLGDASIAAPFTSKLSSIQCICHVIKQGRCTLVTTLQMFKILALNALILAYSQSVLYLEGVKFSDFQATLQGLLLAGCFLFISRSKPLKTLSRERPLPNIFNLYTILTVMLQFFVHFLSLVYLYREAQARSPEKQEQFVDLYKEFEPSLVNSTVYIMAMAMQMATFAINYKGPPFMESLPENKPLVWSLAVSLLAIIGLLLGSSPDFNSQFGLVDIPVEFKLVIAQVLLLDFCLALLADRVLQFFLGTPKLKVPS

SEQ ID NO: 15314 - protein, 1086 aa, Homo sapiens
MEKWEELNSHQPGEEYDPSKATFVKVVPTPNNGSTELVALHRNEGEDGLEVLSFEFQKIKYSYDALEKKQFLPVAFPVGNAFSYYQSNRGFQEDSEIRAAEKKFGSNKAEMVVPDFSELFKERATAPFFVFQVFCVGLWCLDEYWYYSVFTLSMLVAFEASLVQQQMRNMSEIRKMGNKPHMIQVYRSRKWRPIASDEIVPGDIVSIGRSPQENLVPCDVLLLRGRCIVDEAMLTGESVPQMKEPIEDLSPDRVLDLQADSRLHVIFGGTKVVQHIPPQKATTGLKPVDSGCVAYVLRTGFNTSQGKLLRTILFGVKRVTANNLETFIFILFLLVFAIAAAAYVWIEGTKDPSRNRYKLFLECTLILTSVVPPELPIELSLAVNTSLIALAKLYMYCTEPFRIPFAGKVEVCCFDKTGTLTSDSLVVRGVAGLRDGKEVTPVSSIPVETHRALASCHSLMQLDDGTLVGDPLEKAMLTAVDWTLTKDEKVFPRSIKTQGLKIHQRFHFASALKRMSVLASYEKLGSTDLCYIAAVKGAPETLHSMFSQCPPDYHHIHTEISREGARVLALGYKELGHLTHQQAREVKREALECSLKFVGFIVVSCPLKADSKAVIREIQNASHRVVMITGDNPLTACHVAQELHFIEKAHTLILQPPSEKGRQCEWRSIDGSIVLPLARGSPKALALEYALCLTGDGLAHLQATDPQQLLRLIPHVQVFARVAPKQKEFVITSLKELGYVTLMCGDGTNDVGALKHADVGVALLANAPERVVERRRRPRDSPTLSNSGIRATSRTAKQRSGLPPSEEQPTSQRDRLSQVLRDLEDESTPIVKLGDASIAAPFTSKLSSIQCICHVIKQGRCTLVTTLQMFKILALNALILAYSQSVLYLEGVKFSDFQATLQGLLLAGCFLFISRSKPLKTLSRERPLPNIFNLYTILTVMLQFFVHFLSLVYLYREAQARSPEKQEQFVDLYKEFEPSLVNSTVYIMAMAMQMATFAINYKGPPFMESLPENKPLVWSLAVSLLAIIGLLLGSSPDFNSQFGLVDIPVEFKLVIAQVLLLDFCLALLADRVLQFFLGTPKLKVPS

SEQ ID NO: 15315 - protein, 344 aa, Homo sapiens
MCGDGTNDVGALKHADVGVALLANAPERVVERRRRPRDSPTLSNSGIRATSRTAKQRSGLPPSEEQPTSQRDRLSQVLRDLEDESTPIVKLGDASIAAPFTSKLSSIQCICHVIKQGRCTLVTTLQMFKILALNALILAYSQSVLYLEGVKFSDFQATLQGLLLAGCFLFISRSKPLKTLSRERPLPNIFNLYTILTVMLQFFVHFLSLVYLYREAQARSPEKQEQFVDLYKEFEPSLVNSTVYIMAMAMQMATFAINYKGPPFMESLPENKPLVWSLAVSLLAIIGLLLGSSPDFNSQFGLVDIPVEFKLVIAQVLLLDFCLALLADRVLQFFLGTPKLKVPS

SEQ ID NO: 15316 - protein, 1020 aa, Homo sapiens
MGRGAGREYSPAATTAENGGGKKKQKEKELDELKKEVAMDDHKLSLDELGRKYQVDLSKGLTNQRAQDVLARDGPNALTPPPTTPEWVKFCRQLFGGFSILLWIGAILCFLAYGIQAAMEDEPSNDNLYLGVVLAAVVIVTGCFSYYQEAKSSKIMDSFKNMVPQQALVIREGEKMQINAEEVVVGDLVEVKGGDRVPADLRIISSHGCKVDNSSLTGESEPQTRSPEFTHENPLETRNICFFSTNCVEGTARGIVIATGDRTVMGRIATLASGLEVGRTPIAMEIEHFIQLITGVAVFLGVSFFVLSLILGYSWLEAVIFLIGIIVANVPEGLLATVTVCLTLTAKRMARKNCLVKNLEAVETLGSTSTICSDKTGTLTQNRMTVAHMWFDNQIHEADTTEDQSGATFDKRSPTWTALSRIAGLCNRAVFKAGQENISVSKRDTAGDASESALLKCIELSCGSVRKMRDRNPKVAEIPFNSTNKYQLSIHEREDSPQSHVLVMKGAPERILDRCSTILVQGKEIPLDKEMQDAFQNAYMELGGLGERVLGFCQLNLPSGKFPRGFKFDTDELNFPTEKLCFVGLMSMIDPPRAAVPDAVGKCRSAGIKVIMVTGDHPITAKAIAKGVGIISEGNETVEDIAARLNIPMSQVNPREAKACVVHGSDLKDMTSEQLDEILKNHTEIVFARTSPQQKLIIVEGCQRQGAIVAVTGDGVNDSPALKKADIGIAMGISGSDVSKQAADMILLDDNFASIVTGVEEGRLIFDNLKKSIAYTLTSNIPEITPFLLFIIANIPLPLGTVTILCIDLGTDMVPAISLAYEAAESDIMKRQPRNSQTDKLVNERLISMAYGQIGMIQALGGFFTYFVILAENGFLPSRLLGIRLDWDDRTMNDLEDSYGQEWTYEQRKVVEFTCHTAFFASIVVVQWADLIICKTRRNSVFQQGMKNKILIFGLLEETALAAFLSYCPGMGVALRMYPLKVTWWFCAFPYSLLIFIYDEVRKLILRRYPGGWVEKETYY

SEQ ID NO: 15317 - protein, 195 aa, Homo sapiens
MGRARDAILDALENLTAEELKKFKLKLLSVPLREGYGRIPRGALLSMDALDLTDKLVSFYLETYGAELTANVLRDMGLQEMAGQLQAATHQGSGAAPAGIQAPPQSAAKPGLHFIDQHRAALIARVTNVEWLLDALYGKVLTDEQYQAVRAEPTNPSKMRKLFSFTPAWNWTCKDLLLQALRESQSYLVEDLERS

SEQ ID NO: 15318 - protein, 176 aa, Homo sapiens
MGRARDAILDALENLTAEELKKFKLKLLSVPLREGYGRIPRGALLSMDALDLTDKLVSFYLETYGAELTANVLRDMGLQEMAGQLQAATHQGLHFIDQHRAALIARVTNVEWLLDALYGKVLTDEQYQAVRAEPTNPSKMRKLFSFTPAWNWTCKDLLLQALRESQSYLVEDLERS

SEQ ID NO: 15319 - protein, 135 aa, Homo sapiens
MGRARDAILDALENLTAEELKKFKLQAATHQGSGAAPAGIQAPPQSAAKPGLHFIDQHRAALIARVTNVEWLLDALYGKVLTDEQYQAVRAEPTNPSKMRKLFSFTPAWNWTCKDLLLQALRESQSYLVEDLERS

SEQ ID NO: 15320 - protein, 390 aa, Homo sapiens
MKEGRGSFSVERGPRKERETAQSGMWKGNSPAGSQGAAMEGTGGELGGQGNWGPEDAPGLLARASLIMLPWPLPLASSALTLLFGALTSLFLWYCYRLGSQDMQALGAGSRAGGVRGGPVGCSEAGGPSPGGPGDPGEGPRTEGLVSRRLRAYARRYSWAGMGRVRRAAQGGPGPGRGPGVLGIQRPGLLFLPDLPSAPFVPRDAQRHDVELLESSFPAILRDFGAVSWDFSGTTPPPRGWSPPLAPGCYQLLLYQAGRCQPSNCRRCPGAYRALRGLRSFMSANTFGNAGFSVLLPGARLEGRCGPTNARVRCHLGLKIPPGCELVVGGEPQCWAEGHCLLVDDSFLHTVAHNGSPEDGPRVVFIVDLWHPNVAGAERQALDFVFAPDP

SEQ ID NO: 15321 - protein, 290 aa, Homo sapiens
MVIQKEKKSCGQVVEEWKEFVWNPRTHQFMGRTGTSWAFILLFYLVFYGFLTAMFTLTMWVMLQTVSDHTPKYQDRLATPGLMIRPKTENLDVIVNVSDTESWDQHVQKLNKFLEPYNDSIQAQKNDVCRPGRYYEQPDNGVLNYPKRACQFNRTQLGNCSGIGDSTHYGYSTGQPCVFIKMNRVINFYAGANQSMNVTCAGKRDEDAENLGNFVMFPANGNIDLMYFPYYGKKFHVNYTQPLVAVKFLNVTPNVEVNVECRINAANIATDDERDKFAGRVAFKLRINKT

SEQ ID NO: 15322 - protein, 505 aa, Homo sapiens
MEQTEKSKVYAENGLLEKIKLCLSKKPLPSPTERKKFDHDFAISTSFHGIHNIVQNRSKIRRVLWLVVVLGSVSLVTWQIYIRLLNYFTWPTTTSIEVQYVEKMEFPAVTFCNLNRFQTDAVAKFGVIFFLWHIVSKVLHLQEITANSTGSREATDFAASHQNFSIVEFIRNKGFYLNNSTLLDCEFFGKPCSPKDFAHVFTEYGNCFTFNHGETLQAKRKVSVSGRGLSLLFNVNQEAFTDNPALGFVDAGIIFVIHSPKKVPQFDGLGLLSPVGMHARVTIRQVKTVHQEYPWGECNPNIKLQNFSSYSTSGCLKECKAQHIKKQCGCVPFLLPGYGIECDLQKYFSCVSPVLDHIEFKDLCTVGTHNSSCPVSCEEIEYPATISYSSFPSQKALKYLSKKLNQSRKYIRENLVKIEINYSDLNYKITQQQKAVSVSELLADLGGQLGLFCGASLITIIEIIEYLFTNFYWICIFFLLKISEMTQWTPPPQNHLGNKNRIEEC

SEQ ID NO: 15323 - protein, 501 aa, Homo sapiens
MSERCCSRYSSGASIGCTPTSTQAKMVSKRIAQETFDAAVRENIEEFAMGPEEAVKEAVEQFESQGVDLSNIVKTAPKVSADGSQEPTHDILQMLSDLQESVASSRPQEVSAYLTRFCDQCKQDKACRFLAAQKGAYPIIFTAWKLATAGDQGLLLQSLNALSVLTDGQPDLLDAQGLQLLVATLTQNADEADLTCSGIRCVRHACLKHEQNRQDLVKAGVLPLLTGAITHHGHHTDVVREACWALRVMTFDDDIRVPFGHAHNHAKMIVQENKGLKVLIEATKAFLDNPGILSELCGTLSRLAIRNEFCQEVVDLGGLSILVSLLADCNDHQMRDQSGVQELVKQVLSTLRAIAGNDDVKDAIVRAGGTESIVAAMTQHLTSPQVCEQSCAALCFLALRKPDNSRIIVEGGGAVAALQAMKAHPQKAGVQKQACMLIRNLVAHGQAFSKPILDLGAEALIMQARSAHRDCEDVAKAALRDLGCHVELRELWTGQRGNLAP

SEQ ID NO: 15324 - protein, 476 aa, Homo sapiens
MVSKRIAQETFDAAVRENIEEFAMGPEEAVKEAVEQFESQGVDLSNIVKTAPKVSADGSQEPTHDILQMLSDLQESVASSRPQEVSAYLTRFCDQCKQDKACRFLAAQKGAYPIIFTAWKLATAGDQGLLLQSLNALSVLTDGQPDLLDAQGLQLLVATLTQNADEADLTCSGIRCVRHACLKHEQNRQDLVKAGVLPLLTGAITHHGHHTDVVREACWALRVMTFDDDIRVPFGHAHNHAKMIVQENKGLKVLIEATKAFLDNPGILSELCGTLSRLAIRNEFCQEVVDLGGLSILVSLLADCNDHQMRDQSGVQELVKQVLSTLRAIAGNDDVKDAIVRAGGTESIVAAMTQHLTSPQVCEQSCAALCFLALRKPDNSRIIVEGGGAVAALQAMKAHPQKAGVQKQACMLIRNLVAHGQAFSKPILDLGAEALIMQARSAHRDCEDVAKAALRDLGCHVELRELWTGQRGNLAP

SEQ ID NO: 15325 - protein, 673 aa, Homo sapiens
MACLLETPIRMSVLSEVTASSRHYVDRLFDPDPQKVLQGVIDMKNAVIGNNKQKANLIVLGAVPRLLYLLQQETSSTELKTECAVVLGSLAMGTENNVKSLLDCHIIPALLQGLLSPDLKFIEACLRCLRTIFTSPVTPEELLYTDATVIPHLMALLSRSRYTQEYICQIFSHCCKGPDHQTILFNHGAVQNIAHLLTSLSYKVRMQALKCFSVLAFENPQVSMTLVNVLVDGELLPQIFVKMLQRDKPIEMQLTSAKCLTYMCRAGAIRTDDNCIVLKTLPCLVRMCSKERLLEERVEGAETLAYLIEPDVELQRIASITDHLIAMLADYFKYPSSVSAITDIKRLDHDLKHAHELRQAAFKLYASLGANDEDIRKKIIETENMMDRIVTGLSESSVKVRLAAVRCLHSLSRSVQQLRTSFQDHAVWKPLMKVLQNAPDEILVVASSMLCNLLLEFSPSKEPILESGAVELLCGLTQSENPALRVNGIWALMNMAFQAEQKIKADILRSLSTEQLFRLLSDSDLNVLMKTLGLLRNLLSTRPHIDKIMSTHGKQIMQAVTLILEGEHNIEVKEQTLCILANIADGTTAKDLIMTNDDILQKIKYYMGHSHVKLQLAAMFCISNLIWNEEEGSQERQDKLRDMGIVDILHKLSQSPDSNLCDKAKMALQQYLA

SEQ ID NO: 15326 - protein, 659 aa, Homo sapiens
MEVTASSRHYVDRLFDPDPQKVLQGVIDMKNAVIGNNKQKANLIVLGAVPRLLYLLQQETSSTELKTECAVVLGSLAMGTENNVKSLLDCHIIPALLQGLLSPDLKFIEACLRCLRTIFTSPVTPEELLYTDATVIPHLMALLSRSRYTQEYICQIFSHCCKGPDHQTILFNHGAVQNIAHLLTSLSYKVRMQALKCFSVLAFENPQVSMTLVNVLVDGELLPQIFVKMLQRDKPIEMQLTSAKCLTYMCRAGAIRTDDNCIVLKTLPCLVRMCSKERLLEERVEGAETLAYLIEPDVELQRIASITDHLIAMLADYFKYPSSVSAITDIKRLDHDLKHAHELRQAAFKLYASLGANDEDIRKKIIETENMMDRIVTGLSESSVKVRLAAVRCLHSLSRSVQQLRTSFQDHAVWKPLMKVLQNAPDEILVVASSMLCNLLLEFSPSKEPILESGAVELLCGLTQSENPALRVNGIWALMNMAFQAEQKIKADILRSLSTEQLFRLLSDSDLNVLMKTLGLLRNLLSTRPHIDKIMSTHGKQIMQAVTLILEGEHNIEVKEQTLCILANIADGTTAKDLIMTNDDILQKIKYYMGHSHVKLQLAAMFCISNLIWNEEEGSQERQDKLRDMGIVDILHKLSQSPDSNLCDKAKMALQQYLA

SEQ ID NO: 15327 - protein, 631 aa, Homo sapiens
MKNAVIGNNKQKANLIVLGAVPRLLYLLQQETSSTELKTECAVVLGSLAMGTENNVKSLLDCHIIPALLQGLLSPDLKFIEACLRCLRTIFTSPVTPEELLYTDATVIPHLMALLSRSRYTQEYICQIFSHCCKGPDHQTILFNHGAVQNIAHLLTSLSYKVRMQALKCFSVLAFENPQVSMTLVNVLVDGELLPQIFVKMLQRDKPIEMQLTSAKCLTYMCRAGAIRTDDNCIVLKTLPCLVRMCSKERLLEERVEGAETLAYLIEPDVELQRIASITDHLIAMLADYFKYPSSVSAITDIKRLDHDLKHAHELRQAAFKLYASLGANDEDIRKKIIETENMMDRIVTGLSESSVKVRLAAVRCLHSLSRSVQQLRTSFQDHAVWKPLMKVLQNAPDEILVVASSMLCNLLLEFSPSKEPILESGAVELLCGLTQSENPALRVNGIWALMNMAFQAEQKIKADILRSLSTEQLFRLLSDSDLNVLMKTLGLLRNLLSTRPHIDKIMSTHGKQIMQAVTLILEGEHNIEVKEQTLCILANIADGTTAKDLIMTNDDILQKIKYYMGHSHVKLQLAAMFCISNLIWNEEEGSQERQDKLRDMGIVDILHKLSQSPDSNLCDKAKMALQQYLA

SEQ ID NO: 15328 - protein, 385 aa, Homo sapiens
MEVTASSRHYVDRLFDPDPQKVLQGVIDMKNAVIGNNKQKANLIVLGAVPRLLYLLQQETSSTELKTECAVVLGSLAMGTENNVKSLLDCHIIPALLQGLLSPDLKFIEACLRCLRTIFTSPVTPEELLYTDATVIPHLMALLSRSRYTQEYICQIFSHCCKGPDHQTILFNHGAVQNIAHLLTSLSYKVRMQALKCFSVLAFENPQVSMTLVNVLVDGELLPQIFVKMLQRDKPIEMQLTSAKCLTYMCRAGAIRTDDNCIVLKTLPCLVRMCSKERLLEERVEGAETLAYLIEPDVELQRIASITDHLIAMLADYFKYPSSVSAITDIKRLDHDLKHAHELRQAAFKLYASLGANDEDIRKKVSLGEGRPPVLTASRQGVTST

SEQ ID NO: 15329 - protein, 642 aa, Homo sapiens
MACLLETPIRMSVLSEVTASSRHYVDRLFDPDPQKVLQGVIDMKNAVIGNNKQKANLIVLGAVPRLLYLLQQETSSTELKTECAVVLGSLAMGTENNVKSLLDCHIIPALLQGLLSPDLKFIEACLRCLRTIFTSPVTPEELLYTGPDHQTILFNHGAVQNIAHLLTSLSYKVRMQALKCFSVLAFENPQVSMTLVNVLVDGELLPQIFVKMLQRDKPIEMQLTSAKCLTYMCRAGAIRTDDNCIVLKTLPCLVRMCSKERLLEERVEGAETLAYLIEPDVELQRIASITDHLIAMLADYFKYPSSVSAITDIKRLDHDLKHAHELRQAAFKLYASLGANDEDIRKKIIETENMMDRIVTGLSESSVKVRLAAVRCLHSLSRSVQQLRTSFQDHAVWKPLMKVLQNAPDEILVVASSMLCNLLLEFSPSKEPILESGAVELLCGLTQSENPALRVNGIWALMNMAFQAEQKIKADILRSLSTEQLFRLLSDSDLNVLMKTLGLLRNLLSTRPHIDKIMSTHGKQIMQAVTLILEGEHNIEVKEQTLCILANIADGTTAKDLIMTNDDILQKIKYYMGHSHVKLQLAAMFCISNLIWNEEEGSQERQDKLRDMGIVDILHKLSQSPDSNLCDKAKMALQQYLA

SEQ ID NO: 15330 - protein, 606 aa, Homo sapiens
MACLLETPIRMSVLSEVTASSRHYVDRLFDPDPQKVLQGVIDMKNAVIGNNKQKANLIVLGAVPRLLYLLQQETSSTELKTECAVVLGSLAMGTENNVKSLLDCHIIPALLQGLLSPDLKFIEACLRCLRTIFTSPVTPEELLYTDATVIPHLMALLSRSRYTQEYICQIFSHCCKGPDHQTILFNHGAVQNIAHLLTSLSYKVRMQALKCFSVLAFENPQVSMTLVNVLVDGELLPQIFVKMLQRDKPIEMQLTSAKCLTYMCRAGAIRTDDNCIVLKLDHDLKHAHELRQAAFKLYASLGANDEDIRKKIIETENMMDRIVTGLSESSVKVRLAAVRCLHSLSRSVQQLRTSFQDHAVWKPLMKVLQNAPDEILVVASSMLCNLLLEFSPSKEPILESGAVELLCGLTQSENPALRVNGIWALMNMAFQAEQKIKADILRSLSTEQLFRLLSDSDLNVLMKTLGLLRNLLSTRPHIDKIMSTHGKQIMQAVTLILEGEHNIEVKEQTLCILANIADGTTAKDLIMTNDDILQKIKYYMGHSHVKLQLAAMFCISNLIWNEEEGSQERQDKLRDMGIVDILHKLSQSPDSNLCDKAKMALQQYLA

SEQ ID NO: 15331 - protein, 440 aa, Homo sapiens
MTSIKEQAAISRLLSFLQEWDNAGKVARSHILDKFIETNQGKTAPELEQEFSQGASLFLVRLTTSLRITYMTDSCLEKLLRSIGIFLSAVSSNRYLIEFLEVGGVLTLLEILGLEKIKEEAKKESVKLLQVIANSGRTYKELICESYGVRSIAEFLAKSKSEETQEEVQVLLDSLVHGNPKYQNQVYKGLIALLPCESPKAQQLSLQTLRTAQPIIGTTHPSIVDCVLKVLGTMHLEVQYEAIELIKDLVGYDVRQALLKGLVALLIPSVKEISKLQAKILSDPSVLQLTPSLPMFLQQAAAAKAIGVLARNDMSIAEELLYLRVVRGLMAAMGNTDHSNSQRLASLTLECFVQMFPLVAEHVRKCMGEELYQLFLSNAEDLYMKIDSIQADILAANTVNVTKALCLHGSSYSMNTLYGSRDSAQMAYLTHFEEDVESKE

SEQ ID NO: 15332 - protein, 307 aa, Homo sapiens
MTSIKEQAAISRLLSFLQEWDNAGKVARSHILDKFIETNQGKTAPELEQEFSQGASLFLVRLTTSLRITYMTDSCLEKLLRSIGIFLSAVSSNRYLIEFLEVGGVLTLLEILGLEKIKEEAKKESVKLLQVIANSGRTYKELICESYGVRSIAEFLAKSKSEETQEEVQVLLDSLVHGNPKYQNQVYKGLIALLPCESPKAQQLSLQTLRTAQPIIGTTHPSIVDCVLKVLGTMHLEVQYEAIELIKDLVGYDVRQALLKGLVALLIPSVKEISKLQAKILSDPSVLQLTPSLPMFLQQAAAAKAIG

SEQ ID NO: 15333 - protein, 689 aa, Homo sapiens
MAQVEKRGGLLRKSSASKKPLKEKVVLMYDEIFMTEDPSKCSPRFWEELFLMKVNLEYLEGKLESLDGEELMKIKDNINCLFQHCIQALGEEHPIRVVNALQTLCALIRGVHQKNKSTSGFDIINMLMGFDKAELCMKNLMESLDSLLCAEGSESLKSLCLKLLLCLVTVTDNISQNTILEYVMINSIFEAILQILSHPPSRREHGYDAVVLLALLVNYRKYESVNPYIVKLSIVDDEATLNGMGLVIAQALSEYNRQYKDKEEEHQSGFFSALTNMVGSMFIADAHEKISVQTNEAILLALYEAVHLNRNFITVLAQSHPEMGLVTTPVSPAPTTPVTPLGTTPPSSDVISSVELPLDADVQTSNLLITFLKYSSIVMQDTKDEHRLHSGKLCLIILTCIAEDQYANAFLHDDNMNFRVNLHRMPMRHRKKAADKNLPCRPLVCAVLDLMVEFIVTHMMKEFPMDLYIRCIQVVHKLLCYQKKCRVRLHYTWRELWSALINLLKFLMSNETVLLAKHNIFTLALMIVNLFNMFITYGDTFLPTPSSYDELYYEIIRMHQSFDNLYSMVLRLSTNAGQWKEAASKVTHALVNIRAIINHFNPKIESYAAVNHISQLSEEQVLEVVRANYDTLTLKLQDGLDQYERYSEQHKEAAFFKELVRSISTNVRRNLAFHTLSQEVLLKEFSTIS

SEQ ID NO: 15334 - protein, 265 aa, Homo sapiens
MPMRHRKKAADKNLPCRPLVCAVLDLMVEFIVTHMMKEFPMDLYIRCIQVVHKLLCYQKKCRVRLHYTWRELWSALINLLKFLMSNETVLLAKHNIFTLALMIVNLFNMFITYGDTFLPTPSSYDELYYEIIRMHQSFDNLYSMVLRLSTNAGQWKEAASKVTHALVNIRAIINHFNPKIESYAAVNHISQLSEEQVLEVVRANYDTLTLKLQDGLDQYERYSEQHKEAAFFKELVRSISTNVRRNLAFHTLSQEVLLKEFSTIS

SEQ ID NO: 15335 - protein, 160 aa, Homo sapiens
MPMRHRKKAADKNLPCRPLVCAVLDLMVEFIVTHMMKEFPMDLYIRCIQVVHKLLCYQKKCRVRLHYTWRELWSALINLLKFLMSNETVLLAKHNIFTLALMIVNLFNMFITYGDTFLPTPSSYDELYYEIIRMHQSFDNLYSMEPSSTTLTPKLSPTLL

SEQ ID NO: 15336 - protein, 513 aa, Homo sapiens
MGAAAKLAFAVFLISCSSGAILGRSETQECLFFNANWEKDRTNQTGVEPCYGDKDKRRHCFATWKNISGSIEIVKQGCWLDDINCYDRTDCVEKKDSPEVYFCCCEGNMCNEKFSYFPEMEVTQPTSNPVTPKPPYYNILLYSLVPLMLIAGIVICAFWVYRHHKMAYPPVLVPTQDPGPPPPSPLLGLKPLQLLEVKARGRFGCVWKAQLLNEYVAVKIFPIQDKQSWQNEYEVYSLPGMKHENILQFIGAEKRGTSVDVDLWLITAFHEKGSLSDFLKANVVSWNELCHIAETMARGLAYLHEDIPGLKDGHKPAISHRDIKSKNVLLKNNLTACIADFGLALKFEAGKSAGDTHGQVGTRRYMAPEVLEGAINFQRDAFLRIDMYAMGLVLWELASRCTAADGPVDEYMLPFEEEIGQHPSLEDMQEVVVHKKKRPVLRDYWQKHAGMAMLCETIEECWDHDAEARLSAGCVGERITQMQRLTNIITTEDIVTVVTMVTNVDFPPKESSL

SEQ ID NO: 15337 - protein, 405 aa, Homo sapiens
MCNEKFSYFPEMEVTQPTSNPVTPKPPYYNILLYSLVPLMLIAGIVICAFWVYRHHKMAYPPVLVPTQDPGPPPPSPLLGLKPLQLLEVKARGRFGCVWKAQLLNEYVAVKIFPIQDKQSWQNEYEVYSLPGMKHENILQFIGAEKRGTSVDVDLWLITAFHEKGSLSDFLKANVVSWNELCHIAETMARGLAYLHEDIPGLKDGHKPAISHRDIKSKNVLLKNNLTACIADFGLALKFEAGKSAGDTHGQVGTRRYMAPEVLEGAINFQRDAFLRIDMYAMGLVLWELASRCTAADGPVDEYMLPFEEEIGQHPSLEDMQEVVVHKKKRPVLRDYWQKHAGMAMLCETIEECWDHDAEARLSAGCVGERITQMQRLTNIITTEDIVTVVTMVTNVDFPPKESSL

SEQ ID NO: 15338 - protein, 1885 aa, Homo sapiens
MSGALLWPLLPLLLLLLSARDGVRAAQPQAPGYLIAAPSVFRAGVEEVISVTIFNSPREVTVQAQLVAQGEPVVQSQGAILDKGTIKLKVPTGLRGQALLKVWGRGWQAEEGPLFHNQTSVTVDGRGASVFIQTDKPVYRPQHRVLISIFTVSPNLRPVNEKLEAYILDPRGSRMIEWRHLKPFCCGITNMSFPLSDQPVLGEWFIFVEMQGHAYNKSFEVQKYVLPKFELLIDPPRYIQDLDACETGTVRARYTFGKPVAGALMINMTVNGVGYYSHEVGRPVLRTTKILGSRDFDICVRDMIPADVPEHFRGRVSIWAMVTSVDGSQQVAFDDSTPVQRQLVDIRYSKDTRKQFKPGLAYVGKVELSYPDGSPAEGVTVQIKAELTPKDNIYTSEVVSQRGLVGFEIPSIPTSAQHVWLETKVMALNGKPVGAQYLPSYLSLGSWYSPSQCYLQLQPPSHPLQVGEEAYFSVKSTCPCNFTLYYEVAARGNIVLSGQQPAHTTQQRSKRAAPALEKPIRLTHLSETEPPPAPEAEVDVCVTSLHLAVTPSMVPLGRLLVFYVRENGEGVADSLQFAVETFFENQVSVTYSANETQPGEVVDLRIRAARGSCVCVAAVDKSVYLLRSGFRLTPAQVFQELEDYDVSDSFGVSREDGPFWWAGLTAQRRRRSSVFPWPWGITKDSGFAFTETGLVVMTDRVSLNHRQDGGLYTDEAVPAFQPHTGSLVAVAPSRHPPRTEKRKRTFFPETWIWHCLNISDPSGEGTLSVKVPDSITSWVGEAVALSTSQGLGIAEPSLLKTFKPFFVDFMLPALIIRGEQVKIPLSVYNYMGTCAEVYMKLSVPKGIQFVGHPGKRHVTKKMCVAPGEAEPIWVVLSFSDLGLNNITAKALAYGDTNCCRDGRSSKHPEENHADRRVPIGVDHVRRSVMVEAEGVPRAYTYSAFFCPSERVHISTPNKYEFQYVQRPLRLTRFDVAVRAHNDARVALSSGPQDTAGMIEIVLGGHQNTRSWISTSKMGEPVASAHTAKILSWDEFRTFWISWRGGLIQVGHGPEPSNESVIVAWTLPRPPEVQFIGFSTGWGSMGEFRIWRKMEVDESYSEAFTLGVPHGAIPGSERATASIIGDVMGPTLNHLNNLLRLPFGCGEQNMIHFAPNVFVLKYLQKTQQLSPEVERETTDYLVQGYQRQLTYKRQDGSYSAFGERDASGSMWLTAFVLKSFAQARSFIFVDPRELAAAKSWIIQQQQADGSFLAVGRVLNKDIQGGIHGTVPLTAYVVVALLETGTASEEERGSTDKARHFLESAAPLAMDPYSCALTTYALTLLRSPAAPEALRKLRSLAIMRDGVTHWSLSNSWDVDKGTFLSFSDRVSQSVVSAEVEMTAYALLTYTLLGDVAAALPVVKWLSQQRNALGGFSSTQDTCVALQALAEYAILSYAGGINLTVSLASTNLDYQETFELHRTNQKVLQTAAIPSLPTGLFVSAKGDGCCLMQIDVTYNVPDPVAKPAFQLLVSLQEPEAQGRPPPMPASAAEGSRGDWPPADDDDPAADQHHQEYKVMLEVCTRWLHAGSSNMAVLEVPLLSGFRADIESLEQLLLDKHMGMKRYEVAGRRVLFYFDEIPSRCLTCVRFRALRECVVGRTSALPVSVYDYYEPAFEATRFYNVSTHSPLARELCAGPACNEVERAPARGPGWFPGESGPAVAPEEGAAIARCGCDHDCGAQGNPVCGSDGVVYASACRLREAACRQAAPLEPAPPSCCALEQRLPASSSSTYGDDLASVAPGPLQQDVKLNGAGLEVEDSDPEPEGEAEDRVTAGPRPPVSSGNLESSTQSASPFHRWGQTPAPQRHSGRVVGAHRPGLLSPVFVYSPAFQSGGEEGLWMSNTCTLR

SEQ ID NO: 15339 - protein, 1815 aa, Homo sapiens
MSGALLWPLLPLLLLLLSARDGVRAAQPQAPGYLIAAPSVFRAGVEEVISVTIFNSPREVTVQAQLVAQGEPVVQSQGAILDKGTIKLKVPTGLRGQALLKVWGRGWQAEEGPLFHNQTSVTVDGRGASVFIQTDKPVYRPQHRVLISIFTVSPNLRPVNEKLEAYILDPRGSRMIEWRHLKPFCCGITNMSFPLSDQPVLGEWFIFVEMQGHAYNKSFEVQKYVLPKFELLIDPPRYIQDLDACETGTVRARYTFGKPVAGALMINMTVNGVGYYSHEVGRPVLRTTKILGSRDFDICVRDMIPADVPEHFRGRVSIWAMVTSVDGSQQVAFDDSTPVQRQLVDIRYSKDTRKQFKPGLAYVGKVELSYPDGSPAEGVTVQIKAELTPKDNIYTSEVVSQRGLVGFEIPSIPTSAQHVWLETKVMALNGKPVGAQYLPSYLSLGSWYSPSQCYLQLQPPSHPLQVGEEAYFSVKSTCPCNFTLYYEVAARGNIVLSGQQPAHTTQQRSKRAAPALEKPIRLTHLSETEPPPAPEAEVDVCVTSLHLAVTPSMVPLGRLLVFYVRENGEGVADSLQFAVETFFENQVSVTYSANETQPGEVVDLRIRAARGSCVCVAAVDKSVYLLRSGFRLTPAQVFQELEDYDVSDSFGVSREDGPFWWAGLTAQRRRRSSVFPWPWGITKDSGFAFTETGLVVMTDRVSLNHRQDGGLYTDEAVPAFQPHTGSLVAVAPSRHPPRTEKRKRTFFPETWIWHCLNISDPSGEGTLSVKVPDSITSWVGEAVALSTSQGLGIAEPSLLKTFKPFFVDFMLPALIIRGEQVKIPLSVYNYMGTCAEVYMKLSVPKGIQFVGHPGKRHVTKKMCVAPGEAEPIWVVLSFSDLGLNNITAKALAYGDTNCCRDGRSSKHPEENHADRRVPIGVDHVRRSVMVEAEGVPRAYTYSAFFCPSERVHISTPNKYEFQYVQRPLRLTRFDVAVRAHNDARVALSSGPQDTAGMIEIVLGGHQNTRSWISTSKMGEPVASAHTAKILSWDEFRTFWISWRGGLIQVGHGPEPSNESVIVAWTLPRPPEVQFIGFSTGWGSMGEFRIWRKMEVDESYSEAFTLGVPHGAIPGSERATASIIGDVMGPTLNHLNNLLRLPFGCGEQNMIHFAPNVFVLKYLQKTQQLSPEVERETTDYLVQGYQRQLTYKRQDGSYSAFGERDASGSMWLTAFVLKSFAQARSFIFVDPRELAAAKSWIIQQQQADGSFLAVGRVLNKDIQGGIHGTVPLTAYVVVALLETGTASEEERGSTDKARHFLESAAPLAMDPYSCALTTYALTLLRSPAAPEALRKLRSLAIMRDGVTHWSLSNSWDVDKGTFLSFSDRVSQSVVSAEVEMTAYALLTYTLLGDVAAALPVVKWLSQQRNALGGFSSTQDTCVALQALAEYAILSYAGGINLTVSLASTNLDYQETFELHRTNQKVLQTAAIPSLPTGLFVSAKGDGCCLMQIDVTYNVPDPVAKPAFQLLVSLQEPEAQGRPPPMPASAAEGSRGDWPPADDDDPAADQHHQEYKVMLEVCTRWLHAGSSNMAVLEVPLLSGFRADIESLEQLLLDKHMGMKRYEVAGRRVLFYFDEIPSRCLTCVRFRALRECVVGRTSALPVSVYDYYEPAFEATRFYNVSTHSPLARELCAGPACNEVERAPARGPGWFPGESGPAVAPEEGAAIARCGCDHDCGAQGNPVCGSDGVVYASACRLREAACRQAAPLEPAPPSCCALEQRLPASSSSTYGDDLASVAPGPLQQDVKLNGAGLEVEDSDPEPEGEAEDSQSGFSS

SEQ ID NO: 15340 - protein, 785 aa, Homo sapiens
MADLDSPPKLSGVQQPSEGVGGGRCSEISAELIRSLTELQELEAVYERLCGEEKVVERELDALLEQQNTIESKMVTLHRMGPNLQLIEGDAKQLAGMITFTCNLAENVSSKVRQLDLAKNRLYQAIQRADDILDLKFCMDGVQTALRSEDYEQAAAHTHRYLCLDKSVIELSRQGKEGSMIDANLKLLQEAEQRLKAIVAEKFAIATKEGDLPQVERFFKIFPLLGLHEEGLRKFSEYLCKQVASKAEENLLMVLGTDMSDRRAAVIFADTLTLLFEGIARIVETHQPIVETYYGPGRLYTLIKYLQVECDRQVEKVVDKFIKQRDYHQQFRHVQNNLMRNSTTEKIEPRELDPILTEVTLMNARSELYLRFLKKRISSDFEVGDSMASEEVKQEHQKCLDKLLNNCLLSCTMQELIGLYVTMEEYFMRETVNKAVALDTYEKGQLTSSMVDDVFYIVKKCIGRALSSSSIDCLCAMINLATTELESDFRDVLCNKLRMGFPATTFQDIQRGVTSAVNIMHSSLQQGKFDTKGIESTDEAKMSFLVTLNNVEVCSENISTLKKTLESDCTKLFSQGIGGEQAQAKFDSCLSDLAAVSNKFRDLLQEGLTELNSTAIKPQVQPWINSFFSVSHNIEEEEFNDYEANDPWVQQFILNLEQQMAEFKASLSPVIYDSLTGLMTSLVAVELEKVVLKSTFNRLGGLQFDKELRSLIAYLTTVTTWTIRDKFARLSQMATILNLERVTEILDYWGPNSGPLTWRLTPAEVRQVLALRIDFRSEDIKRLRL

SEQ ID NO: 15341 - protein, 337 aa, Homo sapiens
MADLDSPPKLSGVQQPSEGVGGGRCSEISAELIRSLTELQELEAVYERLCGEEKVVERELDALLEQQNTIESKMVTLHRMGPNLQLIEGDAKQLAGMITFTCNLAENVSSKVRQLDLAKNRLYQAIQRADDILDLKFCMDGVQTALRSEDYEQAAAHTHRYLCLDKSVIELSRQGKEGSMIDANLKLLQEAEQRLKAIVAEKFAIATKEGDLPQVERFFKIFPLLGLHEEGLRKFSEYLCKQVASKAEENLLMVLGTDMSDRRAAVIFADTLTLLFEGIARIVETHQPIVETYYGPGRLYTLIKYLQVECDRQVEKVVDKFIKQRDYHQQNFVFSFF

SEQ ID NO: 15342 - protein, 712 aa, Homo sapiens
MVTLHRMGPNLQLIEGDAKQLAGMITFTCNLAENVSSKVRQLDLAKNRLYQAIQRADDILDLKFCMDGVQTALRSEDYEQAAAHTHRYLCLDKSVIELSRQGKEGSMIDANLKLLQEAEQRLKAIVAEKFAIATKEGDLPQVERFFKIFPLLGLHEEGLRKFSEYLCKQVASKAEENLLMVLGTDMSDRRAAVIFADTLTLLFEGIARIVETHQPIVETYYGPGRLYTLIKYLQVECDRQVEKVVDKFIKQRDYHQQFRHVQNNLMRNSTTEKIEPRELDPILTEVTLMNARSELYLRFLKKRISSDFEVGDSMASEEVKQEHQKCLDKLLNNCLLSCTMQELIGLYVTMEEYFMRETVNKAVALDTYEKGQLTSSMVDDVFYIVKKCIGRALSSSSIDCLCAMINLATTELESDFRDVLCNKLRMGFPATTFQDIQRGVTSAVNIMHSSLQQGKFDTKGIESTDEAKMSFLVTLNNVEVCSENISTLKKTLESDCTKLFSQGIGGEQAQAKFDSCLSDLAAVSNKFRDLLQEGLTELNSTAIKPQVQPWINSFFSVSHNIEEEEFNDYEANDPWVQQFILNLEQQMAEFKASLSPVIYDSLTGLMTSLVAVELEKVVLKSTFNRLGGLQFDKELRSLIAYLTTVTTWTIRDKFARLSQMATILNLERVTEILDYWGPNSGPLTWRLTPAEVRQVLALRIDFRSEDIKRLRL

SEQ ID NO: 15343 - protein, 327 aa, Homo sapiens
MAWWKAWIEQEGVTVKSSSHFNPDPDAETLYKAMKGIGTNEQAIIDVLTKRSNTQRQQIAKSFKAQFGKDLTETLKSELSGKFERLIVALMYPPYRYEAKELHDAMKGLGTKEGVIIEILASRTKNQLREIMKAYEEDYGSSLEEDIQADTSGYLERILVCLLQGSRDDVSSFVDPALALQDAQDLYAAGEKIRGTDEMKFITILCTRSATHLLRVFEEYEKIANKSIEDSIKSETHGSLEEAMLTVVKCTQNLHSYFAERLYYAMKGAGTRDGTLIRNIVSRSEIDLNLIKCHFKKMYGKTLSSMIMEDTSGDYKNALLSLVGSDP

SEQ ID NO: 15344 - protein, 276 aa, Homo sapiens
MAWWKAWIEQEGVTVKSSSHFNPDPDAETLYKAMKGIGVGSQLLSHQAAAFAFPSSALTSVSPWGQQGHLCCNPAGTNEQAIIDVLTKRSNTQRQQIAKSFKAQFGKDLTETLKSELSGKFERLIVALMYPPYRYEAKELHDAMKGSRDDVSSFVDPALALQDAQDLYAAGEKIRGTDEMKFITILCTRSATHLLRVKCTQNLHSYFAERLYYAMKGAGTRDGTLIRNIVSRSEIDLNLIKCHFKKMYGKTLSSMIMEDTSGDYKNALLSLVGSDP

SEQ ID NO: 15345 - protein, 1012 aa, Homo sapiens
MSLPKTPSTPLNSTSTSESKKLKVSVAKEGTRGLPELKEKKNMVDRSKLLPTSLQNEFIPKEVLLSLTYAANAGPCPENLLPPKKIKTPKGTLPRLVDHVWHHPVRRNKFKYLIDHPVSLTGAGRDISFLYDVTYAKGQTREKAVCPPHLARSLQSHDGVIVPHKPKTLTDTLIPEEFHIVSSTGVSGLECYDDKYTTLLTDSENRLLLFPSMKPNKRVEVAQLNDVMDTMLERAGVENQEYTGPTKMHKLLHILKKEQTIYNMIFHELIRQVSVDCADRGELLSKVRERYVQMLDQIARQMIDFYKDLVTQRVMDQRILEELYNFKHVIEELTRELCLVRAHDVKLTKETEKAHKDLAQALLNAEKNAKIVEEYHDLYTLQRERMENDMKKLVAERDIWSSATYELALKVIERNRVILARRLYLNEKGWNKYTKHFIILLSNKDTEDLALLQKLTQKWRNLVNKLKQEVEQMEESTSETLKIVKDGLIKWQEFFNEKDILSPNKGNIFNSVLLDFKQWQKILNEKKEEFTGDVLLSKYDTLKIIKHLQENWADIGLGIFNRHKSLEGEMPSERQYMEEIIKNIQKLYKEYEIRINGDNGYSKILPSLISSLDFCSFKLENLEFPDTPLEEWQEIDEKINEMKSHLDILLNLTGIVPQHIDVDSVSVLQAYIFNMIQQWLLKIGNEINNGNIELQHHMDELHISMIQWMVNLLILMIPNFTDQDCLLKLEEESAEKHDIGVARLELDAIELTRKLYQYSSYLSSCCKGMVTAMALSKSTNSHKNATEDLYEVDKLKKECYEWINTCSCLLSNIKGRKITLLTYEEIERLLEEEAVKEFIEPEIDESFKEDEEESKEDRKLQEENKERAEEQPSTSTEKEKLIRFIGEDENVHSKPLFETDVLSSWRESAKQGTLAQKYLEAMAVIEHMQEKLLEVENRARQAEEKFEDAYEKLHHTLIKNKDLEELVMTSRKESKEEKENQDEREVKEEEEQQEEEEVRSAENSSKSPKKGH

SEQ ID NO: 15346 - protein, 443 aa, Homo sapiens
MKPNKRVEVAQLNDVMDTMLERAGVENQEYTGPTKMHKLLHILKKEQTIYNMIFHELIRQVSVDCADRGELLSKVRERYVQMLDQIARQMIDFYKDLVTQRVMDQRILEELYNFKHVIEELTRELCLVRAHDVKLTKETEKAHKDLAQALLNAEKNAKIVEEYHDLYTLQRERMENDMKKLVAERDIWSSATYELALKVIERNRVILARRLYLNEKGWNKYTKHFIILLSNKDTEDLALLQKLTQKWRNLVNKLKQEVEQMEESTSETLKIVKDGLIKWQEFFNEKDILSPNKGNIFNSVLLDFKQWQKILNEKKEEFTGDVLLSKYDTLKIIKHLQENWADIGLGIFNRHKSLEGEMPSERQYMEEIIKNIQKLYKEYEIRINGDNETGSHRVAQAGLKLLGSSDHPTSAPQSAGIRGIIHRTWPWVNFYIVCEVTPKFFQV

SEQ ID NO: 15347 - protein, 140 aa, Homo sapiens
MVTAMALSKSTNSHKNATEDLYEVDKLKKECYEWINTCSCLLSNIKGRKITLLTYEEIERLLEEEAVKEFIEPEIDESFKEDEEESKEDRKLQEENKERAEEQPSTSTEKEKLIRFIGEDENVHSKPLFETDVLSSWKKV

SEQ ID NO: 15348 - protein, 339 aa, Homo sapiens [sequence omitted]

SEQ ID NO: 15349 - protein, 564 aa, Homo sapiens
MDSRYNSTAGIGDLNQLSAAIPATRVEVSVSCRNLLDRDTFSKSDPICVLYVQGVGNKEWREFGRTEVIDNTLNPDFVRKFILDYFFEERENLRFDLYDVDSKSPNLSKHDFLGQVFCTLGEIVGSQGSRLEKPIVGIPGKKCGTIILTAEELNCCRDAVLMQFCANKLDKKDFFGKSDPFLVFYRSNEDGSFTICHKTEVVKNTLNPVWQAFKISVRALCNGDYDRTIKVEVYDWDRDGSHDFIGEFTTSYRELSRGQSQFNVYEVVNPKKKGKKKKYTNSGTVTLLSFLVETEVSFLDYIKGGTQINFTVAIDFTASNGNPAQPTSLHYMNPYQLNAYGMALKAVGEIVQDYDSDKMFPALGFGAKLPPDGRISHEFALNGNPQNPYCDGIEGVMEAYYRSLKSVQLYGPTNFAPVINHVARYASSVKDGSQYFVLLIVTDGVISDMAQTKESIVNASKLPMSIIIVGVGPAEFDAMVELDGDDVRVSSRGKYAERDIVQFVPFRDYIDRSGNHILSMARLAKDVLAEIPEQFLSYMRARGIKPSPAPPPYTPPTHVLQTQI

SEQ ID NO: 15350 - protein, 233 aa, Homo sapiens
MNPYQLNAYGMALKAVGEIVQDYDSDKMFPALGFGAKLPPDGRISHEFALNGNPQNPYCDGIEGVMEAYYRSLKSVQLYGPTNFAPVINHVARYASSVKDGSQYFVLLIVTDGVISDMAQTKESIVNASKLPMSIIIVGVGPAEFDAMVELDGDDVRVSSRGKYAERDIVQFVPFRDYIDRSGNHILSMARLAKDVLAEIPEQFLSYMRARGIKPSPAPPPYTPPTHVLQTQI

SEQ ID NO: 15351 - protein, 553 aa, Homo sapiens
MSLGGASERSVPATKIEITVSCRNLLDLDTFSKSDPMVVLYTQSRASQEWREFGRTEVIDNTLNPDFVRKFVLDYFFEEKQNLRFDVYNVDSKTNISKPKDFLGQAFLALGEVIGGQGSRVERTLTGVPGKKCGTILLTAEELSNCRDIATMQLCANKLDKKDFFGKSDPFLVFYRSNEDGTFTICHKTEVVKNTLNPVWQPFSIPVRALCNGDYDRTVKIDVYDWDRDGSHDFIGEFTTSYRELSKAQNQFTVYEVLNPRKKCKKKKYVNSGTVTLLSFSVDSEFTFVDYIKGGTQLNFTVAIDFTASNGNPLQPTSLHYMSPYQLSAYAMALKAVGEIIQDYDSDKLFPAYGFGAKLPPEGRISHQFPLNNNDEDPNCAGIEGVLESYFQSLRTVQLYGPTYFAPVINQVARAAAKISDGSQYYVLLIITDGVISDMTQTKEAIVSASSLPMSIIIVGVGPAMFEAMEELDGDDVRVSSRGRYAERDIVQFVPFRDYVDRSGNQVLSMARLAKDVLAEIPEQLLSYMRTRDIQPRPPPPANPSPIPAPEQP

SEQ ID NO: 15352 - protein, 503 aa, Homo sapiens
MSLGGASERSVPATKIEITVSCRNLLDLDTFSKSDPMVVLYTQSRASQEWREFGRTEVIDNTLNPDFVRKFVLDYFFEEKQNLRFDVYNVDSKTNISKPKDFLGQAFLALGEVIGGQGSRVERTLTGVPGKKCGTILLTAEELSNCRDIATMQLCANKLDKKDFFGKSDPFLVFYRSNEDGTFTICHKTEVVKNTLNPVWQPFSIPVRALCNGDYDRTVKIDVYDWDRDGSHDFIGEFTTSYRELSKAQNQFTVYEVLNPRKKCKKKKYVNSGTVTLLSFSVDSEFTFVDYIKGGTQLNFTVAIDFTASNGNPLQPTSLHYMSPYQLSAYAMALKAVGEIIQDYDSDKLFPAYGFGAKLPPEGRISHQFPLNNNDEDPNCAGIEGVLESYFQSLRTVQLYGPTYFAPVINQVARAAAKISDGSQYYVLLIITDGVISDMTQTKEAIVSASSLPMSIIIVGVGPAMFEAMEELDGDDVRVSSRGRYAERDIVQEGCCSLGTSVV

SEQ ID NO: 15353 - protein, 803 aa, Homo sapiens
MAEAHQAVGFRPSLTSDGAEVELSAPVLQEIYLSGLRSWKRHLSRFWNDFLTGVFPASPLSWLFLFSAIQLAWFLQLDPSLGLMEKIKELLPDWGGQHHGLRGVLAAALFASCLWGALIFTLHVALRLLLSYHGWLLEPHGAMSSPTKTWLALVRIFSGRHPMLFSYQRSLPRQPVPSVQDTVRKYLESVRPILSDEDFDWTAVLAQEFLRLQASLLQWYLRLKSWWASNYVSDWWEEFVYLRSRNPLMVNSNYYMMDFLYVTPTPLQAARAGNAVHALLLYRHRLNRQEIPPTLLMGMRPLCSAQYEKIFNTTRIPGVQKDYIRHLHDSQHVAVFHRGRFFRMGTHSRNSLLSPRALEQQFQRILDDPSPACPHEEHLAALTAAPRGTWAQVRTSLKTQAAEALEAVEGAAFFVSLDAEPAGLTREDPAASLDAYAHALLAGRGHDRWFDKSFTLIVFSNGKLGLSVEHSWADCPISGHMWEFTLATECFQLGYSTDGHCKGHPDPTLPQPQRLQWDLPDQIHSSISLALRGAKILSENVDCHVVPFSLFGKSFIRRCHLSSDSFIQIALQLAHFRDRGQFCLTYESAMTRLFLEGRTETVRSCTREACNFVRAMEDKEKTDPQCLALFRVAVDKHQALLKAAMSGQGVDRHLFALYIVSRFLHLQSPFLTQVHSEQWQLSTSQIPVQQMHLFDVHNYPDYVSSGGGFGPADDHGYGVSYIFMGDGMITFHISSKKSSTKTDSHRLGQHIEDALLDVASLFQAGQHFKRRFRGSGKENSRHRCGFLSRQTGASKASMTSTDF

SEQ ID NO: 15354 - protein, 792 aa, Homo sapiens
MAEAHQAVGFRPSLTSDGAEVELSAPVLQEIYLSGLRSWKRHLSRFWNDFLTGVFPASPLSWLFLFSAIQLAWFLQLDPSLGLMEKIKELLPDWGGQHHGLRGVLAAALFASCLWGALIFTLHVALRLLLSYHGWLLEPHGAMSSPTKTWLALVRIFSGRHPMLFSYQRSLPRQPVPSVQDTVRKYLESVRPILSDEDFDWTAVLAQEFLRLQASLLQWYLRLKSWWASNYVSDWWEEFVYLRSRNPLMVNSNYYMMAARAGNAVHALLLYRHRLNRQEIPPTLLMGMRPLCSAQYEKIFNTTRIPGVQKDYIRHLHDSQHVAVFHRGRFFRMGTHSRNSLLSPRALEQQFQRILDDPSPACPHEEHLAALTAAPRGTWAQVRTSLKTQAAEALEAVEGAAFFVSLDAEPAGLTREDPAASLDAYAHALLAGRGHDRWFDKSFTLIVFSNGKLGLSVEHSWADCPISGHMWEFTLATECFQLGYSTDGHCKGHPDPTLPQPQRLQWDLPDQIHSSISLALRGAKILSENVDCHVVPFSLFGKSFIRRCHLSSDSFIQIALQLAHFRDRGQFCLTYESAMTRLFLEGRTETVRSCTREACNFVRAMEDKEKTDPQCLALFRVAVDKHQALLKAAMSGQGVDRHLFALYIVSRFLHLQSPFLTQVHSEQWQLSTSQIPVQQMHLFDVHNYPDYVSSGGGFGPADDHGYGVSYIFMGDGMITFHISSKKSSTKTDSHRLGQHIEDALLDVASLFQAGQHFKRRFRGSGKENSRHRCGFLSRQTGASKASMTSTDF

SEQ ID NO: 15355 - protein, 714 aa, Homo sapiens
MAEAHQAVGFRPSLTSDGAEVELSAPVLQEIYLSGLRSWKRHLSRFWNDFLTGVFPASPLSWLFLFSAIQLAWFLQLDPSLGLMEKIKELLPDWGGQHHGLRGVLAAALFASCLWGALIFTLHVALRLLLSYHGWLLEPHGAMSSPTKTWLALVRIFSGRHPMLFSYQRSLPRQPVPSVQDTVRKYLESVRPILSDEDFDWTAVLAQEFLRLQASLLQWYLRLKSWWASNYVSDWWEEFVYLRSRNPLMVNSNYYMMDFLYVTPTPLQAARAGNAVHALLLYRHRLNRQEIPPTLLMGMRPLCSAQYEKIFNTTRIPGVQKDYIRHLHDSQHVAVFHRGRFFRMGTHSRNSLLSPRALEQQFQRILDDPSPACPHEEHLAALTAAPRGTWAQVRTSLKTQAAEALEAVEGAAFFVSLDAEPAGLTREDPAASLDAYAHALLAGRGHDRWFDKSFTLIVFSNGKLGLSVEHSWADCPISGHMWEFTLATECFQLGYSTDGHCKGHPDPTLPQPQRLQWDLPDQIHSSISLALRGAKILSENVDCHVVPFSLFGKSFIRRCHLSSDSFIQIALQLAHFRDRGQFCLTYESAMTRLFLEGRTETVRSCTREACNFVRAMEDKEKTADDHGYGVSYIFMGDGMITFHISSKKSSTKTDSHRLGQHIEDALLDVASLFQAGQHFKRRFRGSGKENSRHRCGFLSRQTGASKASMTSTDF

SEQ ID NO: 15356 - protein, 1604 aa, Homo sapiens
MWVSWAPGLWLLGLWATFGHGANTGAQCPPSQQEGLKLEHSSSLPANVTGFNLIHRLSLMKTSAIKKIRNPKGPLILRLGAAPVTQPTRRVFPRGLPEEFALVLTLLLKKHTHQKTWYLFQVTDANGYPQISLEVNSQERSLELRAQGQDGDFVSCIFPVPQLFDLRWHKLMLSVAGRVASVHVDCSSASSQPLGPRRPMRPVGHVFLGLDAEQGKPVSFDLQQVHIYCDPELVLEEGCCEILPAGCPPETSKARRDTQSNELIEINPQSEGKVYTRCFCLEEPQNSEVDAQLTGRISQKAERGAKVHQETAADECPPCVHGARDSNVTLAPSGPKGGKGERGLPGPPGSKGEKGARGNDCVRISPDAPLQCAEGPKGEKGESGALGPSGLPGSTGEKGQKGEKGDGGIKGVPGKPGRDGRPGEICVIGPKGQKGDPGFVGPEGLAGEPGPPGLPGPPGIGLPGTPGDPGGPPGPKGDKGSSGIPGKEGPGGKPGKPGVKGEKGDPCEVCPTLPEGFQNFVGLPGKPGPKGEPGDPVPARGDPGIQGIKGEKGEPCLSCSSVVGAQHLVSSTGASGDVGSPGFGLPGLPGRAGVPGLKGEKGNFGEAGPAGSPGPPGPVGPAGIKGAKGEPCEPCPALSNLQDGDVRVVALPGPSGEKGEPGPPGFGLPGKQGKAGERGLKGQKGDAGNPGDPGTPGTTGRPGLSGEPGVQGPAGPKGEKGDGCTACPSLQGTVTDMAGRPGQPGPKGEQGPEGVGRPGKPGQPGLPGVQGPPGLKGVQGEPGPPGRGVQGPQGEPGAPGLPGIQGLPGPRGPPGPTGEKGAQGSPGVKGATGPVGPPGASVSGPPGRDGQQGQTGLRGTPGEKGPRGEKGEPGECSCPSQGDLIFSGMPGAPGLWMGSSWQPGPQGPPGIPGPPGPPGVPGLQGVPGNNGLPGQPGLTAELGSLPIEQHLLKSICGDCVQGQRAHPGYLVEKGEKGDQGIPGVPGLDNCAQCFLSLERPRAEEARGDNSEGDPGCVGSPGLPGPPGLPGQRGEEGPPGMRGSPGPPGPIGPPGFPGAVGSPGLPGLQGERGLTGLTGDKGEPGPPGQPGYPGATGPPGLPGIKGERGYTGSAGEKGEPGPPGSEGLPGPPGPAGPRGERGPQGNSGEKGDQGFQGQPGFPGPPGPPGFPGKVGSPGPPGPQAEKGSEGIRGPSGLPGSPGPPGPPGIQGPAGLDGLDGKDGKPGLRGDPGPAGPPGLMGPPGFKGKTGHPGLPGPKGDCGKPGPPGSTGRPGAEGEPGAMGPQGRPGPPGHVGPPGPPGQPGPAGISAVGLKGDRGATGERGLAGLPGQPGPPGHPGPPGEPGTDGAAGKEGPPGKQGFYGPPGPKGDPGAAGQKGQAGEKGRAGMPGGPGKSGSMGPVGPPGPAGERGHPGAPGPSGSPGLPGVPGSMGDMVNYDEIKRFIRQEIIKMFDERMAYYTSRMQFPMEMAAAPGRPGPPGKDGAPGRPGAPGSPGLPGQIGREGRQGLPGVRGLPGTKGEKGDIGIGIAGENGLPGPPGPQGPPGYGKMGATGPMGQQGIPGIPGPPGPMGQPGKAGHCNPSDCFGAMPMEQQYPPMKTMKGPFG

SEQ ID NO: 15357 - protein, 1602 aa, Homo sapiens
MWVSWAPGLWLLGLWATFGHGANTGAQCPPSQQEGLKLEHSSSLPANVTGFNLIHRLSLMKTSAIKKIRNPKGPLILRLGAAPVTQPTRRVFPRGLPEEFALVLTLLLKKHTHQKTWYLFQVTDANGYPQISLEVNSQERSLELRAQGQDGDFVSCIFPVPQLFDLRWHKLMLSVAGRVASVHVDCSSASSQPLGPRRPMRPVGHVFLGLDAEQGKPVSFDLQQVHIYCDPELVLEEGCCEILPAGCPPETSKARRDTQSNELIEINPQSEGKVYTRCFCLEEPQNSEVDAQLTGRISQKAERGAKVHQETAADECPPCVHGARDSNVTLAPSGPKGGKGERGLPGPPGSKGEKGARGNDCVRISPDAPLQCAEGPKGEKGESGALGPSGLPGSTGEKGQKGEKGDGGIKGVPGKPGRDGRPGEICVIGPKGQKGDPGFVGPEGLAGEPGPPGLPGPPGIGLPGTPGDPGGPPGPKGDKGSSGIPGKEGPGGKPGKPGVKGEKGDPCEVCPTLPEGFQNFVGLPGKPGPKGEPGDPVPARGDPGIQGIKGEKGEPCLSCSSVVGAQHLVSSTGASGDVGSPGFGLPGLPGRAGVPGLKGEKGNFGEAGPAGSPGPPGPVGPAGIKGAKGEPCEPCPALSNLQDGDVRVVALPGPSGEKGEPGPPGFGLPGKQGKAGERGLKGQKGDAGNPGDPGTPGTTGRPGLSGEPGVQGPAGPKGEKGDGCTACPSLQGTVTDMAGRPGQPGPKGEQGPEGVGRPGKPGQPGLPGVQGPPGLKGVQGEPGPPGRGVQGPQGEPGAPGLPGIQGLPGPRGPPGPTGEKGAQGSPGVKGATGPVGPPGASVSGPPGRDGQQGQTGLRGTPGEKGPRGEKGEPGECSCPSQGDLIFSGMPGAPGLWMGSSWQPGPQGPPGIPGPPGPPGVPGLQGVPGNNGLPGQPGLTAELGSLPIEQHLLKSICGDCVQGQRAHPGYLVEKGEKGDQGIPGVPGLDNCAQCFLSLERPRAEEARGDNSEGDPGCVGSPGLPGPPGLPGQRGEEGPPGMRGSPGPPGPIGPGFPGAVGSPGLPGLQGERGLTGLTGDKGEPGPPGQPGYPGATGPPGLPGIKGERGYTGSAGEKGEPGPPGSEGLPGPPGPAGPRGERGPQGNSGEKGDQGFQGQPGFGPPGPPGFPGKVGSPGPPGPQAEKGSEGIRGPSGLPGSPGPPGPPGIQGPAGLDGLDGKDGKPGLRGDPGPAGPPGLMGPPGFKGKTGHPGLPGPKGDCGKPGPPGSTGRPGAEGEPGAMGPQGRPGPPGHVGPPGPPGQPGPAGISAVGLKGDRGATGERGLAGLPGQPGPPGHPGPPGEPGTDGAAGKEGPPGKQGFYGPPGPKGDPGAAGQKGQAGEKGRAGMPGGPGKSGSMGPVGPPGPAGERGHPGAPGPSGSPGLPGVPGSMGDMVNYDEIKRFIRQEIIKMFDERMAYYTSRMQFPMEMAAAPGRPGPPGKDGAPGRPGAPGSPGLPGQIGREGRQGLPGVRGLPGTKGEKGDIGIGIAGENGLPGPPGPQGPPGYGKMGATGPMGQQGIPGIPGPPGPMGQPGKAGHCNPSDCFGAMPMEQQYPPMKTMKGPFG

SEQ ID NO: 15358 - protein, 508 aa, Homo sapiens
MWELVALLLLTLAYLFWPKRRCPGAKYPKSLLSLPLVGSLPFLPRHGHMHNNFFKLQKKYGPIYSVRMGTKTTVIVGHHQLAKEVLIKKGKDFSGRPQMATLDIASNNRKGIAFADSGAHWQLHRRLAMATFALFKDGDQKLEKIICQEISTLCDMLATHNGQSIDISFPVFVAVTNVISLICFNTSYKNGDPELNVIQNYNEGIIDNLSKDSLVDLVPWLKIFPNKTLEKLKSHVKIRNDLLNKILENYKEKFRSDSITNMLDTLMQAKMNSDNGNAGPDQDSELLSDNHILTTIGDIFGAGVETTTSVVKWTLAFLLHNPQVKKKLYEEIDQNVGFSRTPTISDRNRLLLLEATIREVLRLRPVAPMLIPHKANVDSSIGEFAVDKGTEVIINLWALHHNEKEWHQPDQFMPERFLNPAGTQLISPSVSYLPFGAGPRSCIGEILARQELFLIMAWLLQRFDLEVPDDGQLPSLEGIPKVVFLIDSFKVKIKVRQAWREAQAEGST

SEQ ID NO: 15359 - protein, 268 aa, Homo sapiens
MFLVNSFLKGGGGGGGGGGGLGGGLGNVLGGLISGAGGGGGGGGGGGGGGGGGGGGTAMRILGGVISAISEAAAQYNPEPPPPRTHYSNIEANESEEVRQFRRLFAQLAGDDMEVSATELMNILNKVVTRHPDLKTDGFGIDTCRSMVAVMDSDTTGKLGFEEFKYLWNNIKRWQAIYKQFDTDRSGTICSSELPGAFEAAGFHLNEHLYNMIIRRYSDESGNMDFDNFISCLVRLDAMFRAFKSLDKDGTGQIQVNIQEWLQLTMYS

SEQ ID NO: 15360 - protein, 848 aa, Homo sapiens
MTATVENLTFQKDTLGNAVDKNTSRLELRSYSLAGRHGSTEPLVLAWSSQFRRLTWGCALDALHRSPCVAASQHGVTHLIRSSRTPHSTRCRKEDAQPGHHGNGAASVTAQARGQRSVLQVPLPVPRSCLFSESFVVSVSSQSRFLASVPGTGVQRSTAADMAASTAAGKQRIPKVAKVKNKAPAEVQITAEQLLREAKERELELLPPPPQQKITDEEELNDYKLRKRKTFEDNIRKNRTVISNWIKYAQWEESLKEIQRARSIYERALDVDYRNITLWLKYAEMEMKNRQVNHARNIWDRAITTLPRVNQFWYKYTYMEEMLGNVAGARQVFERWMEWQPEEQAWHSYINFELRYKEVDRARTIYERFVLVHPDVKNWIKYARFEEKHAYFAHARKVYERAVEFFGDEHMDEHLYVAFAKFEENQKEFERVRVIYKYALDRISKQDAQELFKNYTIFEKKFGDRRGIEDIIVSKRRFQYEEEVKANPHNYDAWFDYLRLVESDAEAEAVREVYERAIANVPPIQEKRHWKRYIYLWINYALYEELEAKDPERTRQVYQASLELIPHKKFTFAKMWILYAQFEIRQKNLSLARRALGTSIGKCPKNKLFKVYIELELQLREFDRCRKLYEKFLEFGPENCTSWIKFAELETILGDIDRARAIYELAISQPRLDMPEVLWKSYIDFEIEQEETERTRNLYRRLLQRTQHVKVWISFAQFELSSGKEGSLTKCRQIYEEANKTMRNCEEKEERLMLLESWRSFEEEFGTASDKERVDKLMPEKVKKRRKVQTDDGSDAGWEEYFDYIFPEDAANQPNLKLLAMAKLWKKQQQEKEDAEHHPDEDVDESES

SEQ ID NO: 15361 - protein, 687 aa, Homo sapiens
MAASTAAGKQRIPKVAKVKNKAPAEVQITAEQLLREAKERELELLPPPPQQKITDEEELNDYKLRKRKTFEDNIRKNRTVISNWIKYAQWEESLKEIQRARSIYERALDVDYRNITLWLKYAEMEMKNRQVNHARNIWDRAITTLPRVNQFWYKYTYMEEMLGNVAGARQVFERWMEWQPEEQAWHSYINFELRYKEVDRARTIYERFVLVHPDVKNWIKYARFEEKHAYFAHARKVYERAVEFFGDEHMDEHLYVAFAKFEENQKEFERVRVIYKYALDRISKQDAQELFKNYTIFEKKFGDRRGIEDIIVSKRRFQYEEEVKANPHNYDAWFDYLRLVESDAEAEAVREVYERAIANVPPIQEKRHWKRYIYLWINYALYEELEAKDPERTRQVYQASLELIPHKKFTFAKMWILYAQFEIRQKNLSLARRALGTSIGKCPKNKLFKVYIELELQLREFDRCRKLYEKFLEFGPENCTSWIKFAELETILGDIDRARAIYELAISQPRLDMPEVLWKSYIDFEIEQEETERTRNLYRRLLQRTQHVKVWISFAQFELSSGKEGSLTKCRQIYEEANKTMRNCEEKEERLMLLESWRSFEEEFGTASDKERVDKLMPEKVKKRRKVQTDDGSDAGWEEYFDYIFPEDAANQPNLKLLAMAKLWKKQQQEKEDAEHHPDEDVDESES

SEQ ID NO: 15362 - protein, 836 aa, Homo sapiens
MTATVENLTFQKDTLGNAVDKNGRHGSTEPLVLAWSSQFRRLTWGCALDALHRSPCVAASQHGVTHLIRSSRTPHSTRCRKEDAQPGHHGNGAASVTAQARGQRSVLQVPLPVPRSCLFSESFVVSVSSQSRFLASVPGTGVQRSTAADMAASTAAGKQRIPKVAKVKNKAPAEVQITAEQLLREAKERELELLPPPPQQKITDEEELNDYKLRKRKTFEDNIRKNRTVISNWIKYAQWEESLKEIQRARSIYERALDVDYRNITLWLKYAEMEMKNRQVNHARNIWDRAITTLPRVNQFWYKYTYMEEMLGNVAGARQVFERWMEWQPEEQAWHSYINFELRYKEVDRARTIYERFVLVHPDVKNWIKYARFEEKHAYFAHARKVYERAVEFFGDEHMDEHLYVAFAKFEENQKEFERVRVIYKYALDRISKQDAQELFKNYTIFEKKFGDRRGIEDIIVSKRRFQYEEEVKANPHNYDAWFDYLRLVESDAEAEAVREVYERAIANVPPIQEKRHWKRYIYLWINYALYEELEAKDPERTRQVYQASLELIPHKKFTFAKMWILYAQFEIRQKNLSLARRALGTSIGKCPKNKLFKVYIELELQLREFDRCRKLYEKFLEFGPENCTSWIKFAELETILGDIDRARAIYELAISQPRLDMPEVLWKSYIDFEIEQEETERTRNLYRRLLQRTQHVKVWISFAQFELSSGKEGSLTKCRQIYEEANKTMRNCEEKEERLMLLESWRSFEEEFGTASDKERVDKLMPEKVKKRRKVQTDDGSDAGWEEYFDYIFPEDAANQPNLKLLAMAKLWKKQQQEKEDAEHHPDEDVDESES

SEQ ID NO: 15363 - protein, 104 aa, Homo sapiens
MTATVENLTFQKDTLGNAVDKNGRHGSTEPLVLAWSSQFRRLTWGCALDALHRSPCVAASQHGVTHLIRSSRTPHSTRCRKEDAQPGHHGNGAASVTAQARGQR

SEQ ID NO: 15364 - protein, 74 aa, Homo sapiens
MTATVENLTFQKDTLGNAVDKNILASLLVSTALPTSSAAPGRRTPRAAARRTRSLVTMETVPPPSRLKREVKGQ

SEQ ID NO: 15365 - protein, 658 aa, Homo sapiens
MVPRLLLRAWPRGPAVGPGAPSRPLSAGSGPGQYLQRSIVPTMHYQDSLPRLPIPKLEDTIRRYLSAQKPLLNDGQFRKTEQFCKSFENGIGKELHEQLVALDKQNKHTSYISGPWFDMYLSARDSVVLNFNPFMAFNPDPKSEYNDQLTRATNMTVSAIRFLKTLRAGLLEPEVFHLNPAKSDTITFKRLIRFVPSSLSWYGAYLVNAYPLDMSQYFRLFNSTRLPKPSRDELFTDDKARHLLVLRKGNFYIFDVLDQDGNIVSPSEIQAHLKYILSDSSPAPEFPLAYLTSENRDIWAELRQKLMSSGNEESLRKVDSAVFCLCLDDFPIKDLVHLSHNMLHGDGTNRWFDKSFNLIIAKDGSTAVHFEHSWGDGVAVLRFFNEVFKDSTQTPAVTPQSQPATTDSTVTVQKLNFELTDALKTGITAAKEKFDATMKTLTIDCVQFQRGGKEFLKKQKLSPDAVAQLAFQMAFLRQYGQTVATYESCSTAAFKHGRTETIRPASVYTKRCSEAFVREPSRHSAGELQQMMVECSKYHGQLTKEAAMGQGFDRHLFALRHLAAAKGIILPELYLDPAYGQINHNVLSTSTLSSPAVNLGGFAPVVSDGFGVGYAVHDNWIGCNVSSYPGRNAREFLQCVEKALEDMFDALEGKSIKS

SEQ ID NO: 15366 - protein, 495 aa, Homo sapiens
MPQLLQNINGIIEAFRRYARTEGNCTALTRGELKRLLEQEFADVIVKPHDPATVDEVLRLLDEDHTGTVEFKEFLVLVFKVAQACFKTLSESAEGACGSQESGSLHSGASQELGEGQRSGTEVGRAGKGQHYEGSSHRQSQQGSRGQNRPGVQTQGQATGSAWVSSYDRQAESQSQERISPQIQLSGQTEQTQKAGEGKRNQTTEMRPERQPQTREQDRAHQTGETVTGSGTQTQAGATQTVEQDSSHQTGRTSKQTQEATNDQNRGTETHGQGRSQTSQAVTGGHAQIQAGTHTQTPTQTVEQDSSHQTGSTSTQTQESTNGQNRGTEIHGQGRSQTSQAVTGGHTQIQAGSHTETVEQDRSQTVSHGGAREQGQTQTQPGSGQRWMQVSNPEAGETVPGGQAQTGASTESGRQEWSSTHPRRCVTEGQGDRQPTVVGEEWVDDHSRETVILRLDQGNLHTSVSSAQGQDAAQSEEKRGITARELYSYLRSTKP

SEQ ID NO: 15367 - protein, 1497 aa, Homo sapiens
MDVTKKNKRDGTEVTERIVTETVTTRLTSLPPKGGTSNGYAKTASLGGGSRLEKQSLTHGSSGYINSTGSTRGHASTSSYRRAHSPASTLPNSPGSTFERKTHVTRHAYEGSSSGNSSPEYPRKEFASSSTRGRSQTRESEIRVRLQSASPSTRWTELDDVKRLLKGSRSASVSPTRNSSNTLPIPKKGTVETKIVTASSQSVSGTYDATILDANLPSHVWSSTLPAGSSMGTYHNNMTTQSSSLLNTNAYSAGSVFGVPNNMASCSPTLHPGLSTSSSVFGMQNNLAPSLTTLSHGTTTTSTAYGVKKNMPQSPAAVNTGVSTSAACTTSVQSDDLLHKDCKFLILEKDNTPAKKEMELLIMTKDSGKVFTASPASIAATSFSEDTLKKEKQAAYNADSGLKAEANGDLKTVSTKGKTTTADIHSYGSSGGGGSGGGGGVGGAGGGPWGPAPAWCPCGSCCSWWKWLLGLLLTWLLLLGLLFGLIALAEEVRKLKARVDELERIRRSILPYGDSMDRIEKDRLQGMAPAAGADLDKIGLHSDSQEELWMFVRKKLMMEQENGNLRGSPGPKGDMGSPGPKGDRGFPGTPGIPGPLGHPGPQGPKGQKGSVGDPGMEGPMGQRGREGPMGPRGEAGPPGSGEKGERGAAGEPGPHGPPGVPGSVGPKGSSGSPGPQGPPGPVGLQGLRGEVGLPGVKGDKGPMGPPGPKGDQGEKGPRGLTGEPGMRGLPGAVGEPGAKGAMGPAGPDGHQGPRGEQGLTGMPGIRGPPGPSGDPGKPGLTGPQGPQGLPGTPGRPGIKGEPGAPGKIVTSEGSSMLTVPGPPGPPGAMGPPGPPGAPGPAGPAGLPGHQEVLNLQGPPGPPGPRGPPGPSIPGPPGPRGPPGEGLPGPPGPPGSFLSNSETFLSGPPGPPGPPGPKGDQGPPGPRGHQGEQGLPGFSTSGSSSFGLNLQGPPGPPGPQGPKGDKGDPGVPGALGIPSGPSEGGSSSTMYVSGPPGPPGPPGPPGSISSSGQEIQQYISEYMQSDSIRSYLSGVQGPPGPPGPPGPVTTITGETFDYSELASHVVSYLRTSGYGVSLFSSSISSEDILAVLQRDDVRQYLRQYLMGPRGPPGPPGASGDGSLLSLDYAELSSRILSYMSSSGISIGLPGPPGPPGLPGTSYEELLSLLRGSEFRGIVGPPGPPGPPGIPGNVWSSISVEDLSSYLHTAGLSFIPGPPGPPGPPGPRGPPGVSGALATYAAENSDSFRSELISYLTSPDVRSFIVGPPGPPGPQGPPGDSRLLSTDASHSRGSSSSSHSSSVRRGSSYSSSMSTGGGGAGSLGAGGAFGEAAGDRGPYGTDIGPGGGYGAAAEGGMYAGNGGLLGADFAGDLDYNELAVRVSESMQRQGLLQGMAYTVQGPPGQPGPQGPPGISKVFSAYSNVTADLMDFFQTYGAIQGPPGQKGEMGTPGPKGDRGPAGPPGHPGPPGPRGHKGEKGDKGDQVYAGRRRRRSIAVKP

SEQ ID NO: 15368 - protein, 1415 aa, Homo sapiens
MDVTKKNKRDGTEVTERIVTETVTTRLTSLPPKGGTSNGYAKTASLGGGSRLEKQSLTHGSSGYINSTGSTRGHASTSSYRRAHSPASTLPNSPGSTFERKTHVTRHAYEGSSSGNSSPEYPRKEFASSSTRGRSQTRESEIRVRLQSASPSTRWTELDDVKRLLKGSRSASVSPTRNSSNTLPIPKKGTVETKIVTASSQSVSGTYDATILDANLPSHVWSSTLPAGSSMGTYHNNMTTQSSSLLNTNAYSAGSVFGVPNNMASCSPTLHPGLSTSSSVFGMQNNLAPSLTTLSHGTTTTSTAYGVKKNMPQSPAAVNTGVSTSAACTTSVQSDDLLHKDCKFLILEKDNTPAKKEMELLIMTKDSGKVFTASPASIAATSFSEDTLKKEKQAAYNADSGLKAEANGDLKTVSTKGKTTTADIHSYGSSGGGGSGGGGGVGGAGGGPWGPAPAWCPCGSCCSWWKWLLGLLLTWLLLLGLLFGLIALAEEVRKLKARVDELERIRRSILPYGDSMDRIEKDRLQGMAPAAGADLDKIGLHSDSQEELWMFVRKKLMMEQENGNLRGSPGPKGDMGSPGPKGDRGFPGTPGIPGPLGHPGPQGPKGQKGSVGDPGMEGPMGQRGREGPMGPRGEAGPPGSGEKGERGAAGEPGPHGPPGVPGSVGPKGSSGSPGPQGPPGPVGLQGLRGEVGLPGVKGDKGPMGPPGPKGDQGEKGPRGLTGEPGMRGLPGAVGEPGAKGAMGPAGPDGHQGPRGEQGLTGMPGIRGPPGPSGDPGKPGLTGPQGPQGLPGTPGRPGIKGEPGAPGKIVTSEGSSMLTVPGPPGPPGAMGPPGPPGAPGPAGPAGLPGHQEVLNLQGPPGPPGPRGPPGPSIPGPPGPRGPPGEGLPGPPGPPGSFLSNSETFLSGPPGPPGPPGPKGDQGDPGVPGALGIPSGPSEGGSSSTMYVSGPPGPPGPPGPPGSISSSGQEIQQYISEYMQSDSIRSYLSGVQGPPGPPGPPGPVTTITGETFDYSELASHVVSYLRTSGYGVSLFSSSISSEDILAVLQRDDVRQYLRQYLMGPRGPPGPPGASGDGSLLSLDYAELSSRILSYMSSSGISIGLPGPPGPPGLPGTSYEELLSLLRAAGLSFIPGPPGPPGPPGPRGPPGVSGALATYAAENSDSFRSELISYLTSPDVRSFIVGPPGPPGPQGPPGDSRLLSTDASHSRGSSSSSHSSSVRRGSSYSSSMSTGGGGAGSLGAGGAFGEAAGDRGPYGTDIGPGGGYGAAAEGGMYAGNGGLLGADFAGDLDYNELAVRVSESMQRQGLLQGMAYTVQGPPGQPGPQGPPGISKVFSAYSNVTADLMDFFQTYGAIQGPPGQKGEMGTPGPKGDRGPAGPPGHPGPPGPRGHKGEKGDKGDQVYAGRRRRRSIAVKP

SEQ ID NO: 15369 - protein, 248 aa, Homo sapiens
MFLAKALLEGADRGLGEALGGLFGGGGQRREGGGRNIGGIVGGIVNFISEAAAAQYTPEPPPTQQHFTSVEASESEEVRRFRQQFTQLAGPDMEVGATDLMNILNKVLSKHKDLKTDGFSLDTCRSIVSVMDSDTTGKLGFEEFKYLWNNIKKWQCVYKQYDRDHSGSLGSSQLRGALQAAGFQLNEQLYQMIVRRYANEDGDMDFNNFISCLVRLDAMFRAFKSLDRDRDGLIQVSIKEWLQLTMYS

SEQ ID NO: 15370 - protein, 827 aa, Homo sapiens
MLLCLSPAWLMKVPAPGQPGEAALLVSKAVSFHPGGLTFLDDFVPPRRATYFLAGLGLGPGRGREAAELARDLTCPTGASAELARLLEDRLLTRQLLAQQGGVAVPATLAFTYKPPGLLRGGDASLGLRLVELSGKEGQETLVKEEVEAFLRSEALGDILQVAVKLSGWRWRGRQAWRLHPRAELGAVVDTVLALLEKLEEEESVLVEAVYPPAQLPCSDGPSPGPGLAVRICAVVCRTQGDRPLLSKVVCGVGRGDRPLRHHNSLPRTLEVALAQCGLGEEAQVAAVRQRVKAAAEAALAAVLALEAGLSAEQRGGRRAHTDFLGVDFALTAAGGVLTPVALELNGGLCLEACGALEGLWAAPRLGPAADEAVAAPLVETMLRRSARCLMEGKQLLVVGAGGVSKKFVWEAARDYGLQLHLVESDPNHFASQLVQTFIHFDMTEHRRDEENARLLAELVRARGLKLDGCFSYWDDCLVLTALLCQELGLPCSSPAAMRLAKQKSLTQLHLLHHHGPPWPAPSLHAVPCCPLESEADVERAVHQVPLPGVMKLEFGAGAVGVRLVEDAPQCHEHFSRITRDLQGEADHPGIGLGWGNAMLLMEFVEGTEHDVDLVLFGGRLLAAFVSDNGPTRLPGFTETAACMPTGLAPEQEAQMVQAAFRCCLGCGLLDGVFNVELKLTGAGPRLIEINPRMGGFYLRDWILELYGVDLLLAAVMVACGLRPALPTRPRARGHLVGVMCLVSQHLQALSSTASRETLQALHDRGLLRLNLLEEALVPGEYEEPYCSVACAGPSPTEARLRLLGLCQGLGIDGPSYPVAHFLSHFK

SEQ ID NO: 15371 - protein, 385 aa, Homo sapiens
MTEHRRDEENARLLAELVRARGLKLDGCFSYWDDCLVLTALLCQELGLPCSSPAAMRLAKQKSLTQLHLLHHHGPPWPAPSLHAVPCCPLESEADVERAVHQVPLPGVMKLEFGAGAVGVRLVEDAPQCHEHFSRITRDLQGEADHPGIGLGWGNAMLLMEFVEGTEHDVDLVLFGGRLLAAFVSDNGPTRLPGFTETAACMPTGLAPEQEAQMVQAAFRCCLGCGLLDGVFNVELKLTGAGPRLIEINPRMGGFYLRDWILELYGVDLLLAAVMVACGLRPALPTRPRARGHLVGVMCLVSQHLQALSSTASRETLQALHDRGLLRLNLLEEALVPGEYEEPYCSVACAGPSPTEARLRLLGLCQGLGIDGPSYPVAHFLSHFK

SEQ ID NO: 15372 - protein, 966 aa, Homo sapiens
MCPLAHPAQDLPLLPSQLSLDPSGPEWDCPLGSKDLEEEGPWGGGSGLPPTGCFPGSWRQDVGLDCKGSPEGAEARAWTVYYYSLLQSCLQQAGLPETQDRGQVPRTGCPGAEVTLCVLGSPSTFLPVLLEGGVQSPGNMLLCLSPAWLMKVPAPGQPGEAALLVSKAVSFHPGGLTFLDDFVPPRRATYFLAGLGLGPGRGREAAELARDLTCPTGASAELARLLEDRLLTRQLLAQQGGVAVPATLAFTYKPPGLLRGGDASLGLRLVELSGKEGQETLVKEEVEAFLRSEALGDILQVAVKLSGWRWRGRQAWRLHPRAELGAVVDTVLALLEKLEEEESVLVEAVYPPAQLPCSDGPSPGPGLAVRICAVVCRTQGDRPLLSKVVCGVGRGDRPLRHHNSLPRTLEVALAQCGLGEEAQVAAVRQRVKAAAEAALAAVLALEAGLSAEQRGGRRAHTDFLGVDFALTAAGGVLTPVALELNGGLCLEACGALEGLWAAPRLGPAADEAVAAPLVETMLRRSARCLMEGKQLLVVGAGGVSKKFVWEAARDYGLQLHLVESDPNHFASQLVQTFIHFDMTEHRRDEENARLLAELVRARGLKLDGCFSYWDDCLVLTALLCQELGLPCSSPAAMRLAKQKSLTQLHLLHHHGPPWPAPSLHAVPCCPLESEADVERAVHQVPLPGVMKLEFGAGAVGVRLVEDAPQCHEHFSRITRDLQGEADHPGIGLGWGNAMLLMEFVEGTEHDVDLVLFGGRLLAAFVSDNGPTRLPGFTETAACMPTGLAPEQEAQMVQAAFRCCLGCGLLDGVFNVELKLTGAGPRLIEINPRMGGFYLRDWILELYGVDLLLAAVMVACGLRPALPTRPRARGHLVGVMCLVSQHLQALSSTASRETLQALHDRGLLRLNLLEEALVPGEYEEPYCSVACAGPSPTEARLRLLGLCQGLGIDGPSYPVAHFLSHFK

SEQ ID NO: 15373 - protein, 924 aa, Homo sapiens
MLSLDPSGPEWDCPLGSKDLEEEGPWGGGSGLPPTGCFPGSWRQDVGLDCKGSPEGAEARAWTVYYYSLLQSCLQQAGLPETQDRGQVPRTGCPGAEVTLCVLGSPSTFLPVLLEGGVQSPGNMLLCLSPAWLMKVPAPGQPGEAALLVSKAVSFHPGGLTFLDDFVPPRRATYFLAGLGLGPGRGREAAELARDLTCPTGASAELARLLEDRLLTRQLLAQQGGVAVPATLAFTYKPPGLLRGGDASLGLRLVELSGKEGQETLVKEEVEAFLRSEALGDILQVAVKLSGWRWRGRQAWRLHPRAELGAVVDTVLALLEKLEEEESVLVEAVYPPAQLPCSDGPSPGPGLAVRICAVVCRTQGDRPLLSKVVCGVGRGDRPLRHHNSLPRTLEAALAAVLALEAGLSAEQRGGRRAHTDFLGVDFALTAAGGVLTPVALELNGGLCLEACGALEGLWAAPRLGPAADEAVAAPLVETMLRRSARCLMEGKQLLVVGAGGVSKKFVWEAARDYGLQLHLVESDPNHFASQLVQTFIHFDMTEHRRDEENARLLAELVRARGLKLDGCFSYWDDCLVLTALLCQELGLPCSSPAAMRLAKQKSLTQLHLLHHHGPPWPAPSLHAVPCCPLESEADVERAVHQVPLPGVMKLEFGAGAVGVRLVEDAPQCHEHFSRITRDLQGEADHPGIGLGWGNAMLLMEFVEGTEHDVDLVLFGGRLLAAFVSDNGPTRLPGFTETAACMPTGLAPEQEAQMVQAAFRCCLGCGLLDGVFNVELKLTGAGPRLIEINPRMGGFYLRDWILELYGVDLLLAAVMVACGLRPALPTRPRARGHLVGVMCLVSQHLQALSSTASRETLQALHDRGLLRLNLLEEALVPGEYEEPYCSVACAGPSPTEARLRLLGLCQGLGIDGPSYPVAHFLSHFK

SEQ ID NO: 15374 - protein, 950 aa, Homo sapiens
MLSLDPSGPEWDCPLGSKDLEEEGPWGGGSGLPPTGCFPGSWRQDVGLDCKGSPEGAEARAWTVYYYSLLQSCLQQAGLPETQDRGQVPRTGCPGAEVTLCVLGSPSTFLPVLLEGGVQSPGNMLLCLSPAWLMKVPAPGQPGEAALLVSKAVSFHPGGLTFLDDFVPPRRATYFLAGLGLGPGRGREAAELARDLTCPTGASAELARLLEDRLLTRQLLAQQGGVAVPATLAFTYKPPGLLRGGDASLGLRLVELSGKEGQETLVKEEVEAFLRSEALGDILQVAVKLSGWRWRGRQAWRLHPRAELGAVVDTVLALLEKLEEEESVLVEAVYPPAQLPCSDGPSPGPGLAVRICAVVCRTQGDRPLLSKVVCGVGRGDRPLRHHNSLPRTLEVALAQCGLGEEAQVAAVRQRVKAAAEAALAAVLALEAGLSAEQRGGRRAHTDFLGVDFALTAAGGVLTPVALELNGGLCLEACGALEGLWAAPRLGPAADEAVAAPLVETMLRRSARCLMEGKQLLVVGAGGVSKKFVWEAARDYGLQLHLVESDPNHFASQLVQTFIHFDMTEHRRDEENARLLAELVRARGLKLDGCFSYWDDCLVLTALLCQELGLPCSSPAAMRLAKQKSLTQLHLLHHHGPPWPAPSLHAVPCCPLESEADVERAVHQVPLPGVMKLEFGAGAVGVRLVEDAPQCHEHFSRITRDLQGEADHPGIGLGWGNAMLLMEFVEGTEHDVDLVLFGGRLLAAFVSDNGPTRLPGFTETAACMPTGLAPEQEAQMVQAAFRCCLGCGLLDGVFNVELKLTGAGPRLIEINPRMGGFYLRDWILELYGVDLLLAAVMVACGLRPALPTRPRARGHLVGVMCLVSQHLQALSSTASRETLQALHDRGLLRLNLLEEALVPGEYEEPYCSVACAGPSPTEARLRLLGLCQGLGIDGPSYPVAHFLSHFK

SEQ ID NO: 15375 - protein, 173 aa, Homo sapiens
MDVTIQHPWFKRTLGPFYPSRLFDQFFGEGLFEYDLLPFLSSTISPYYRQSLFRTVLDSGISEVRSDRDKFVIFLDVKHFSPEDLTVKVQDDFVEIHGKHNERQDDHGYISREFHRRYRLPSNVDQSALSCSLSADGMLTFCGPKIQTGLDATHAERAIPVSREEKPTSAPSS

SEQ ID NO: 15376 - protein, 156 aa, Homo sapiens
MFLTEDLITFNLRNFLLFQLWESSFSPGAGGFCTTLPPSFLRVDDRATSSTTDSSRAPSSPRPPGSTSHCGISTRCTERCLCVLPLRTSQVPDVMAPQHDQEKFHDLAYSCLGKSFSMSNQDLYGYSTSSLALGLAWLSWETKKKNVLHLVGLDSL

SEQ ID NO: 15377 - protein, 214 aa, Homo sapiens
MDDSETGFNLKVVLVSFKQCLDEKEEVLLDPYIASWKGLVRFLNSLGTIFSFISKDVVSKLRIMERLRGGPQSEHYRSLQAMVAHELSNRLVDLERRSHHPESGCRTVLRLHRALHWLQLFLEGLRTSPEDARTSALCADSYNASLAAYHPWVVRRAVTVAFCTLPTREVFLEAMNVGPPEQAVQMLGEALPFIQRVYNVSQKLYAEHSLLDLP

SEQ ID NO: 15378 - protein, 2017 aa, Homo sapiens
MSLGLARAQEVELTLETVIQTLESSVLCQEKGLGARDLAQDAQITSLPALIREIVTRNLSQPESPVLLPATEMASLLSLQEENQLLQQELSRVEDLLAQSRAERDELAIKYNAVSERLEQALRLEPGELETQEPRGLVRQSVELRRQLQEEQASYRRKLQAYQEGQQRQAQLVQRLQGKILQYKKRCSELEQQLLERSGELEQQRLRDTEHSQDLESALIRLEEEQQRSASLAQVNAMLREQLDQAGSANQALSEDIRKVTNDWTRCRKELEHREAAWRREEESFNAYFSNEHSRLLLLWRQVVGFRRLVSEVKMFTERDLLQLGGELARTSRAVQEAGLGLSTGLRLAESRAEAALEKQALLQAQLEEQLRDKVLREKDLAQQQMQSDLDKADLSARVTELGLAVKRLEKQNLEKDQVNKDLTEKLEALESLRLQEQAALETEDGEGLQQTLRDLAQAVLSDSESGVQLSGSERTADASNGSLRGLSGQRTPSPPRRSSPGRGRSPRRGPSPACSDSSTLALIHSALHKRQLQVQDMRGRYEASQDLLGTLRKQLSDSESERRALEEQLQRLRDKTDGAMQAHEDAQREVQRLRSANELLSREKSNLAHSLQVAQQQAEELRQEREKLQAAQEELRRQRDRLEEEQEDAVQDGARVRRELERSHRQLEQLEGKRSVLAKELVEVREALSRATLQRDMLQAEKAEVAEALTKAEAGRVELELSMTKLRAEEASLQDSLSKLSALNESLAQDKLDLNRLVAQLEEEKSALQGRQRQAEQEATVAREEQERLEELRLEQEVARQGLEGSLRVAEQAQEALEQQLPTLRHERSQLQEQLAQLSRQLSGREQELEQARREAQRQVEALERAAREKEALAKEHAGLAVQLVAAEREGRTLSEEATRLRLEKEALEGSLFEVQRQLAQLEARREQLEAEGQALLLAKETLTGELAGLRQQIIATQEKASLDKELMAQKLVQAEREAQASLREQRAAHEEDLQRLQREKEAAWRELEAERAQLQSQLQREQEELLARLEAEKEELSEEIAALQQERDEGLLLAESEKQQALSLKESEKTALSEKLMGTRHSLATISLEMERQKRDAQSRQEQDRSTVNALTSELRDLRAQREEAAAAHAQEVRRLQEQARDLGKQRDSCLREAEELRTQLRLLEDARDGLRRELLEAQRKLRESQEGREVQRQEAGELRRSLGEGAKEREALRRSNEELRSAVKKAESERISLKLANEDKEQKLALLEEARTAVGKEAGELRTGLQEVERSRLEARRELQELRRQMKMLDSENTRLGRELAELQGRLALGERAEKESRRETLGLRQRLLKGEASLEVMRQELQVAQRKLQEQEGEFRTRERRLLGSLEEARGTEKQQLDHARGLELKLEAARAEAAELGLRLSAAEGRAQGLEAELARVEVQRRAAEAQLGGLRSALRRGLGLGRAPSPAPRPVPGSPARDAPAEGSGEGLNSPSTLECSPGSQPPSPGPATSPASPDLDPEAVRGALREFLQELRSAQRERDELRTQTSALNRQLAEMEAERDSATSRARQLQKAVAESEEARRSVDGRLSGVQAELALQEESVRRSERERRATLDQVATLERSLQATESELRASQEKISKMKANETKLEGDKRRLKEVLDASESRTVKLELQRRSLEGELQRSRLGLSDREAQAQALQDRVDSLQRQVADSEVKAGTLQLTVERLNGALAKVEESEGALRDKVRGLTEALAQSSASLNSTRDKNLHLQKALTACEHDRQVLQERLDAARQALSEARKQSSSLGEQVQTLRGEVADLELQRVEAEGQLQQLREVLRQRQEGEAAALNTVQKLQDERRLLQERLGSLQRALAQLEAEKREVERSALRLEKDRVALRRTLDKVEREKLRSHEDTVRLSAEKGRLDRTLTGAELELAEAQRQIQQLEAQVVVLEQSHSPAQLEVDAQQQQLELQQEVERLRSAQAQTERTLEARERAHRQRVRGLEEQVSTLKGQLQQELRRSSAPFSPPSGPPEK

SEQ ID NO: 15379 - protein, 1313 aa, Homo sapiens
MLQAEKAEVAEALTKAEAGRVELELSMTKLRAEEASLQDSLSKLSALNESLAQDKLDLNRLVAQLEEEKSALQGRQRQAEQEATVAREEQERLEELRLEQEVARQGLEGSLRVAEQAQEALEQQLPTLRHERSQLQEQLAQLSRQLSGREQELEQARREAQRQVEALERAAREKEALAKEHAGLAVQLVAAEREGRTLSEEATRLRLEKEALEGSLFEVQRQLAQLEARREQLEAEGQALLLAKETLTGELAGLRQQIIATQEKASLDKELMAQKLVQAEREAQASLREQRAAHEEDLQRLQREKEAAWRELEAERAQLQSQLQREQEELLARLEAEKEELSEEIAALQQERDEGLLLAESEKQQALSLKESEKTALSEKLMGTRHSLATISLEMERQKRDAQSRQEQDRSTVNALTSELRDLRAQREEAAAAHAQEVRRLQEQARDLGKQRDSCLREAEELRTQLRLLEDARDGLRRELLEAQRKLRESQEGREVQRQEAGELRRSLGEGAKEREALRRSNEELRSAVKKAESERISLKLANEDKEQKLALLEEARTAVGKEAGELRTGLQEVERSRLEARRELQELRRQMKMLDSENTRLGRELAELQGRLALGERAEKESRRETLGLRQRLLKGEASLEVMRQELQVAQRKLQEQEGEFRTRERRLLGSLEEARGTEKQQLDHARGLELKLEAARAEAAELGLRLSAAEGRAQGLEAELARVEVQRRAAEAQLGGLRSALRRGLGLGRAPSPAPRPVPGSPARDAPAEGSGEGLNSPSTLECSPGSQPPSPGPATSPASPDLDPEAVRGALREFLQELRSAQRERDELRTQTSALNRQLAEMEAERDSATSRARQLQKAVAESEEARRSVDGRLSGVQAELALQEESVRRSERERRATLDQVATLERSLQATESELRASQEKISKMKANETKLEGDKRRLKEVLDASESRTVKLELQRRSLEGELQRSRLGLSDREAQAQALQDRVDSLQRQVADSEVKAGTLQLTVERLNGALAKVEESEGALRDKVRGLTEALAQSSASLNSTRDKNLHLQKALTACEHDRQVLQERLDAARQALSEARKQSSSLGEQVQTLRGEVADLELQRVEAEGQLQQLREVLRQRQEGEAAALNTVQKLQDERRLLQERLGSLQRALAQLEAEKREVERSALRLEKDRVALRRTLDKVEREKLRSHEDTVRLSAEKGRLDRTLTGAELELAEAQRQIQQLEAQVVVLEQSHSPAQLEVDAQQQQLELQQEVERLRSAQAQTERTLEARERAHRQRVSTLKGQLQQELRRSSAPFSPPSGPPEK

SEQ ID NO: 15380 - protein, 111 aa, Homo sapiens
MLQAKKTEVAEALTKAEAGRMELELSVTKLRAEEASLQDSLSKLSALNESLAQDKLDLNCLVTQLEEEKAMLQGRQRQAEQEATVAPAEQEWLEELWLEQEVARQGLEGSL

SEQ ID NO: 15381 - protein, 906 aa, Homo sapiens
MPLRLDIKRKLTARSDRVKSVDLHPTEPWMLASLYNGSVCVWNHETQTLVKTFEVCDLPVRAAKFVARKNWVVTGADDMQIRVFNYNTLERVHMFEAHSDYIRCIAVHPTQPFILTSSDDMLIKLWDWDKKWSCSQVFEGHTHYVMQIVINPKDNNQFASASLDRTIKVWQLGSSSPNFTLEGHEKGVNCIDYYSGGDKPYLISGADDRLVKIWDYQNKTCVQTLEGHAQNVSCASFHPELPIIITGSEDGTVRIWHSSTYRLESTLNYGMERVWCVASLRGSNNVALGYDEGSIIVKLGREEPAMSMDANGKIIWAKHSEVQQANLKAMGDAEIKDGERLPLAVKDMGSCEIYPQTIQHNPNGRFVVVCGDGEYIIYTAMALRNKSFGSAQEFAWAHDSSEYAIRESNSIVKIFKNFKEKKSFKPDFGAESIYGGFLLGVRSVNGLAFYDWDNTELIRRIEIQPKHIFWSDSGELVCIATEESFFILKYLSEKVLAAQETHEGVTEDGIEDAFEVLGEIQEIVKTGLWVGDCFIYTSSVNRLNYYVGGEIVTIAHLDRTMYLLGYIPKDNRLYLGDKELNIISYSLLVSVLEYQTAVMRRDFSMADKVLPTIPKEQRTRVAHFLEKQGFKQQALTVSTDPEHRFELALQLGELKIAYQLAVEAESEQKWKQLAELAISKCQFGLAQECLHHAQDYGGLLLLATASGNANMVNKLAEGAERDGKNNVAFMSYFLQGKVDACLELLIRTGRLPEAAFLARTYLPSQVSRVVKLWRENLSKVNQKAAESLADPTEYENLFPGLKEAFVVEEWVKETHADLWPAKQYPLVTPNEERNVMEEGKDFQPSRSTAQQELDGKPASPTPVIVASHTANKEEKSLLELEVDLDNLELEDIDTTDINLDEDILDD

SEQ ID NO: 15382 - protein, 877 aa, Homo sapiens
MLASLYNGSVCVWNHETQTLVKTFEVCDLPVRAAKFVARKNWVVTGADDMQIRVFNYNTLERVHMFEAHSDYIRCIAVHPTQPFILTSSDDMLIKLWDWDKKWSCSQVFEGHTHYVMQIVINPKDNNQFASASLDRTIKVWQLGSSSPNFTLEGHEKGVNCIDYYSGGDKPYLISGADDRLVKIWDYQNKTCVQTLEGHAQNVSCASFHPELPIIITGSEDGTVRIWHSSTYRLESTLNYGMERVWCVASLRGSNNVALGYDEGSIIVKLGREEPAMSMDANGKIIWAKHSEVQQANLKAMGDAEIKDGERLPLAVKDMGSCEIYPQTIQHNPNGRFVVVCGDGEYIIYTAMALRNKSFGSAQEFAWAHDSSEYAIRESNSIVKIFKNFKEKKSFKPDFGAESIYGGFLLGVRSVNGLAFYDWDNTELIRRIEIQPKHIFWSDSGELVCIATEESFFILKYLSEKVLAAQETHEGVTEDGIEDAFEVLGEIQEIVKTGLWVGDCFIYTSSVNRLNYYVGGEIVTIAHLDRTMYLLGYIPKDNRLYLGDKELNIISYSLLVSVLEYQTAVMRRDFSMADKVLPTIPKEQRTRVAHFLEKQGFKQQALTVSTDPEHRFELALQLGELKIAYQLAVEAESEQKWKQLAELAISKCQFGLAQECLHHAQDYGGLLLLATASGNANMVNKLAEGAERDGKNNVAFMSYFLQGKVDACLELLIRTGRLPEAAFLARTYLPSQVSRVVKLWRENLSKVNQKAAESLADPTEYENLFPGLKEAFVVEEWVKETHADLWPAKQYPLVTPNEERNVMEEGKDFQPSRSTAQQELDGKPASPTPVIVASHTANKEEKSLLELEVDLDNLELEDIDTTDINLDEDILDD

SEQ ID NO: 15383 - protein, 476 aa, Homo sapiens
MVGAMWKVIVSLVLLMPGPCDGLFRSLYRSVSMPPKGDSGQPLFLTPYIEAGKIQKGRELSLVGPFPGLNMKSYAGFLTVNKTYNSNLFFWFFPAQIQPEDAPVVLWLQGGPGGSSMFGLFVEHGPYVVTSNMTLRDRDFPWTTTLSMLYIDNPVGTGFSFTDDTHGYAVNEDDVARDLYSALIQFFQIFPEYKNNDFYVTGESYAGKYVPAIAHLIHSLNPVREVKINLNGIAIGDGYSDPESIIGGYAEFLYQIGLLDEKQKKYFQKQCHECIEHIRKQNWFEAFEILDKLLDGDLTSDPSYFQNVTGCSNYYNFLRCTEPEDQLYYVKFLSLPEVRQAIHVGNQTFNDGTIVEKYLREDTVQSVKPWLTEIMNNYKVLIYNGQLDIIVAAALTERSLMGMDWKGSQEYKKAEKKVWKIFKSDSEVAGYIRQAGDFHQVIIRGGGHILPYDQPLRAFDMINRFIYGKGWDPYVG

SEQ ID NO: 15384 - protein, 287 aa, Homo sapiens
MRGRYEASQDLLGTLRKQLSDSESERRALEEQLQRLRDKTDSTMQAHEDAQREVQRLRSAKELLRREKSNLAHSLQVAQQQAKELRQERKKLQAAQEELRRQRYWLGEEQEDAVQDGVRVRRELERSHRQLEQLEGKRSVLAKELVEVREALSRATLQRDMLQAEKAEVAEALTKAEGRGGLPAGLPVQAERPQREPCSGQVGSEPPCHPGHSWRKKSAPCRAGSGRRSRRPQWHGKSRSGWRRCGWNRRWRGRAWRAPYERRSRPRRQWSSSSPRCIMSAAGCRSS

SEQ ID NO: 15385 - protein, 314 aa, Homo sapiens
MSAAEAGGVFHRARGRTLAAFPAEKESEWKGPFYFILGADPQFGLIKAWSTGDCDNGGDEWEQEIRLTEQAVQAINKLNPKPKFFVLCGDLIHAMPGKPWRTEQTEDLKRVLRAVDRAIPLVLVSGNHDIGNTPTAETVEEFCRTWGDDYFSFWVGGVLFLVLNSQFYENPSKCPSLKQAQDQWLDEQLSIARQRHCQHAIVFQHIPLFLESIDEDDDYYFNLSKSTRKKLADKFIHAGVKVVFSGHYHRNAGGTYQNLDMVVSSAIGCQLGRDPHGLRVVVVTAEKIVHRYYSLDELSEKGIEDDLMDLIKKK

SEQ ID NO: 15386 - protein, 172 aa, Homo sapiens
MSAAEAGGVFHRARGRTLAAFPAEKESEWKGPFYFILGADPQFGLIKAWSTGDCDNGGDEWEQEIRLTEQAVQAINKLNPKPKFFVLCGDLIHAMPGVKVVFSGHYHRNAGGTYQNLDMVVSSAIGCQLGRDPHGLRVVVVTAEKIVHRYYSLDELSEKGIEDDLMDLIKKK

SEQ ID NO: 15387 - protein, 122 aa, Homo sapiens
MSAAEAGGVFHRARGRTLAAFPAEKESEWKGPFYFILGADPQFGLIKAWSTGDCDNGGDEWEQEIRLTEQAVQAINKLNPKPKFFVLCGDLIHAMPAGQRPPRAPSRGGHRRENCSPILQSR

SEQ ID NO: 15388 - protein, 503 aa, Homo sapiens
MVLEMLNPIHYNITSIVPEAMPAATMPVLLLTGLFLLVWNYEGTSSIPGPGYCMGIGPLISHGRFLWMGIGSACNYYNRVYGEFMRVWISGEETLIISKSSSMFHIMKHNHYSSRFGSKLGLQCIGMHEKGIIFNNNPELWKTTRPFFMKALSGPGLVRMVTVCAESLKTHLDRLEEVTNESGYVDVLTLLRRVMLDTSNTLFLRIPLDESAIVVKIQGYFDAWQALLIKPDIFFKISWLYKKYEKSVKDLKDAIEVLIAEKRRRISTEEKLEECMDFATELILAEKRGDLTRENVNQCILEMLIAAPDTMSVSLFFMLFLIAKHPNVEEAIIKEIQTVIGERDIKIDDIQKLKVMENFIYESMRYQPVVDLVMRKALEDDVIDGYPVKKGTNIILNIGRMHRLEFFPKPNEFTLENFAKNVPYRYFQPFGFGPRGCAGKYIAMVMMKAILVTLLRRFHVKTLQGQCVESIQKIHDLSLHPDETKNMLEMIFTPRNSDRCLEH

SEQ ID NO: 15389 - protein, 218 aa, Homo sapiens
MVLEMLNPIHYNITSIVPEAMPAATMPVLLLTGLFLLVWNYEGTSSIPGPGYCMGIGPLISHGRFLWMGIGSACNYYNRVYGEFMRVWISGEETLIISKSSSMFHIMKHNHYSSRFGSKLGLQCIGMHEKGIIFNNNPELWKTTRPFFMKALSGPGLVRMVTVCAESLKTHLDRLEEVTNESGYVDVLTLLRRVMLDTSNTLFLRIPLDGTEIFTLTS

SEQ ID NO: 15390 - protein, 446 aa, Homo sapiens
MHEPSLCANVECPPAHTCPCGVPACSCAHVECPPAHTCRCGVPACSHMPMWSARLLTRAHVECPPAHTRVHVECPPAHVPMWSAHLLTCADVECHLLTHVPMWSARLLTCPCGVPACSHVPMRSARLLTRAHAECPPAHTCPCGVPACSHVPMRSARLLTRADVECPPAHTCPCGVPACSHVPTWSARLITRAHVECSPAHTCRCGVPACSHVPMWSVRLLTRADAECPPAHTCRCGVPACSHVPMWSARLLTCRCGVPACSHVPMWSARLLTCRCGVPACSHVPMWSARLLTRAHVECPPAHTCRRGVPACSRAHMECPPAHTCHCGVPACSHTCRCGVPACSHVPMWSARLLTRAHVECPPAHTRAHVECPPAHTCPCGVPACSHTCPCGVPACSHKALAWWFCRFPVLPAESDAVTVHSTHGGFLIRFYVKDPFYISLHLEIT

SEQ ID NO: 15391 - protein, 301 aa, Homo sapiens
MSYPTKEGSDTAGNAHKNSENEPPNDCSTDIESPSADPNMIYQVETNPINREPGTATSQEDVVPQAAENSELETEIQKDQREEDLKEELLLLQTPIPRKLVSHKPLNDRSRSHSGKVEMKANNFPINHKTRFRLSTSWRVPFINSHEIRSMILHLLCDRYFSQAAGCQNTMWVKRKYIACLYHPNSFTHHERAITFRRPSRVHYYRPLTERMTSGKFCKSTDTKGKCRFRAIVRSVLFVSQIQIESIFNIKGFVDILTYIHTMNVMITNTNNGWKYFCPICGRLFNTYSELRQHSCSSSGN

SEQ ID NO: 15392 - protein, 953 aa, Homo sapiens
MTAAENVCYTLINVPMDSEPPSEISLKNDLEKGDVKSKTEALKKVIIMILNGEKLPGLLMTIIRFVLPLQDHTIKKLLLVFWEIVPKTTPDGRLLHEMILVCDAYRKDLQHPNEFIRGSTLRFLCKLKEAELLEPLMPAIRACLEHRHSYVRRNAVLAIYTIYRNFEHLIPDAPELIHDFLVNEKDASCKRNAFMMLIHADQDRALDYLSTCIDQVQTFGDILQLVIVELIYKVCHANPSERARFIRCIYNLLQSSSPAVKYEAAGTLVTLSSAPTAIKAAAQCYIDLIIKESDNNVKLIVLDRLIELKEHPAHERVLQDLVMDILRVLSTPDLEVRKKTLQLALDLVSSRNVEELVIVLKKEVIKTNNVSEHEDTDKYRQLLVRTLHSCSVRFPDMAANVIPVLMEFLSDNNEAAAADVLEFVREAIQRFDNLRMLIVEKMLEVFHAIKSVKIYRGALWILGEYCSTKEDIQSVMTEIRRSLGEIPIVESEIKKEAGELKPEEEITVGPVQKLVTEMGTYATQSALSSSRPTKKEEDRPPLRGFLLDGDFFVAASLATTLTKIALRYVALVQEKKKQNSFVAEAMLLMATILHLGKSSLPKKPITDDDVDRISLCLKVLSECSPLMNDIFNKECRQSLSHMLSAKLEEEKLSQKKESEKRNVTVQPDDPISFMQLTAKNEMNCKEDQFQLSLLAAMGNTQRKEAADPLASKLNKVTQLTGFSDPVYAEAYVHVNQYDIVLDVLVVNQTSDTLQNCTLELATLGDLKLVEKPSPLTLAPHDFANIKANVKVASTENGIIFGNIVYDVSGAASDRNCVVLSDIHIDIMDYIQPATCTDAEFRQMWAEFEWENKVTVNTNMVDLNDYLQHILKSTNMKCLTPEKALSGYCGFMAANLYARSIFGEDALANVSIEKPIHQGPDAAVTGHIRIRAKSQGMALSLGDKINLSQKKTSI

SEQ ID NO: 15393 - protein, 227 aa, Homo sapiens
MAHAAQVGLQDATSPIMEELITFHDHALMIIFLICFLVLYALFLTLTTKLTNTNISDAQEMETVWTILPAIILVLIALPSLRILYMTDEVNDPSLTIKSIGHQWYWTYEYTDYGGLIFNSYMLPPLFLEPGDLRLLDVDNRVVLPIEAPIRMMITSQDVLHSWAVPTLGLKTDAIPGRLNQTTFTATRPGVYYGQCSEICGANHSFMPIVLELIPLKIFEMGPVFTL

SEQ ID NO: 15394 - protein, 3564 aa, Homo sapiens
MTAWRRFQSLLLLLGLLVLCARLLTAAKGQNCGGLVQGPNGTIESPGFPHGYPNYANCTWIIITGERNRIQLSFHTFALEEDFDILSVYDGQPQQGNLKVRLSGFQLPSSIVSTGSILTLWFTTDFAVSAQGFKALYEVLPSHTCGNPGEILKGVLHGTRFNIGDKIRYSCLPGYILEGHAILTCIVSPGNGASWDFPAPFCRAEGACGGTLRGTSSSISSPHFPSEYENNADCTWTILAEPGDTIALVFTDFQLEEGYDFLEISGTEAPSIWLTGMNLPSPVISSKNWLRLHFTSDSNHRRKGFNAQFQVKKAIELKSRGVKMLPSKDGSHKNSVLSQGGVALVSDMCPDPGIPENGRRAGSDFRVGANVQFSCEDNYVLQGSKSITCQRVTETLAAWSDHRPICRARTCGSNLRGPSGVITSPNYPVQYEDNAHCVWVITTTDPDKVIKLAFEEFELERGYDTLTVGDAGKVGDTRSVLYVLTGSSVPDLIVSMSNQMWLHLQSDDSIGSPGFKAVYQEIEKGGCGDPGIPAYGKRTGSSFLHGDTLTFECPAAFELVGERVITCQQNNQWSGNKPSCVFSCFFNFTASSGIILSPNYPEEYGNNMNCVWLIISEPGSRIHLIFNDFDVEPQFDFLAVKDDGISDITVLGTFSGNEVPSQLASSGHIVRLEFQSDHSTTGRGFNITYTTFGQNECHDPGIPINGRRFGDRFLLGSSVSFHCDDGFVKTQGSESITCILQDGNVVWSSTVPRCEAPCGGHLTASSGVILPPGWPGYYKDSLHCEWIIEAKPGHSIKITFDRFQTEVNYDTLEVRDGPASSSPLIGEYHGTQAPQFLISTGNFMYLLFTTDNSRSSIGFLIHYESVTLESDSCLDPGIPVNGHRHGGDFGIRSTVTFSCDPGYTLSDDEPLVCERNHQWNHALPSCDALCGGYIQGKSGTVLSPGFPDFYPNSLNCTWTIEVSHGKGVQMIFHTFHLESSHDYLLITEDGSFSEPVARLTGSVLPHTIKAGLFGNFTAQLRFISDFSISYEGFNITFSEYDLEPCDDPGVPAFSRRIGFHFGVGDSLTFSCFLGYRLEGATKLTCLGGGRRVWSAPLPRCVAECGASVKGNEGTLLSPNFPSNYDNNHECIYKIETEAGKGIHLRTRSFQLFEGDTLKVYDGKDSSSRPLGTFTKNELLGLILNSTSNHLWLEFNTNGSDTDQGFQLTYTSFDLVKCEDPGIPNYGYRIRDEGHFTDTVVLYSCNPGYAMHGSNTLTCLSGDRRVWDKPLPSCIAECGGQIHAATSGRILSPGYPAPYDNNLHCTWIIEADPGKTISLHFIVFDTEMAHDILKVWDGPVDSDILLKEWSGSALPEDIHSTFNSLTLQFDSDFFISKSGFSIQFSTSIAATCNDPGMPQNGTRYGDSREAGDTVTFQCDPGYQLQGQAKITCVQLNNRFFWQPDPPTCIAACGGNLTGPAGVILSPNYPQPYPPGKECDWRVKVNPDFVIALIFKSFNMEPSYDFLHIYEGEDSNSPLIGSYQGSQAPERIESSGNSLFLAFRSDASVGLSGFAIEFKEKPREACFDPGNIMNGTRVGTDFKLGSTITYQCDSGYKILDPSSITCVIGADGKPSWDQVLPSCNAPCGGQYTGSEGVVLSPNYPHNYTAGQICLYSITVPKEFVVFGQFAYFQTALNDLAELFDGTHAQARLLSSLSGSHSGETLPLATSNQILLRFSAKSGASARGFHFVYQAVPRTSDTQCSSVPEPRYGRRIGSEFSAGSIVRFECNPGYLLQGSTALHCQSVPNALAQWNDTIPSCVVPCSGNFTQRRGTILSPGYPEPYGNNLNCIWKIIVTEGSGIQIQVISFATEQNWDSLEIHDGGDVTAPRLGSFSGTTVPALLNSTSNQLYLHFQSDISVAAAGFHLEYKTVGLAACQEPALPSNSIKIGDRYMVNDVLSFQCEPGYTLQGRSHISCMPGTVRRWNYPSPLCIATCGGTLSTLGGVILSPGFPGSYPNNLDCTWRISLPIGYGAHIQFLNFSTEANHDFLEIQNGPYHTSPMIGQFSGTDLPAALLSTTHETLIHFYSDHSQNRQGFKLAYQAYELQNCPDPPPFQNGYMINSDYSVGQSVSFECYPGYILIGHPVLTCQHGINRNWNYPFPRCDAPCGYNVTSQNGTIYSPGFPDEYPILKDCIWLITVPPGHGVYINFTLLQTEAVNDYIAVWDGPDQNSPQLGVFSGNTALETAYSSTNQVLLKFHSDFSNGGFFVLNFHAFQLKKCQPPPAVPQAEMLTEDDDFEIGDFVKYQCHPGYTLVGTDILTCKLSSQLQFEGSLPTCEAQCPANEVRTGSSGVILSPGYPGNYFNSQTCSWSIKVEPNYNITIFVDTFQSEKQFDALEVFDGSSGQSPLLVVLSGNHTEQSNFTSRSNQLYLRWSTDHATSKKGFKIRYAAPYCSLTHPLKNGGILNRTAGAVGSKVHYFCKPGYRMVGHSNATCRRNPLGMYQWDSLTPLCQAVSCGIPESPGNGSFTGNEFTLDSKVVYECHEGFKLESSQQATAVCQEDGLWSNKGKPPTCKPVACPSIEAQLSEHVIWRLVSGSLNEYGAQVLLSCSPGYYLEGWRLLRCQANGTWNIGDERPSCRVISCGSLSFPPNGNKIGTLTVYGATAIFTCNTGYTLVGSHVRECLANGLWSGSETRCLAGHCGSPDPIVNGHISGDGFSYRDTVVYQCNPGFRLVGTSVRICLQDHKWSGQTPVCVPITCGHPGNPAHGFTNGSEFNLNDVVNFTCNTGYLLQGVSRAQCRSNGQWSSPLPTCRVVNCSDPGFVENAIRHGQQNFPESFEYGMSILYHCKKGFYLLGSSALTCMANGLWDRSLPKCLAISCGHPGVPANAVLTGELFTYGAVVHYSCRGSESLIGNDTRVCQEDSHWSGALPHCTGNNPGFCGDPGTPAHGSRLGDDFKTKSLLRFSCEMGHQLRGSPERTCLLNGSWSGLQPVCEAVSCGNPGTPTNGMIVSSDGILFSSSVIYACWEGYKTSGLMTRHCTANGTWTGTAPDCTIISCGDPGTLANGIQFGTDFTFNKTVSYQCNPGYVMEAVTSATIRCTKDGRWNPSKPVCKAVLCPQPPPVQNGTVEGSDFRWGSSISYSCMDGYQLSHSAILSCEGRGVWKGEIPQCLPVFCGDPGIPAEGRLSGKSFTYKSEVFFQCKSPFILVGSSRRVCQADGTWSGIQPTCIDPAHNTCPDPGTPHFGIQNSSRGYEVGSTVFFRCRKGYHIQGSTTRTCLANLTWSGIQTECIPHACRQPETPAHADVRAIDLPTFGYTLVYTCHPGFFLAGGSEHRTCKADMKWTGKSPVCKSKGVREVNETVTKTPVPSDVFFVNSLWKGYYEYLGKRQPATLTVDWFNATSSKVNATFSEASPVELKLTGIYKKEEAHLLLKAFQIKGQADIFVSKFENDNWGLDGYVSSGLERGGFTFQGDIHGKDFGKFKLERQDPLNPDQDSSSHYHGTSSGSVAAAILVPFFALILSGFAFYLYKHRTRPKVQYNGYAGHENSNGQASFENPMYDTNLKPTEAKAVRFDTTLNTVCTVV

SEQ ID NO: 15395 - protein, 3387 aa, Homo sapiens
MTAWRRFQSLLLLLGLLVLCARLLTAAKGQNCGGLVQGPNGTIESPGFPHGYPNYANCTWIIITGERNRIQLSFHTFALEEDFDILSVYDGQPQQGNLKVRLSGFQLPSSIVSTGSILTLWFTTDFAVSAQGFKALYEVLPSHTCGNPGEILKGVLHGTRFNIGDKIRYSCLPGYILEGHAILTCIVSPGNGASWDFPAPFCRAEGACGGTLRGTSSSISSPHFPSEYENNADCTWTILAEPGDTIALVFTDFQLEEGYDFLEISGTEAPSIWLTGMNLPSPVISSKNWLRLHFTSDSNHRRKGFNAQFQVKKAIELKSRGVKMLPSKDGSHKNSVLSQGGVALVSDMCPDPGIPENGRRAGSDFRVGANVQFSCEDNYVLQGSKSITCQRVTETLAAWSDHRPICRARTCGSNLRGPSGVITSPNYPVQYEDNAHCVWVITTTDPDKVIKLAFEEFELERGYDTLTVGDAGKVGDTRSVLYVLTGSSVPDLIVSMSNQMWLHLQSDDSIGSPGFKAVYQEIEKGGCGDPGIPAYGKRTGSSFLHGDTLTFECPAAFELVGERVITCQQNNQWSGNKPSCVFSCFFNFTASSGIILSPNYPEEYGNNMNCVWLIISEPGSRIHLIFNDFDVEPQFDFLAVKDDGISDITVLGTFSGNEVPSQLASSGHIVRLEFQSDHSTTGRGFNITYTTFGQNECHDPGIPINGRRFGDRFLLGSSVSFHCDDGFVKTQGSESITCILQDGNVVWSSTVPRCEAPCGGHLTASSGVILPPGWPGYYKDSLHCEWIIEAKPGHSIKITFDRFQTEVNYDTLEVRDGPASSSPLIGEYHGTQAPQFLISTGNFMYLLFTTDNSRSSIGFLIHYESVTLESDSCLDPGIPVNGHRHGGDFGIRSTVTFSCDPGYTLSDDEPLVCERNHQWNHALPSCDALCGGYIQGKSGTVLSPGFPDFYPNSLNCTWTIEVSHGKGVQMIFHTFHLESSHDYLLITEDGSFSEPVARLTGSVLPHTIKAGLFGNFTAQLRFISDFSISYEGFNITFSEYDLEPCDDPGVPAFSRRIGFHFGVGDSLTFSCFLGYRLEGATKLTCLGGGRRVWSAPLPRCVAECGASVKGNEGTLLSPNFPSNYDNNHECIYKIETEAGKGIHLRTRSFQLFEGDTLKVYDGKDSSSRPLGTFTKNELLGLILNSTSNHLWLEFNTNGSDTDQGFQLTYTSFDLVKCEDPGIPNYGYRIRDEGHFTDTVVLYSCNPGYAMHGSNTLTCLSGDRRVWDKPLPSCIAECGGQIHAATSGRILSPGYPAPYDNNLHCTWIIEADPGKTISLHFIVFDTEMAHDILKVWDGPVDSDILLKEWSGSALPEDIHSTFNSLTLQFDSDFFISKSGFSIQFSTSIAATCNDPGMPQNGTRYGDSREAGDTVTFQCDPGYQLQGQAKITCVQLNNRFFWQPDPPTCIAACGGNLTGPAGVILSPNYPQPYPPGKECDWRVKVNPDFVIALIFKSFNMEPSYDFLHIYEGEDSNSPLIGSYQGSQAPERIESSGNSLFLAFRSDASVGLSGFAIEFKEKPREACFDPGNIMNGTRVGTDFKLGSTITYQCDSGYKILDPSSITCVIGADGKPSWDQVLPSCNAPCGGQYTGSEGVVLSPNYPHNYTAGQICLYSITVPKEFVVFGQFAYFQTALNDLAELFDGTHAQARLLSSLSGSHSGETLPLATSNQILLRFSAKSGASARGFHFVYQAVPRTSDTQCSSVPEPRYGRRIGSEFSAGSIVRFECNPGYLLQGSTALHCQSVPNALAQWNDTIPSCVVPCSGNFTQRRGTILSPGYPEPYGNNLNCIWKIIVTEGSGIQIQVISFATEQNWDSLEIHDGGDVTAPRLGSFSGTTVPALLNSTSNQLYLHFQSDISVAAAGFHLEYKTVGLAACQEPALPSNSIKIGDRYMVNDVLSFQCEPGYTLQGRSHISCMPGTVRRWNYPSPLCIATCGGTLSTLGGVILSPGFPGSYPNNLDCTWRISLPIGYGAHIQFLNFSTEANHDFLEIQNGPYHTSPMIGQFSGTDLPAALLSTTHETLIHFYSDHSQNRQGFKLAYQAYELQNCPDPPPFQNGYMINSDYSVGQSVSFECYPGYILIGHPVLTCQHGINRNWNYPFPRCDAPCGYNVTSQNGTIYSPGFPDEYPILKDCIWLITVPPGHGVYINFTLLQTEAVNDYIAVWDGPDQNSPQLGVFSGNTALETAYSSTNQVLLKFHSDFSNGGFFVLNFHAFQLKKCQPPPAVPQAEMLTEDDDFEIGDFVKYQCHPGYTLVGTDILTCKLSSQLQFEGSLPTCEAQCPANEVRTGSSGVILSPGYPGNYFNSQTCSWSIKVEPNYNITIFVDTFQSEKQFDALEVFDGSSGQSPLLVVLSGNHTEQSNFTSRSNQLYLRWSTDHATSKKGFKIRYAAPYCSLTHPLKNGGILNRTAGAVGSKVHYFCKPGYRMVGHSNATCRRNPLGMYQWDSLTPLCQAVSCGIPESPGNGSFTGNEFTLDSKVVYECHEGFKLESSQQATAVCQEDGLWSNKGKPPTCKPVACPSIEAQLSEHVIWRLVSGSLNEYGAQVLLSCSPGYYLEGWRLLRCQANGTWNIGDERPSCRAGHCGSPDPIVNGHISGDGFSYRDTVVYQCNPGFRLVGTSVRICLQDHKWSGQTPVCVPITCGHPGNPAHGFTNGSEFNLNDVVNFTCNTGYLLQGVSRAQCRSNGQWSSPLPTCRVVNCSDPGFVENAIRHGQQNFPESFEYGMSILYHCKKGFYLLGSSALTCMANGLWDRSLPKCLAISCGHPGVPANAVLTGELFTYGAVVHYSCRGSESLIGNDTRVCQEDSHWSGALPHCTGNNPGFCGDPGTPAHGSRLGDDFKTKSLLRFSCEMGHQLRGSPERTCLLNGSWSGLQPVCEAVLCPQPPPVQNGTVEGSDFRWGSSISYSCMDGYQLSHSAILSCEGRGVWKGEIPQCLPVFCGDPGIPAEGRLSGKSFTYKSEVFFQCKSPFILVGSSRRVCQADGTWSGIQPTCIDPAHNTCPDPGTPHFGIQNSSRGYEVGSTVFFRCRKGYHIQGSTTRTCLANLTWSGIQTECIPHACRQPETPAHADVRAIDLPTFGYTLVYTCHPGFFLAGGSEHRTCKADMKWTGKSPVCKSKGVREVNETVTKTPVPSDVFFVNSLWKGYYEYLGKRQPATLTVDWFNATSSKVNATFSEASPVELKLTGIYKKEEAHLLLKAFQIKGQADIFVSKFENDNWGLDGYVSSGLERGGFTFQGDIHGKDFGKFKLERQDPLNPDQDSSSHYHGTSSGSVAAAILVPFFALILSGFAFYLYKHRTRPKVQYNGYAGHENSNGQASFENPMYDTNLKPTEAKAVRFDTTLNTVCTVV

SEQ ID NO: 15396 - protein, 2109 aa, Homo sapiens
MTAWRRFQSLLLLLGLLVLCARLLTAAKGQNCGGLVQGPNGTIESPGFPHGYPNYANCTWIIITGERNRIQLSFHTFALEEDFDILSVYDGQPQQGNLKVRLSGFQLPSSIVSTGSILTLWFTTDFAVSAQGFKALYEVLPSHTCGNPGEILKGVLHGTRFNIGDKIRYSCLPGYILEGHAILTCIVSPGNGASWDFPAPFCRAEGACGGTLRGTSSSISSPHFPSEYENNADCTWTILAEPGDTIALVFTDFQLEEGYDFLEISGTEAPSIWLTGMNLPSPVISSKNWLRLHFTSDSNHRRKGFNAQFQVKKAIELKSRGVKMLPSKDGSHKNSVLSQGGVALVSDMCPDPGIPENGRRAGSDFRVGANVQFSCEDNYVLQGSKSITCQRVTETLAAWSDHRPICRARTCGSNLRGPSGVITSPNYPVQYEDNAHCVWVITTTDPDKVIKLAFEEFELERGYDTLTVGDAGKVGDTRSVLYVLTGSSVPDLIVSMSNQMWLHLQSDDSIGSPGFKAVYQEIEKGGCGDPGIPAYGKRTGSSFLHGDTLTFECPAAFELVGERVITCQQNNQWSGNKPSCVFSCFFNFTASSGIILSPNYPEEYGNNMNCVWLIISEPGSRIHLIFNDFDVEPQFDFLAVKDDGISDITVLGTFSGNEVPSQLASSGHIVRLEFQSDHSTTGRGFNITYTTFGQNECHDPGIPINGRRFGDRFLLGSSVSFHCDDGFVKTQGSESITCILQDGNVVWSSTVPRCEAPCGGHLTASSGVILPPGWPGYYKDSLHCEWIIEAKPGHSIKITFDRFQTEVNYDTLEVRDGPASSSPLIGEYHGTQAPQFLISTGNFMYLLFTTDNSRSSIGFLIHYESVTLESDSCLDPGIPVNGHRHGGDFGIRSTVTFSCDPGYTLSDDEPLVCERNHQWNHALPSCDALCGGYIQGKSGTVLSPGFPDFYPNSLNCTWTIEVSHGKGVQMIFHTFHLESSHDYLLITEDGSFSEPVARLTGSVLPHTIKAGLFGNFTAQLRFISDFSISYEGFNITFSEYDLEPCDDPGVPAFSRRIGFHFGVGDSLTFSCFLGYRLEGATKLTCLGGGRRVWSAPLPRCVAECGASVKGNEGTLLSPNFPSNYDNNHECIYKIETEAGKGIHLRTRSFQLFEGDTLKVYDGKDSSSRPLGTFTKNELLGLILNSTSNHLWLEFNTNGSDTDQGFQLTYTSFDLVKCEDPGIPNYGYRIRDEGHFTDTVVLYSCNPGYAMHGSNTLTCLSGDRRVWDKPLPSCIAECGGQIHAATSGRILSPGYPAPYDNNLHCTWIIEADPGKTISLHFIVFDTEMAHDILKVWDGPVDSDILLKEWSGSALPEDIHSTFNSLTLQFDSDFFISKSGFSIQFSTSIAATCNDPGMPQNGTRYGDSREAGDTVTFQCDPGYQLQGQAKITCVQLNNRFFWQPDPPTCIAACGGNLTGPAGVILSPNYPQPYPPGKECDWRVKVNPDFVIALIFKSFNMEPSYDFLHIYEGEDSNSPLIGSYQGSQAPERIESSGNSLFLAFRSDASVGLSGFAIEFKEKPREACFDPGNIMNGTRVGTDFKLGSTITYQCDSGYKILDPSSITCVIGADGKPSWDQVLPSCNAPCGGQYTGSEGVVLSPNYPHNYTAGQICLYSITVPKEFVVFGQFAYFQTALNDLAELFDGTHAQARLLSSLSGSHSGETLPLATSNQILLRFSAKSGASARGFHFVYQAVPRTSDTQCSSVPEPRYGRRIGSEFSAGSIVRFECNPGYLLQGSTALHCQSVPNALAQWNDTIPSCVVPCSGNFTQRRGTILSPGYPEPYGNNLNCIWKIIVTEGSGIQIQVISFATEQNWDSLEIHDGGDVTAPRLGSFSGTTVPALLNSTSNQLYLHFQSDISVAAAGFHLEYKTVGLAACQEPALPSNSIKIGDRYMVNDVLSFQCEPGYTLQGRSHISCMPGTVRRWNYPSPLCIATCGGTLSTLGGVILSPGFPGSYPNNLDCTWRISLPIGYGAHIQFLNFSTEANHDFLEIQNGPYHTSPMIGQFSGTDLPAALLSTTHETLIHFYSDHSQNRQGFKLAYQGGSGNIGPAFPCLDTPFQARCQGEERTFN

SEQ ID NO: 15397 - protein, 2012 aa, Homo sapiens
MTAWRRFQSLLLLLGLLVLCARLLTAAKGQNCGGLVQGPNGTIESPGFPHGYPNYANCTWIIITGERNRIQLSFHTFALEEDFDILSVYDGQPQQGNLKVRLSGFQLPSSIVSTGSILTLWFTTDFAVSAQGFKALYEVLPSHTCGNPGEILKGVLHGTRFNIGDKIRYSCLPGYILEGHAILTCIVSPGNGASWDFPAPFCRAEGACGGTLRGTSSSISSPHFPSEYENNADCTWTILAEPGDTIALVFTDFQLEEGYDFLEISGTEAPSIWLTGMNLPSPVISSKNWLRLHFTSDSNHRRKGFNAQFQVKKAIELKSRGVKMLPSKDGSHKNSVLSQGGVALVSDMCPDPGIPENGRRAGSDFRVGANVQFSCEDNYVLQGSKSITCQRVTETLAAWSDHRPICRARTCGSNLRGPSGVITSPNYPVQYEDNAHCVWVITTTDPDKVIKLAFEEFELERGYDTLTVGDAGKVGDTRSVLYVLTGSSVPDLIVSMSNQMWLHLQSDDSIGSPGFKAVYQEIEKGGCGDPGIPAYGKRTGSSFLHGDTLTFECPAAFELVGERVITCQQNNQWSGNKPSCVFSCFFNFTASSGIILSPNYPEEYGNNMNCVWLIISEPGSRIHLIFNDFDVEPQFDFLAVKDDGISDITVLGTFSGNEVPSQLASSGHIVRLEFQSDHSTTGRGFNITYTTFGQNECHDPGIPINGRRFGDRFLLGSSVSFHCDDGFVKTQGSESITCILQDGNVVWSSTVPRCEAPCGGHLTASSGVILPPGWPGYYKDSLHCEWIIEAKPGHSIKITFDRFQTEVNYDTLEVRDGPASSSPLIGEYHGTQAPQFLISTGNFMYLLFTTDNSRSSIGFLIHYESVTLESDSCLDPGIPVNGHRHGGDFGIRSTVTFSCDPGYTLSDDEPLVCERNHQWNHALPSCDALCGGYIQGKSGTVLSPGFPDFYPNSLNCTWTIEVSHGKGVQMIFHTFHLESSHDYLLITEDGSFSEPVARLTGSVLPHTIKAGLFGNFTAQLRFISDFSISYEGFNITFSEYDLEPCDDPGVPAFSRRIGFHFGVGDSLTFSCFLGYRLEGATKLTCLGGGRRVWSAPLPRCVAECGASVKGNEGTLLSPNFPSNYDNNHECIYKIETEAGKGIHLRTRSFQLFEGDTLKVYDGKDSSSRPLGTFTKNELLGLILNSTSNHLWLEFNTNGSDTDQGFQLTYTSFDLVKCEDPGIPNYGYRIRDEGHFTDTVVLYSCNPGYAMHGSNTLTCLSGDRRVWDKPLPSCIAECGGQIHAATSGRILSPGYPAPYDNNLHCTWIIEADPGKTISLHFIVFDTEMAHDILKVWDGPVDSDILLKEWSGSALPEDIHSTFNSLTLQFDSDFFISKSGFSIQFSTSIAATCNDPGMPQNGTRYGDSREAGDTVTFQCDPGYQLQGQAKITCVQLNNRFFWQPDPPTCIAACGGNLTGPAGVILSPNYPQPYPPGKECDWRVKVNPDFVIALIFKSFNMEPSYDFLHIYEGEDSNSPLIGSYQGSQAPERIESSGNSLFLAFRSDASVGLSGFAIEFKEKPREACFDPGNIMNGTRVGTDFKLGSTITYQCDSGYKILDPSSITCVIGADGKPSWDQVLPSCNAPCGGQYTGSEGVVLSPNYPHNYTAGQICLYSITVPKEFVVFGQFAYFQTALNDLAELFDGTHAQARLLSSLSGSHSGETLPLATSNQILLRFSAKSGASARGFHFVYQAVPRTSDTQCSSVPEPRYGRRIGSEFSAGSIVRFECNPGYLLQGSTALHCQSVPNALAQWNDTIPSCVVPCSGNFTQRRGTILSPGYPEPYGNNLNCIWKIIVTEGSGIQIQVISFATEQNWDSLEIHDGGDVTAPRLGSFSGTTVPALLNSTSNQLYLHFQSDISVAAAGFHLEYKTVGLAACQEPALPSNSIKIGDRYMVNDVLSFQCEPGYTLQGRSHISCMPGTVRRWNYPSPLCIATCGGTLSTLGGVILSPGFPGSYPNNLDCTWRISLPIGYGK

SEQ ID NO: 15398 - protein, 525 aa, Homo sapiens
MSWHPQYRSSKFRHVFGKPASKENCYDSVPITRSVHDNHFCAVNPHFIAVVTECAGGGAFLVIPLHQTGKLDPHYPKVCGHRGNVLDVKWNPFDDFEIASCSEDATIKIWSIPKQLLTRNLTAYRKELVGHARRVGLVEWHPTAANILFSAGYDYKVMIWNLDTKESVITSPMSTISCHQDVILSMSFNTNGSLLATTCKDRKIRVIDPRAGTVLQEASYKGHRASKVLFLGNLKKLMSTGTSRWNNRQVALWDQDNLSVPLMEEDLDGSSGVLFPFYDADTSMLYVVGKGDGNIRYYEVSADKPHLSYLTEYRSYNPQKGIGVMPKRGLDVSSCEIFRFYKLITTKSLIEPISMIVPRRSESYQEDIYPPTAGAQPSLTAQEWLSGMNRDPILVSLRPGSELLRPHPLPAERPIFNSMAPASPRLLNQTEKLAAEDGWRSSSLLEEKMPRWAAEHRLEEKKTWLTNGFDVFECPPPKTENELLQMFYRQQEEIRRLRELLTQREVQAKQLELEIKNLRMGSEQL

SEQ ID NO: 15399 - protein, 480 aa, Homo sapiens
MTVTKMSWRPQYRSSKFRNVYGKVANREHCFDGIPITKNVHDNHFCAVNTRFLAIVTESAGGGSFLVIPLEQTGRIEPNYPKVCGHQGNVLDIKWNPFIDNIIASCSEDTSVRIWEIPEGGLKRNMTEALLELHGHSRRVGLVEWHPTTNNILFSAGYDYKVLIWNLDVGEPVKMIDCHTDVILCMSFNTDGSLLTTTCKDKKLRVIEPRSGRVLQEANCKNHRVNRVVFLGNMKRLLTTGVSRWNTRQIALWDQEDLSMPLIEEEIDGLSGLLFPFYDADTHMLYLAGKGDGNIRYYEISTEKPYLSYLMEFRSPAPQKGLGVMPKHGLDVSACEVFRFYKLVTLKGLIEPISMIVPRRSDSYQEDIYPMTPGTEPALTPDEWLGGINRDPVLMSLKEGYKKSSKMVFKAPIKEKKSVVVNGIDLLENVPPRTENELLRMFFRQQDEIRRLKEELAQKDIRIRQLQLELKNLRNSPKNC

SEQ ID NO: 15400 - protein, 475 aa, Homo sapiens
MSWRPQYRSSKFRNVYGKVANREHCFDGIPITKNVHDNHFCAVNTRFLAIVTESAGGGSFLVIPLEQTGRIEPNYPKVCGHQGNVLDIKWNPFIDNIIASCSEDTSVRIWEIPEGGLKRNMTEALLELHGHSRRVGLVEWHPTTNNILFSAGYDYKVLIWNLDVGEPVKMIDCHTDVILCMSFNTDGSLLTTTCKDKKLRVIEPRSGRVLQEANCKNHRVNRVVFLGNMKRLLTTGVSRWNTRQIALWDQEDLSMPLIEEEIDGLSGLLFPFYDADTHMLYLAGKGDGNIRYYEISTEKPYLSYLMEFRSPAPQKGLGVMPKHGLDVSACEVFRFYKLVTLKGLIEPISMIVPRRSDSYQEDIYPMTPGTEPALTPDEWLGGINRDPVLMSLKEGYKKSSKMVFKAPIKEKKSVVVNGIDLLENVPPRTENELLRMFFRQQDEIRRLKEELAQKDIRIRQLQLELKNLRNSPKNC

SEQ ID NO: 15401 - protein, 734 aa, Homo sapiens
MWGLLLALAAFAPAVGPALGAPRNSVLGLAQPGTTKVPGSTPALHSSPAQPPAETANGTSEQHVRIRVIKKKKVIMKKRKKLTLTRPTPLVTAGPLVTPTPAGTLDPAEKQETGCPPLGLESLRVSDSRLEASSSQSFGLGPHRGRLNIQSGLEDGDLYDGAWCAEEQDADPWFQVDAGHPTRFSGVITQGRNSVWRYDWVTSYKVQFSNDSRTWWGSRNHSSGMDAVFPANSDPETPVLNLLPEPQVARFIRLLPQTWLQGGAPCLRAEILACPVSDPNDLFLEAPASGSSDPLDFQHHNYKAMRKLMKQVQEQCPNITRIYSIGKSYQGLKLYVMEMSDKPGEHELGEPEVRYVAGMHGNEALGRELLLLLMQFLCHEFLRGNPRVTRLLSEMRIHLLPSMNPDGYEIAYHRGSELVGWAEGRWNNQSIDLNHNFADLNTPLWEAQDDGKVPHIVPNHHLPLPTYYTLPNATVAPETRAVIKWMKRIPFVLSANLHGGELVVSYPFDMTRTPWAARELTPTPDDAVFRWLSTVYAGSNLAMQDTSRRPCHSQDFSVHGNIINGADWHTVPGSMNDFSYLHTNCFEVTVELSCDKFPHENELPQEWENNKDALLTYLEQVRMGIAGVVRDKDTELGIADAVIAVDGINHDVTTAWGGDYWRLLTPGDYMVTASAEGYHSVTRNCRVTFEEGPFPCNFVLTKTPKQRLRELLAAGAKVPPDLRRRLERLRGQKD

SEQ ID NO: 15402 - protein, 3487 aa, Homo sapiens
MRLISIAPGPRWQVQSHHPRSAGQNCTFQLHGPNGTVESPGFPYGYPNYANCTWTITAEEQHRIQLVFQSFALEEDFDVLSVFDGPPQPENLRTRLTGFQLPATIVSAATTLSLRLISDYAVSAQGFHATYEVLPSHTCGNPGRLPNGIQQGSTFNLGDKVRYSCNLGFFLEGHAVLTCHAGSENSATWDFPLPSCRADDACGGTLRGQSGIISSPHFPSEYHNNADCTWTILAELGDTIALVFIDFQLEDGYDFLEVTGTEGSSLWFTGASLPAPVISSKNWLRLHFTSDGNHRQRGFSAQYQVKKQIELKSRGVKLMPSKDNSQKTSVLTQVGVSQGHNMCPDPGIPERGKRLGSDFRLGSSVQFTCNEGYDLQGSKRITCMKVSDMFAAWSDHRPVCRARMCDAHLRGPSGIITSPNFPIQYDNNAHCVWIITALNPSKVIKLAFEEFDLERGYDTLTVGDGGQDGDQKTVLYILTGTSVPDLIVSTNHQMWLLFQTDGSGSSLGFKASYEEIEQGSCGDPGIPAYGRREGSRFHHGDTLKFECQPAFELVGQKAITCQKNNQWSAKKPGCVFSCFFNFTSPSGVVLSPNYPEDYGNHLHCVWLILARPESRIHLAFNDIDVEPQFDFLVIKDGATAEAPVLGTFSGNQLPSSITSSGHVARLEFQTDHSTGKRGFNITFTTFRHNECPDPGVPVNGKRFGDSLQLGSSISFLCDEGFLGTQGSETITCVLKEGSVVWNSAVLRCEAPCGGHLTSPSGTILSPGWPGFYKDALSCAWVIEAQPGYPIKITFDRFKTEVNYDTLEVRDGRTYSAPLIGVYHGTQVPQFLISTSNYLYLLFSTDKSHSDIGFQLRYETITLQSDHCLDPGIPVNGQRHGNDFYVGALVTFSCDSGYTLSDGEPLECEPNFQWSRALPSCEALCGGFIQGSSGTILSPGFPDFYPNNLNCTWIIETSHGKGVFFTFHTFHLESGHDYLLITENGSFTQPLRQLTGSRLPAPISAGLYGNFTAQVRFISDFSMSYEGFNITFSEYDLEPCEEPEVPAYSIRKGLQFGVGDTLTFSCFPGYRLEGTARITCLGGRRRLWSSPLPRCVAECGNSVTGTQGTLLSPNFPVNYNNNHECIYSIQTQPGKGIQLKARAFELSEGDVLKVYDGNNNSARLLGVFSHSEMMGVTLNSTSSSLWLDFITDAENTSKGFELHFSSFELIKCEDPGTPKFGYKVHDEGHFAGSSVSFSCDPGYSLRGSEELLCLSGERRTWDRPLPTCVAECGGTVRGEVSGQVLSPGYPAPYEHNLNCIWTIEAEAGCTIGLHFLVFDTEEVHDVLRIWDGPVESGVLLKELSGPALPKDLHSTFNSVVLQFSTDFFTSKQGFAIQFSVSTATSCNDPGIPQNGSRSGDSWEAGDSTVFQCDPGYALQGSAEISCVKIENRFFWQPSPPTCIAPCGGDLTGPSGVILSPNYPEPYPPGKECDWKVTVSPDYVIALVFNIFNLEPGYDFLHIYDGRDSLSPLIGSFYGSQLPGRIESSSNSLFLAFRSDASVSNAGFVIDYTENPRESCFDPGSIKNGTRVGSDLKLGSSVTYYCHGGYEVEGTSTLSCILGPDGKPVWNNPRPVCTAPCGGQYVGSDGVVLSPNYPQNYTSGQICLYFVTVPKDYVVFGQFAFFHTALNDVVEVHDGHSQHSRLLSSLSGSHTGESLPLATSNQVLIKFSAKGLAPARGFHFVYQAVPRTSATQCSSVPEPRYGKRLGSDFSVGAIVRFECNSGYALQGSPEIECLPVPGALAQWNVSAPTCVVPCGGNLTERRGTILSPGFPEPYLNSLNCVWKIVVPEGAGIQIQVVSFVTEQNWDSLEVFDGADNTVTMLGSFSGTTVPALLNSTSNQLYLHFYSDISVSAAGFHLEYKTVGLSSCPEPAVPSNGVKTGERYLVNDVVSFQCEPGYALQGHAHISCMPGTVRRWNYPPPLCIAQCGGTVEEMEGVILSPGFPGNYPSNMDCSWKIALPVGFGAHIQFLNFSTEPNHDYIEIRNGPYETSRMMGRFSGSELPSSLLSTSHETTVYFHSDHSQNRPGFKLEYQDLTYSHQISSFLRGFDLSELERTNSTPPVAASYVWDLDPGCEAYELQECPDPEPFANGIVRGAGYNVGQSVTFECLPGYQLTGHPVLTCQHGTNRNWDHPLPKCEVPCGGNITSSNGTVYSPGFPSPYSSSQDCVWLITVPIGHGVRLNLSLLQTEPSGDFITIWDGPQQTAPRLGVFTRSMAKKTVQSSSNQVLLKFHRDAATGGIFAIAFSAYPLTKCPPPTILPNAEVVTENEEFNIGDIVRYRCLPGFTLVGNEILTCKLGTYLQFEGPPPICEVHCPTNELLTDSTGVILSQSYPGSYPQFQTCSWLVRVEPDYNISLTVEYFLSEKQYDEFEIFDGPSGQSPLLKALSGNYSAPLIVTSSSNSVYLRWSSDHAYNRKGFKIRYSAPYCSLPRAPLHGFILGQTSTQPGGSIHFGCNAGYRLVGHSMAICTRHPQGYHLWSEAIPLCQALSCGLPEAPKNGMVFGKEYTVGTKAMYSCSEGYHLQAGAEATAECLDTGLWSNRNVPPQCVPVTCPDVSSISVEHGRWRLIFETQYQFQAQLMLICDPGYYYTGQRVIRCQANGKWSLGDSTPTCRIISCGELPIPPNGHRIGTLSVYGATAIFSCNSGYTLVGSRVRECMANGLWSGSEVRCLAGHCGTPEPIVNGHINGENYSYRGSVVYQCNAGFRLIGMSVRICQQDHHWSGKTPFCVLVSCGHPGSPPHSQMSGDSYTVGAVVRYSCIGKRTLVGNSTRMCGLDGHWTGSLPHCSGTSVGVCGDPGIPAHGIRLGDSFDPGTVMRFSCEAGHVLRGSSERTCQANGSWSGSQPECGVISCGNPGTPSNARVVFSDGLVFSSSIVYECREGYYATGLLSRHCSVNGTWTGSDPECLVINCGDPGIPANGLRLGNDFRYNKTVTYQCVPGYMMESHRVSVLSCTKDRTWNGTKPVCKALMCKPPPLIPNGKVVGSDFMWGSSVTYACLEGYQLSLPAVFTCEGNGSWTGELPQCFPVFCGDPGVPSRGRREDRGFSYRSSVSFSCHPPLVLVGSPRRFCQSDGTWSGTQPSCIDPTLTTCADPGVPQFGIQNNSQGYQVGSTVLFRCQKGYLLQGSTTRTCLPNLTWSGTPPDCVPHHCRQPETPTHANVGALDLPSMGYTLIYSCQEGFSLKGGSEHRTCKADGSWTGKPPICLEVRPSGRPINTAREPPLTQALIPGDVFAKNSLWKGAYEYQGKKQPAMLRVTGFQVANSKVNATMIDHSGVELHLAGTYKKEDFHLLLQVYQITGPVEIFMNKFKDDHWALDGHVSSESSGATFIYQGSVKGQGFGQFGFQRLDLRLLESDPESIGRHFASNSSSVAAAILVPFIALIIAGFVLYLYKHRRRPKVPFNGYAGHENTNVRATFENPMYDRNIQPTDIMASEAEFTVSTVCTAV

SEQ ID NO: 15403 - protein, 1167 aa, Homo sapiens
MVIVILFPAECGNSVTGTQGTLLSPNFPVNYNNNHECIYSIQTQPGKGIQLKARAFELSEGDVLKVYDGNNNSARLLGVFSHSEMMGVTLNSTSSSLWLDFITDAENTSKGFELHFSSFELIKCEDPGTPKFGYKVHDEGHFAGSSVSFSCDPGYSLRGSEELLCLSGERRTWDRPLPTCVAECGGTVRGEVSGQVLSPGYPAPYEHNLNCIWTIEAEAGCTIGLHFLVFDTEEVHDVLRIWDGPVESGVLLKELSGPALPKDLHSTFNSVVLQFSTDFFTSKQGFAIQFSVSTATSCNDPGIPQNGSRSGDSWEAGDSTVFQCDPGYALQGSAEISCVKIENRFFWQPSPPTCIAPCGGDLTGPSGVILSPNYPEPYPPGKECDWKVTVSPDYVIALVFNIFNLEPGYDFLHIYDGRDSLSPLIGSFYGSQLPGRIESSSNSLFLAFRSDASVSNAGFVIDYTENPRESCFDPGSIKNGTRVGSDLKLGSSVTYYCHGGYEVEGTSTLSCILGPDGKPVWNNPRPVCTAPCGGQYVGSDGVVLSPNYPQNYTSGQICLYFVTVPKDYVVFGQFAFFHTALNDVVEVHDGHSQHSRLLSSLSGSHTGESLPLATSNQVLIKFSAKGLAPARGFHFVYQAVPRTSATQCSSVPEPRYGKRLGSDFSVGAIVRFECNSGYALQGSPEIECLPVPGALAQWNVSAPTCVVPCGGNLTERRGTILSPGFPEPYLNSLNCVWKIVVPEGAGIQIQVVSFVTEQNWDSLEVFDGADNTVTMLGSFSGTTVPALLNSTSNQLYLHFYSDISVSAAGFHLEYKTVGLSSCPEPAVPSNGVKTGERYLVNDVVSFQCEPGYALQGHAHISCMPGTVRRWNYPPPLCIAQCGGTVEEMEGVILSPGFPGNYPSNMDCSWKIALPVGFGAHIQFLNFSTEPNHDYIEIRNGPYETSRMMGRFSGSELPSSLLSTSHETTVYFHSDHSQNRPGFKLEYQAYELQECPDPEPFANGIVRGAGYNVGQSVTFECLPGYQLTGHPVLTCQHGTNRNWDHPLPKCEVPCGGNITSSNGTVYSPGFPSPYSSSQDCVWLITVPIGHGVRLNLSLLQTEPSGDFITIWDGPQQTAPRLGVFTRSMAKKTVQSSSNQVLLKFHRDAATGGIFAIAFSGHLAAVCTL

SEQ ID NO: 15404 - protein, 225 aa, Homo sapiens
MCDAHLRGPSGIITSPNFPIQYDNNAHCVWIITALNPSKVGGDPGNIQCNKEGLSVETQSLRLRNRSCLLGNSKDNGCCVPNPVHGTGLQVIKLAFEEFDLERGYDTLTVGDGGQDGDQKTVLYILTGTSVPDLIVSTNHQMWLLFQTDGSGSSLGFKASYEEIEQGSCGDPGIPAYGRREGSRFHHGDTLKFECQPAFELVGQKAITCQKNNQWSAKKPGCVCK

SEQ ID NO: 15405 - protein, 3631 aa, Homo sapiens
MPRSRGRELGRCGCPAGRARGETGISALVPGAGSRWGRPPPPTPPPLLLLLGCGLLSVSAAAGQNCTFQLHGPNGTVESPGFPYGYPNYANCTWTITAEEQHRIQLVFQSFALEEDFDVLSVFDGPPQPENLRTRLTGFQLPATIVSAATTLSLRLISDYAVSAQGFHATYEVLPSHTCGNPGRLPNGIQQGSTFNLGDKVRYSCNLGFFLEGHAVLTCHAGSENSATWDFPLPSCRADDACGGTLRGQSGIISSPHFPSEYHNNADCTWTILAELGDTIALVFIDFQLEDGYDFLEVTGTEGSSLWFTGASLPAPVISSKNWLRLHFTSDGNHRQRGFSAQYQVKKQIELKSRGVKLMPSKDNSQKTSVLTQVGVSQGHNMCPDPGIPERGKRLGSDFRLGSSVQFTCNEGYDLQGSKRITCMKVSDMFAAWSDHRPVCRARMCDAHLRGPSGIITSPNFPIQYDNNAHCVWIITALNPSKVIKLAFEEFDLERGYDTLTVGDGGQDGDQKTVLYILTGTSVPDLIVSTNHQMWLLFQTDGSGSSLGFKASYEEIEQGSCGDPGIPAYGRREGSRFHHGDTLKFECQPAFELVGQKAITCQKNNQWSAKKPGCVFSCFFNFTSPSGVVLSPNYPEDYGNHLHCVWLILARPESRIHLAFNDIDVEPQFDFLVIKDGATAEAPVLGTFSGNQLPSSITSSGHVARLEFQTDHSTGKRGFNITFTTFRHNECPDPGVPVNGKRFGDSLQLGSSISFLCDEGFLGTQGSETITCVLKEGSVVWNSAVLRCEAPCGGHLTSPSGTILSPGWPGFYKDALSCAWVIEAQPGYPIKITFDRFKTEVNYDTLEVRDGRTYSAPLIGVYHGTQVPQFLISTSNYLYLLFSTDKSHSDIGFQLRYETITLQSDHCLDPGIPVNGQRHGNDFYVGALVTFSCDSGYTLSDGEPLECEPNFQWSRALPSCEALCGGFIQGSSGTILSPGFPDFYPNNLNCTWIIETSHGKGVFFTFHTFHLESGHDYLLITENGSFTQPLRQLTGSRLPAPISAGLYGNFTAQVRFISDFSMSYEGFNITFSEYDLEPCEEPEVPAYSIRKGLQFGVGDTLTFSCFPGYRLEGTARITCLGGRRRLWSSPLPRCVAECGNSVTGTQGTLLSPNFPVNYNNNHECIYSIQTQPGKGIQLKARAFELSEGDVLKVYDGNNNSARLLGVFSHSEMMGVTLNSTSSSLWLDFITDAENTSKGFELHFSSFELIKCEDPGTPKFGYKVHDEGHFAGSSVSFSCDPGYSLRGSEELLCLSGERRTWDRPLPTCVAECGGTVRGEVSGQVLSPGYPAPYEHNLNCIWTIEAEAGCTIGLHFLVFDTEEVHDVLRIWDGPVESGVLLKELSGPALPKDLHSTFNSVVLQFSTDFFTSKQGFAIQFSVSTATSCNDPGIPQNGSRSGDSWEAGDSTVFQCDPGYALQGSAEISCVKIENRFFWQPSPPTCIAPCGGDLTGPSGVILSPNYPEPYPPGKECDWKVTVSPDYVIALVFNIFNLEPGYDFLHIYDGRDSLSPLIGSFYGSQLPGRIESSSNSLFLAFRSDASVSNAGFVIDYTENPRESCFDPGSIKNGTRVGSDLKLGSSVTYYCHGGYEVEGTSTLSCILGPDGKPVWNNPRPVCTAPCGGQYVGSDGVVLSPNYPQNYTSGQICLYFVTVPKDYVVFGQFAFFHTALNDVVEVHDGHSQHSRLLSSLSGSHTGESLPLATSNQVLIKFSAKGLAPARGFHFVYQAVPRTSATQCSSVPEPRYGKRLGSDFSVGAIVRFECNSGYALQGSPEIECLPVPGALAQWNVSAPTCVVPCGGNLTERRGTILSPGFPEPYLNSLNCVWKIVVPEGAGIQIQVVSFVTEQNWDSLEVFDGADNTVTMLGSFSGTTVPALLNSTSNQLYLHFYSDISVSAAGFHLEYKTVGLSSCPEPAVPSNGVKTGERYLVNDVVSFQCEPGYALQGHAHISCMPGTVRRWNYPPPLCIAQCGGTVEEMEGVILSPGFPGNYPSNMDCSWKIALPVGFGAHIQFLNFSTEPNHDYIEIRNGPYETSRMMGRFSGSELPSSLLSTSHETTVYFHSDHSQNRPGFKLEYQAYELQECPDPEPFANGIVRGAGYNVGQSVTFECLPGYQLTGHPVLTCQHGTNRNWDHPLPKCEVPCGGNITSSNGTVYSPGFPSPYSSSQDCVWLITVPIGHGVRLNLSLLQTEPSGDFITIWDGPQQTAPRLGVFTRSMAKKTVQSSSNQVLLKFHRDAATGGIFAIAFSAYPLTKCPPPTILPNAEVVTENEEFNIGDIVRYRCLPGFTLVGNEILTCKLGTYLQFEGPPPICEVHCPTNELLTDSTGVILSQSYPGSYPQFQTCSWLVRVEPDYNISLTVEYFLSEKQYDEFEIFDGPSGQSPLLKALSGNYSAPLIVTSSSNSVYLRWSSDHAYNRKGFKIRYSAPYCSLPRAPLHGFILGQTSTQPGGSIHFGCNAGYRLVGHSMAICTRHPQGYHLWSEAIPLCQALSCGLPEAPKNGMVFGKEYTVGTKAMYSCSEGYHLQAGAEATAECLDTGLWSNRNVPPQCVPVTCPDVSSISVEHGRWRLIFETQYQFQAQLMLICDPGYYYTGQRVIRCQANGKWSLGDSTPTCRIISCGELPIPPNGHRIGTLSVYGATAIFSCNSGYTLVGSRVRECMANGLWSGSEVRCLATQTKLHSIFYKLLFDVLSSPSLTKAGHCGTPEPIVNGHINGENYSYRGSVVYQCNAGFRLIGMSVRICQQDHHWSGKTPFCVPITCGHPGNPVNGLTQGNQFNLNDVVKFVCNPGYMAEGAARSQCLASGQWSDMLPTCRIINCTDPGHQENSVRQVHASGPHRFSFGTTVSYRCNHGFYLLGTPVLSCQGDGTWDRPRPQCLLVSCGHPGSPPHSQMSGDSYTVGAVVRYSCIGKRTLVGNSTRMCGLDGHWTGSLPHCSGTSVGVCGDPGIPAHGIRLGDSFDPGTVMRFSCEAGHVLRGSSERTCQANGSWSGSQPECGVISCGNPGTPSNARVVFSDGLVFSSSIVYECREGYYATGLLSRHCSVNGTWTGSDPECLVINCGDPGIPANGLRLGNDFRYNKTVTYQCVPGYMMESHRVSVLSCTKDRTWNGTKPVCKALMCKPPPLIPNGKVVGSDFMWGSSVTYACLEGYQLSLPAVFTCEGNGSWTGELPQCFPVFCGDPGVPSRGRREDRGFSYRSSVSFSCHPPLVLVGSPRRFCQSDGTWSGTQPSCIDPTLTTCADPGVPQFGIQNNSQGYQVGSTVLFRCQKGYLLQGSTTRTCLPNLTWSGTPPDCVPHHCRQPETPTHANVGALDLPSMGYTLIYSCQEGFSLKGGSEHRTCKADGSWTGKPPICLEVRPSGRPINTAREPPLTQALIPGDVFAKNSLWKGAYEYQGKKQPAMLRVTGFQVANSKVNATMIDHSGVELHLAGTYKKEDFHLLLQVYQITGPVEIFMNKFKDDHWALDGHVSSESSGATFIYQGSVKGQGFGQFGFQRLDLRLLESDPESIGRHFASNSSSVAAAILVPFIALIIAGFVLYLYKHRRRPKVPFNGYAGHENTNVRATFENPMYDRNIQPTDIMASEAEFTVSTVCTAV

SEQ ID NO: 15406 - protein, 756 aa, Homo sapiens
MSRPGTATPALALVLLAVTLAGVGAQGAALEDPDYYGQEIWSREPYYARPEPELETFSPPLPAGPGEEWERRPQEPRPPKRATKPKKAPKREKSAPEPPPPGKHSNKKVMRTKSSEKAANDDHSVRVAREDVRESCPPLGLETLKITDFQLHASTVKRYGLGAHRGRLNIQAGINENDFYDGAWCAGRNDLQQWIEVDARRLTRFTGVITQGRNSLWLSDWVTSYKVMVSNDSHTWVTVKNGSGDMIFEGNSEKEIPVLNELPVPMVARYIRINPQSWFDNGSICMRMEILGCPLPDPNNYYHRRNEMTTTDDLDFKHHNYKEMRQLMKVVNEMCPNITRIYNIGKSHQGLKLYAVEISDHPGEHEVGEPEFHYIAGAHGNEVLGRELLLLLVQFVCQEYLARNARIVHLVEETRIHVLPSLNPDGYEKAYEGGSELGGWSLGRWTHDGIDINNNFPDLNTLLWEAEDRQNVPRKVPNHYIAIPEWFLSENATVAAETRAVIAWMEKIPFVLGGNLQGGELVVAYPYDLVRSPWKTQEHTPTPDDHVFRWLAYSYASTHRLMTDARRRVCHTEDFQKEEGTVNGASWHTVAGSLNDFSYLHTNCFELSIYVGCDKYPHESQLPEEWENNRESLIVFMEQVHRGIKGLVRDSHGKGIPNAIISVEGINHDIRTANDGDYWRLLNPGEYVVTAKAEGFTASTKNCMVGYDMGATRCDFTLSKTNMARIREIMEKFGKQPVSLPARRLKLRGQKRRQRG

SEQ ID NO: 15407 - protein, 3707 aa, Homo sapiens
MKGIRKGESRAKESKPWEPGKRRCAKCGRLDFILMKKMGIKSGFTFWNLVFLLTVSCVKGFIYTCGGTLKGLNGTIESPGFPYGYPNGANCTWVIIAEERNRIQIVFQSFALEEEYDYLSLYDGHPHPTNFRTRLTGFHLPPPVTSTKSVFSLRLTSDFAVSAHGFKVYYEELQSSSCGNPGVPPKGVLYGTRFDVGDKIRYSCVTGYILDGHPQLTCIANSVNTASWDFPVPICRAEDACGGTMRGSSGIISSPSFPNEYHNNADCTWTIVAEPGDTISLIFTDFQMEEKYDYLEIEGSEPPTIWLSGMNIPPPIISNKNWLRLHFVTDSNHRYRGFSAPYQGSSTLTHTTSTGELEEHNRTTTGAIAVASTPADVTVSSVTAVTIHRLSEEQRVQVTSLRNSGLDPNTSKDGLSPHPADTQSTRRRPRHAEQIERTKELAVVTHRVKKAIDFKSRGFKLFPGKDNSNKFSILNEGGIKTASNLCPDPGEPENGKRIGSDFSLGSTVQFSCDEDYVLQGAKSITCQRIAEVFAAWSDHRPVCKVKTCGSNLQGPSGTFTSPNFPFQYDSNAQCVWVITAVNTNKVIQINFEEFDLEIGYDTLTIGDGGEVGDPRTVLQVLTGSFVPDLIVSMSSQMWLHLQTDESVGSVGFKVNYKEIEKESCGDPGTPLYGIREGDGFSNRDVLRFECQFGFELIGEKSIVCQENNQWSANIPICIFPCLSNFTAPMGTVLSPDYPEGYGNNLNCIWTIISDPGSRIHLSFNDFDLESQFDFLAVKDGDSPESPILGTFTGAEVPSHLTSNSHILRLEFQADHSMSGRGFNITYNTFGHNECPDPGIPINARRFGDNFQLGSSISVICEEGFIKTQGTETITCILMDGKVMWSGLIPKCGAPCGGHFSAPSGVILSPGWPGYYKDSLNCEWVIEAEPGHSIKITFERFQTELNYDVLEVHDGPNLLSPLLGSYNGTQVPQFLFSSSNFIYLLFTTDNSRSNNGFKIHYESVTVNTYSCLDPGIPVHGRRYGHDFSIGSTVSFSCDSGYRLSHEEPLLCEKNHWWSHPLPTCDALCGGDVRGPSGTILSPGYPEFYPNSLNCTWTVDVTHGKGVQFNFHTFHLEDHHDYLLITENGSFTQPLARLTGSDLPPTINAGLYGNFRAQLRFISDFSISYEGFNITFSEYNLEPCEDPGIPQYGSRIGFNFGIGDTLTFSCSSGYRLEGTSEIICLGGGRRVWSAPLPRCVAECGASATNNEGILLSPNYPLNYENNHECIYSIQVQAGKGINISARTFHLAQGDVLKIYDGKDKTTHLLGAFTGASMRGLTLSSTSNQLWLEFNSDTEGTDEGFQLVYTSFELSHCEDPGIPQFGYKISDQGHFAGSTIIYGCNPGYTLHGSSLLKCMTGERRAWDYPLPSCIAECGGRFKGESSGRILSPGYPFPYDNNLRCMWMIEVDPGNIVSLQFLAFDTEASHDILRVWDGPPENDMLLKEISGSLIPEGIHSTLNIVTIQFDTDFYISKSGFAIQFSSSVATACRDPGVPMNGTRNGDGREPGDTVVFQCDPGYELQGEERITCIQVENRYFWQPSPPVCIAPCGGNLTGSSGFILSPNFPHPYPHSRDCDWTITVNADYVISLAFISFSIEPNYDFLYIYDGPDSNSPLIGSFQDSKLPERIESSSNTMHLAFRSDGSVSYTGFHLEYKAKLRESCFDPGNIMNGTRLGMDYKLGSTVTYYCDAGYVLQGYSTLTCIMGDDGRPGWNRALPSCHAPCGSRSTGSEGTVLSPNYPKNYSVGHNCVYSIAVPKEFVVFGQFVFFQTSLHDVVEVYDGPTQQSSLLSSLSGSHSGESLPLSSGNQITIRFTSVGPITAKGFHFVYQAVPRTSSTQCSSVPEPRFGRRIGNEFAVGSSVLFDCNPGYILHGSIAIRCETVPNSLAQWNDSLPTCIVPCGGILTKRKGTILSPGYPEPYDNNLNCVWKITVPEGAGIQVQVVSFATEHNWDSLDFYDGGDNNAPRLGSYSGTTIPHLLNSTSNNLYLNFQSDISVSAAGFHLEYTAIGLDSCPEPQTPSSGIKIGDRYMVGDVVSFQCDQGYSLQGHSHITCMPGPVRRWNYPIPICLAQCGGAMSDFSGVILSPGFPGNYPSSLDCTWTINLPIGFGVHLQFVNFSTETIHDYLEVRSGSSETSTVIGRLSGPQIPSSLFSTTHETSLYFHSDYSQNKQGFHIVYQAYQLQSCPDPRPFRNGFVIGNDFTVGQTISFECFPGYTLIGNSALTCLHGVSRNWNHPLPRCEALCGGNITAMNGTIYSPGYPDEYPNFQDCFWLVRVPPGNGIYINFTVLQTEPIYDFITVWDGPDQNSPQIGQFSGNTALESVYSTSNQILIKFHSDFTTSGFFVLSYHAYQLRVCQPPPPVPNAEILTEDDEFEIGDIIRYQCLPGFTLVGNAILTCRLGERLQMDGAPPVCQVLCPANELRLDSTGVILSPGYPDSYPNLQMCAWSISVEKGYNITMFVEFFQTEKEFDVLQVYDGPNIQSPVLISLSGDYSSAFNITSNGHEVFLQWSADHGNNKKGFRIRYIAFYCSTPESPPHGYIISQTGGQLNSVVRWACDRGFRLVGKSSAVCRKSSYGYHAWDAPVPACQAISCGIPKAPTNGGILTTDYLVGTRVTYFCNDGYRLSSKELTTAVCQSDGTWSNHNKTPRCVVVTCPSINSFILEHGRWRIVNGSHYEYKTKVVFSCDPGYHGLGPASIECLPNGTWSWRNERPYCQIISCGELPTPPNGNKIGTQTSYGSTAIFTCDLGFMLVGSAVRECLSSGLWSESETRCLAGHCGIPELIVNGQVIGENYGYRDTVVYQCNPGFRLIGSSVRICQQDHNWSGQLPSCVPVSCGHPGSPIYGRTSGNGFNFNDVVTFSCNIGYLMQGPTKAQCQANRQWSHPPPMCKVVNCSDPGIPANSKRESKIEHGNFTYGTVVFYDCNPGYFLFGSSVLICQPNGQWDKPLPECIMIDCGHPGVPPNAVLSGEKYTFGSTVHYSCTGKRSLLGQSSRTCQLNGHWSGSQPHCSGDATGTCGDPGTPGHGSRQESNFRTKSTVRYACDTGYILHGSEERTCLANGSWTGRQPECKAVQCGNPGTTANGKVFRIDGTTFSSSVIYSCMEGYILSGPSVRQCTANGTWSGTLPNCTIISCGDPGIPANGLRYGDDYVVGQNVSYMCQPGYTMELNGSRIRTCTINGTWSGVMPTCRAVTCPTPPQISNGRLEGTNFDWGFSISYICSPGYELSFPAVLTCVGNGTWSGEVPQCLPKFCGDPGIPAQGKREGKSFIYQSEVSFSCNFPFILVGSSTRICQADGTWSGSSPHCIEPTQTSCENPGVPRHGSQNNTFGFQVGSVVQFHCKKGHLLQGSTTRTCLPDLTWSGIQPECIPHSCKQPETPAHANVVGMDLPSHGYTLIYTCQPGFFLAGGTEHRVCRSDNTWTGKVPICEAGSKILVKDPRPALGTPSPKLSVPDDVFAQNYIWKGSYNFKGRKQPMTLTVTSFNASTGRVNATLSNSNMELLLSGVYKSQEARLMLRIYLIKVPAHASVKKMKEENWAMDGFVSAEPDGATYVFQGFIQGKDYGQFGLQRLGLNMSEGSNSSNQPHGTNSSSVAIAILVPFFALIFAGFGFYLYKQRTAPKTQYTGCSVHENNNGQAAFENPMYDTNAKSVEGKAVRFDPNLNTVCTMV

SEQ ID NO: 15408 - protein, 3667 aa, Homo sapiens
MWSWFLCWKPVQLDRQTASGFIYTCGGTLKGLNGTIESPGFPYGYPNGANCTWVIIAEERNRIQIVFQSFALEEEYDYLSLYDGHPHPTNFRTRLTGFHLPPPVTSTKSVFSLRLTSDFAVSAHGFKVYYEELQSSSCGNPGVPPKGVLYGTRFDVGDKIRYSCVTGYILDGHPQLTCIANSVNTASWDFPVPICRAEDACGGTMRGSSGIISSPSFPNEYHNNADCTWTIVAEPGDTISLIFTDFQMEEKYDYLEIEGSEPPTIWLSGMNIPPPIISNKNWLRLHFVTDSNHRYRGFSAPYQGSSTLTHTTSTGELEEHNRTTTGAIAVASTPADVTVSSVTAVTIHRLSEEQRVQVTSLRNSGLDPNTSKDGLSPHPADTQSTRRRPRHAEQIERTKELAVVTHRVKKAIDFKSRGFKLFPGKDNSNKFSILNEGGIKTASNLCPDPGEPENGKRIGSDFSLGSTVQFSCDEDYVLQGAKSITCQRIAEVFAAWSDHRPVCKVKTCGSNLQGPSGTFTSPNFPFQYDSNAQCVWVITAVNTNKVIQINFEEFDLEIGYDTLTIGDGGEVGDPRTVLQVLTGSFVPDLIVSMSSQMWLHLQTDESVGSVGFKVNYKEIEKESCGDPGTPLYGIREGDGFSNRDVLRFECQFGFELIGEKSIVCQENNQWSANIPICIFPCLSNFTAPMGTVLSPDYPEGYGNNLNCIWTIISDPGSRIHLSFNDFDLESQFDFLAVKDGDSPESPILGTFTGAEVPSHLTSNSHILRLEFQADHSMSGRGFNITYNTFGHNECPDPGIPINARRFGDNFQLGSSISVICEEGFIKTQGTETITCILMDGKVMWSGLIPKCGAPCGGHFSAPSGVILSPGWPGYYKDSLNCEWVIEAEPGHSIKITFERFQTELNYDVLEVHDGPNLLSPLLGSYNGTQVPQFLFSSSNFIYLLFTTDNSRSNNGFKIHYESVTVNTYSCLDPGIPVHGRRYGHDFSIGSTVSFSCDSGYRLSHEEPLLCEKNHWWSHPLPTCDALCGGDVRGPSGTILSPGYPEFYPNSLNCTWTVDVTHGKGVQFNFHTFHLEDHHDYLLITENGSFTQPLARLTGSDLPPTINAGLYGNFRAQLRFISDFSISYEGFNITFSEYNLEPCEDPGIPQYGSRIGFNFGIGDTLTFSCSSGYRLEGTSEIICLGGGRRVWSAPLPRCVAECGASATNNEGILLSPNYPLNYENNHECIYSIQVQAGKGINISARTFHLAQGDVLKIYDGKDKTTHLLGAFTGASMRGLTLSSTSNQLWLEFNSDTEGTDEGFQLVYTSFELSHCEDPGIPQFGYKISDQGHFAGSTIIYGCNPGYTLHGSSLLKCMTGERRAWDYPLPSCIAECGGRFKGESSGRILSPGYPFPYDNNLRCMWMIEVDPGNIVSLQFLAFDTEASHDILRVWDGPPENDMLLKEISGSLIPEGIHSTLNIVTIQFDTDFYISKSGFAIQFSSSVATACRDPGVPMNGTRNGDGREPGDTVVFQCDPGYELQGEERITCIQVENRYFWQPSPPVCIAPCGGNLTGSSGFILSPNFPHPYPHSRDCDWTITVNADYVISLAFISFSIEPNYDFLYIYDGPDSNSPLIGSFQDSKLPERIESSSNTMHLAFRSDGSVSYTGFHLEYKAKLRESCFDPGNIMNGTRLGMDYKLGSTVTYYCDAGYVLQGYSTLTCIMGDDGRPGWNRALPSCHAPCGSRSTGSEGTVLSPNYPKNYSVGHNCVYSIAVPKEFVVFGQFVFFQTSLHDVVEVYDGPTQQSSLLSSLSGSHSGESLPLSSGNQITIRFTSVGPITAKGFHFVYQAVPRTSSTQCSSVPEPRFGRRIGNEFAVGSSVLFDCNPGYILHGSIAIRCETVPNSLAQWNDSLPTCIVPCGGILTKRKGTILSPGYPEPYDNNLNCVWKITVPEGAGIQVQVVSFATEHNWDSLDFYDGGDNNAPRLGSYSGTTIPHLLNSTSNNLYLNFQSDISVSAAGFHLEYTAIGLDSCPEPQTPSSGIKIGDRYMVGDVVSFQCDQGYSLQGHSHITCMPGPVRRWNYPIPICLAQCGGAMSDFSGVILSPGFPGNYPSSLDCTWTINLPIGFGVHLQFVNFSTETIHDYLEVRSGSSETSTVIGRLSGPQIPSSLFSTTHETSLYFHSDYSQNKQGFHIVYQAYQLQSCPDPRPFRNGFVIGNDFTVGQTISFECFPGYTLIGNSALTCLHGVSRNWNHPLPRCEALCGGNITAMNGTIYSPGYPDEYPNFQDCFWLVRVPPGNGIYINFTVLQTEPIYDFITVWDGPDQNSPQIGQFSGNTALESVYSTSNQILIKFHSDFTTSGFFVLSYHAYQLRVCQPPPPVPNAEILTEDDEFEIGDIIRYQCLPGFTLVGNAILTCRLGERLQMDGAPPVCQVLCPANELRLDSTGVILSPGYPDSYPNLQMCAWSISVEKGYNITMFVEFFQTEKEFDVLQVYDGPNIQSPVLISLSGDYSSAFNITSNGHEVFLQWSADHGNNKKGFRIRYIAFYCSTPESPPHGYIISQTGGQLNSVVRWACDRGFRLVGKSSAVCRKSSYGYHAWDAPVPACQAISCGIPKAPTNGGILTTDYLVGTRVTYFCNDGYRLSSKELTTAVCQSDGTWSNHNKTPRCVVVTCPSINSFILEHGRWRIVNGSHYEYKTKVVFSCDPGYHGLGPASIECLPNGTWSWRNERPYCQIISCGELPTPPNGNKIGTQTSYGSTAIFTCDLGFMLVGSAVRECLSSGLWSESETRCLAGHCGIPELIVNGQVIGENYGYRDTVVYQCNPGFRLIGSSVRICQQDHNWSGQLPSCVPVSCGHPGSPIYGRTSGNGFNFNDVVTFSCNIGYLMQGPTKAQCQANRQWSHPPPMCKVVNCSDPGIPANSKRESKIEHGNFTYGTVVFYDCNPGYFLFGSSVLICQPNGQWDKPLPECIMIDCGHPGVPPNAVLSGEKYTFGSTVHYSCTGKRSLLGQSSRTCQLNGHWSGSQPHCSGDATGTCGDPGTPGHGSRQESNFRTKSTVRYACDTGYILHGSEERTCLANGSWTGRQPECKAVQCGNPGTTANGKVFRIDGTTFSSSVIYSCMEGYILSGPSVRQCTANGTWSGTLPNCTIISCGDPGIPANGLRYGDDYVVGQNVSYMCQPGYTMELNGSRIRTCTINGTWSGVMPTCRAVTCPTPPQISNGRLEGTNFDWGFSISYICSPGYELSFPAVLTCVGNGTWSGEVPQCLPKFCGDPGIPAQGKREGKSFIYQSEVSFSCNFPFILVGSSTRICQADGTWSGSSPHCIEPTQTSCENPGVPRHGSQNNTFGFQVGSVVQFHCKKGHLLQGSTTRTCLPDLTWSGIQPECIPHSCKQPETPAHANVVGMDLPSHGYTLIYTCQPGFFLAGGTEHRVCRSDNTWTGKVPICEAGSKILVKDPRPALGTPSPKLSVPDDVFAQNYIWKGSYNFKGRKQPMTLTVTSFNASTGRVNATLSNSNMELLLSGVYKSQEARLMLRIYLIKVPAHASVKKMKEENWAMDGFVSAEPDGATYVFQGFIQGKDYGQFGLQRLGLNMSEGSNSSNQPHGTNSSSVAIAILVPFFALIFAGFGFYLYKQRTAPKTQYTGCSVHENNNGQAAFENPMYDTNAKSVEGKAVRFDPNLNTVCTMV

SEQ ID NO: 15409 - protein, 3538 aa, Homo sapiens
MKGIRKGESRAKESKPWEPGKRRCAKCGRLDFILMKKMGIKSGFTFWNLVFLLTVSCVKGFIYTCGGTLKGLNGTIESPGFPYGYPNGANCTWVIIAEERNRIQIVFQSFALEEEYDYLSLYDGHPHPTNFRTRLTGFHLPPPVTSTKSVFSLRLTSDFAVSAHGFKVYYEELQSSSCGNPGVPPKGVLYGTRFDVGDKIRYSCVTGYILDGHPQLTCIANSVNTASWDFPVPICRAEDACGGTMRGSSGIISSPSFPNEYHNNADCTWTIVAEPGDTISLIFTDFQMEEKYDYLEIEGSEPPTIWLSGMNIPPPIISNKNWLRLHFVTDSNHRYRGFSAPYQVKKAIDFKSRGFKLFPGKDNSNKFSILNEGGIKTASNLCPDPGEPENGKRIGSDFSLGSTVQFSCDEDYVLQGAKSITCQRIAEVFAAWSDHRPVCKVKTCGSNLQGPSGTFTSPNFPFQYDSNAQCVWVITAVNTNKVIQINFEEFDLEIGYDTLTIGDGGEVGDPRTVLQVLTGSFVPDLIVSMSSQMWLHLQTDESVGSVGFKVNYKEIEKESCGDPGTPLYGIREGDGFSNRDVLRFECQFGFELIGEKSIVCQENNQWSANIPICIFPCLSNFTAPMGTVLSPDYPEGYGNNLNCIWTIISDPGSRIHLSFNDFDLESQFDFLAVKDGDSPESPILGTFTGAEVPSHLTSNSHILRLEFQADHSMSGRGFNITYNTFGHNECPDPGIPINARRFGDNFQLGSSISVICEEGFIKTQGTETITCILMDGKVMWSGLIPKCGAPCGGHFSAPSGVILSPGWPGYYKDSLNCEWVIEAEPGHSIKITFERFQTELNYDVLEVHDGPNLLSPLLGSYNGTQVPQFLFSSSNFIYLLFTTDNSRSNNGFKIHYESVTVNTYSCLDPGIPVHGRRYGHDFSIGSTVSFSCDSGYRLSHEEPLLCEKNHWWSHPLPTCDALCGGDVRGPSGTILSPGYPEFYPNSLNCTWTVDVTHGKGVQFNFHTFHLEDHHDYLLITENGSFTQPLARLTGSDLPPTINAGLYGNFRAQLRFISDFSISYEGFNITFSEYNLEPCEDPGIPQYGSRIGFNFGIGDTLTFSCSSGYRLEGTSEIICLGGGRRVWSAPLPRCVAECGASATNNEGILLSPNYPLNYENNHECIYSIQVQAGKGINISARTFHLAQGDVLKIYDGKDKTTHLLGAFTGASMRGLTLSSTSNQLWLEFNSDTEGTDEGFQLVYTSFELSHCEDPGIPQFGYKISDQGHFAGSTIIYGCNPGYTLHGSSLLKCMTGERRAWDYPLPSCIAECGGRFKGESSGRILSPGYPFPYDNNLRCMWMIEVDPGNIVSLQFLAFDTEASHDILRVWDGPPENDMLLKEISGSLIPEGIHSTLNIVTIQFDTDFYISKSGFAIQFSSSVATACRDPGVPMNGTRNGDGREPGDTVVFQCDPGYELQGEERITCIQVENRYFWQPSPPVCIAPCGGNLTGSSGFILSPNFPHPYPHSRDCDWTITVNADYVISLAFISFSIEPNYDFLYIYDGPDSNSPLIGSFQDSKLPERIESSSNTMHLAFRSDGSVSYTGFHLEYKAKLRESCFDPGNIMNGTRLGMDYKLGSTVTYYCDAGYVLQGYSTLTCIMGDDGRPGWNRALPSCHAPCGSRSTGSEGTVLSPNYPKNYSVGHNCVYSIAVPKEFVVFGQFVFFQTSLHDVVEVYDGPTQQSSLLSSLSGSHSGESLPLSSGNQITIRFTSVGPITAKGFHFVYQAVPRTSSTQCSSVPEPRFGRRIGNEFAVGSSVLFDCNPGYILHGSIAIRCETVPNSLAQWNDSLPTCIVPCGGILTKRKGTILSPGYPEPYDNNLNCVWKITVPEGAGIQVQVVSFATEHNWDSLDFYDGGDNNAPRLGSYSGTTIPHLLNSTSNNLYLNFQSDISVSAAGFHLEYTAIGLDSCPEPQTPSSGIKIGDRYMVGDVVSFQCDQGYSLQGHSHITCMPGPVRRWNYPIPICLAQCGGAMSDFSGVILSPGFPGNYPSSLDCTWTINLPIGFGVHLQFVNFSTETIHDYLEVRSGSSETSTVIGRLSGPQIPSSLFSTTHETSLYFHSDYSQNKQGFHIVYQAYQLQSCPDPRPFRNGFVIGNDFTVGQTISFECFPGYTLIGNSALTCLHGVSRNWNHPLPRCEALCGGNITAMNGTIYSPGYPDEYPNFQDCFWLVRVPPGNGIYINFTVLQTEPIYDFITVWDGPDQNSPQIGQFSGNTALESVYSTSNQILIKFHSDFTTSGFFVLSYHAYQLRVCQPPPPVPNAEILTEDDEFEIGDIIRYQCLPGFTLVGNAILTCRLGERLQMDGAPPVCQVLCPANELRLDSTGVILSPGYPDSYPNLQMCAWSISVEKGYNITMFVEFFQTEKEFDVLQVYDGPNIQSPVLISLSGDYSSAFNITSNGHEVFLQWSADHGNNKKGFRIRYIAFYCSTPESPPHGYIISQTGGQLNSVVRWACDRGFRLVGKSSAVCRKSSYGYHAWDAPVPACQAISCGIPKAPTNGGILTTDYLVGTRVTYFCNDGYRLSSKELTTAVCQSDGTWSNHNKTPRCVVISCGELPTPPNGNKIGTQTSYGSTAIFTCDLGFMLVGSAVRECLSSGLWSESETRCLAGHCGIPELIVNGQVIGENYGYRDTVVYQCNPGFRLIGSSVRICQQDHNWSGQLPSCVPVSCGHPGSPIYGRTSGNGFNFNDVVTFSCNIGYLMQGPTKAQCQANRQWSHPPPMCKVVNCSDPGIPANSKRESKIEHGNFTYGTVVFYDCNPGYFLFGSSVLICQPNGQWDKPLPECIMIDCGHPGVPPNAVLSGEKYTFGSTVHYSCTGKRSLLGQSSRTCQLNGHWSGSQPHCSGDATGTCGDPGTPGHGSRQESNFRTKSTVRYACDTGYILHGSEERTCLANGSWTGRQPECKAVQCGNPGTTANGKVFRIDGTTFSSSVIYSCMEGYILSGPSVRQCTANGTWSGTLPNCTIISCGDPGIPANGLRYGDDYVVGQNVSYMCQPGYTMELNGSRIRTCTINGTWSGVMPTCRAVTCPTPPQISNGRLEGTNFDWGFSISYICSPGYELSFPAVLTCVGNGTWSGEVPQCLPKFCGDPGIPAQGKREGKSFIYQSEVSFSCNFPFILVGSSTRICQADGTWSGSSPHCIEPTQTSCENPGVPRHGSQNNTFGFQVGSVVQFHCKKGHLLQGSTTRTCLPDLTWSGIQPECIPHSCKQPETPAHANVVGMDLPSHGYTLIYTCQPGFFLAGGTEHRVCRSDNTWTGKVPICEAGSKILVKDPRPALGTPSPKLSVPDDVFAQNYIWKGSYNFKGRKQPMTLTVTSFNASTGRVNATLSNSNMELLLSGVYKSQEARLMLRIYLIKVPAHASVKKMKEENWAMDGFVSAEPDGATYVFQGFIQGKDYGQFGLQRLGLNMSEGSNSSNQPHGTNSSSVAIAILVPFFALIFAGFGFYLYKQRTAPKTQYTGCSVHENNNGQAAFENPMYDTNAKSVEGKAVRFDPNLNTVCTMV

SEQ ID NO: 15410 - protein, 3637 aa, Homo sapiens
MKGIRKGESRAKESKPWEPGKRRCAKCGRLDFILMKKMGIKSGFTFWNLVFLLTVSCVKGFIYTCGGTLKGLNGTIESPGFPYGYPNGANCTWVIIAEERNRIQIVFQSFALEEEYDYLSLYDGHPHPTNFRTRLTGFHLPPPVTSTKSVFSLRLTSDFAVSAHGFKVYYEELQSSSCGNPGVPPKGVLYGTRFDVGDKIRYSCVTGYILDGHPQLTCIANSVNTASWDFPVPICRAEDACGGTMRGSSGIISSPSFPNEYHNNADCTWTIVAEPGDTISLIFTDFQMEEKYDYLEIEGSEPPTIWLSGMNIPPPIISNKNWLRLHFVTDSNHRYRGFSAPYQGSSTLTHTTSTGELEEHNRTTTGAIAVASTPADVTVSSVTAVTIHRLSEEQRVQVTSLRNSGLDPNTSKDGLSPHPADTQSTRRRPRHAEQIERTKELAVVTHRVKKAIDFKSRGFKLFPGKDNSNKFSILNEGGIKTASNLCPDPGEPENGKRIGSDFSLGSTVQFSCDEDYVLQGAKSITCQRIAEVFAAWSDHRPVCKVKTCGSNLQGPSGTFTSPNFPFQYDSNAQCVWVITAVNTNKVIQINFEEFDLEIGYDTLTIGDGGEVGDPRTVLQVLTGSFVPDLIVSMSSQMWLHLQTDESVGSVGFKVNYKEIEKESCGDPGTPLYGIREGDGFSNRDVLRFECQFGFELIGEKSIVCQENNQWSANIPICIFPCLSNFTAPMGTVLSPDYPEGYGNNLNCIWTIISDPGSRIHLSFNDFDLESQFDFLAVKDGDSPESPILGTFTGAEVPSHLTSNSHILRLEFQADHSMSGRGFNITYNTFGHNECPDPGIPINARRFGDNFQLGSSISVICEEGFIKTQGTETITCILMDGKVMWSGLIPKCGAPCGGHFSAPSGVILSPGWPGYYKDSLNCEWVIEAEPGHSIKITFERFQTELNYDVLEVHDGPNLLSPLLGSYNGTQVPQFLFSSSNFIYLLFTTDNSRSNNGFKIHYESVTVNTYSCLDPGIPVHGRRYGHDFSIGSTVSFSCDSGYRLSHEEPLLCEKNHWWSHPLPTCDALCGGDVRGPSGTILSPGYPEFYPNSLNCTWTVDVTHGKGVQFNFHTFHLEDHHDYLLITENGSFTQPLARLTGSDLPPTINAGLYGNFRAQLRFISDFSISYEGFNITFSEYNLEPCEDPGIPQYGSRIGFNFGIGDTLTFSCSSGYRLEGTSEIICLGGGRRVWSAPLPRCVAECGASATNNEGILLSPNYPLNYENNHECIYSIQVQAGKGINISARTFHLAQGDVLKIYDGKDKTTHLLGAFTGASMRGLTLSSTSNQLWLEFNSDTEGTDEGFQLVYTSFELSHCEDPGIPQFGYKISDQGHFAGSTIIYGCNPGYTLHGSSLLKCMTGERRAWDYPLPSCIAECGGRFKGESSGRILSPGYPFPYDNNLRCMWMIEVDPGNIVSLQFLAFDTEASHDILRVWDGPPENDMLLKEISGSLIPEGIHSTLNIVTIQFDTDFYISKSGFAIQFSSSVATACRDPGVPMNGTRNGDGREPGDTVVFQCDPGYELQGEERITCIQVENRYFWQPSPPVCIAPCGGNLTGSSGFILSPNFPHPYPHSRDCDWTITVNADYVISLAFISFSIEPNYDFLYIYDGPDSNSPLIGSFQDSKLPERIESSSNTMHLAFRSDGSVSYTGFHLEYKAKLRESCFDPGNIMNGTRLGMDYKLGSTVTYYCDAGYVLQGYSTLTCIMGDDGRPGWNRALPSCHAPCGSRSTGSEGTVLSPNYPKNYSVGHNCVYSIAVPKEFAVPRTSSTQCSSVPEPRFGRRIGNEFAVGSSVLFDCNPGYILHGSIAIRCETVPNSLAQWNDSLPTCIVPCGGILTKRKGTILSPGYPEPYDNNLNCVWKITVPEGAGIQVQVVSFATEHNWDSLDFYDGGDNNAPRLGSYSGTTIPHLLNSTSNNLYLNFQSDISVSAAGFHLEYTAIGLDSCPEPQTPSSGIKIGDRYMVGDVVSFQCDQGYSLQGHSHITCMPGPVRRWNYPIPICLAQCGGAMSDFSGVILSPGFPGNYPSSLDCTWTINLPIGFGVHLQFVNFSTETIHDYLEVRSGSSETSTVIGRLSGPQIPSSLFSTTHETSLYFHSDYSQNKQGFHIVYQAYQLQSCPDPRPFRNGFVIGNDFTVGQTISFECFPGYTLIGNSALTCLHGVSRNWNHPLPRCEALCGGNITAMNGTIYSPGYPDEYPNFQDCFWLVRVPPGNGIYINFTVLQTEPIYDFITVWDGPDQNSPQIGQFSGNTALESVYSTSNQILIKFHSDFTTSGFFVLSYHAYQLRVCQPPPPVPNAEILTEDDEFEIGDIIRYQCLPGFTLVGNAILTCRLGERLQMDGAPPVCQVLCPANELRLDSTGVILSPGYPDSYPNLQMCAWSISVEKGYNITMFVEFFQTEKEFDVLQVYDGPNIQSPVLISLSGDYSSAFNITSNGHEVFLQWSADHGNNKKGFRIRYIAFYCSTPESPPHGYIISQTGGQLNSVVRWACDRGFRLVGKSSAVCRKSSYGYHAWDAPVPACQAISCGIPKAPTNGGILTTDYLVGTRVTYFCNDGYRLSSKELTTAVCQSDGTWSNHNKTPRCVVVTCPSINSFILEHGRWRIVNGSHYEYKTKVVFSCDPGYHGLGPASIECLPNGTWSWRNERPYCQIISCGELPTPPNGNKIGTQTSYGSTAIFTCDLGFMLVGSAVRECLSSGLWSESETRCLAGHCGIPELIVNGQVIGENYGYRDTVVYQCNPGFRLIGSSVRICQQDHNWSGQLPSCVPVSCGHPGSPIYGRTSGNGFNFNDVVTFSCNIGYLMQGPTKAQCQANRQWSHPPPMCKVVNCSDPGIPANSKRESKIEHGNFTYGTVVFYDCNPGYFLFGSSVLICQPNGQWDKPLPECIMIDCGHPGVPPNAVLSGEKYTFGSTVHYSCTGKRSLLGQSSRTCQLNGHWSGSQPHCSGDATGTCGDPGTPGHGSRQESNFRTKSTVRYACDTGYILHGSEERTCLANGSWTGRQPECKAVQCGNPGTTANGKVFRIDGTTFSSSVIYSCMEGYILSGPSVRQCTANGTWSGTLPNCTIISCGDPGIPANGLRYGDDYVVGQNVSYMCQPGYTMELNGSRIRTCTINGTWSGVMPTCRAVTCPTPPQISNGRLEGTNFDWGFSISYICSPGYELSFPAVLTCVGNGTWSGEVPQCLPKFCGDPGIPAQGKREGKSFIYQSEVSFSCNFPFILVGSSTRICQADGTWSGSSPHCIEPTQTSCENPGVPRHGSQNNTFGFQVGSVVQFHCKKGHLLQGSTTRTCLPDLTWSGIQPECIPHSCKQPETPAHANVVGMDLPSHGYTLIYTCQPGFFLAGGTEHRVCRSDNTWTGKVPICEAGSKILVKDPRPALGTPSPKLSVPDDVFAQNYIWKGSYNFKGRKQPMTLTVTSFNASTGRVNATLSNSNMELLLSGVYKSQEARLMLRIYLIKVPAHASVKKMKEENWAMDGFVSAEPDGATYVFQGFIQGKDYGQFGLQRLGLNMSEGSNSSNQPHGTNSSSVAIAILVPFFALIFAGFGFYLYKQRTAPKTQYTGCSVHENNNGQAAFENPMYDTNAKSVEGKAVRFDPNLNTVCTMV

SEQ ID NO: 15411 - protein, 2675 aa, Homo sapiens
MKGIRKGESRAKESKPWEPGKRRCAKCGRLDFILMKKMGIKSGFTFWNLVFLLTVSCVKGFIYTCGGTLKGLNGTIESPGFPYGYPNGANCTWVIIAEERNRIQIVFQSFALEEEYDYLSLYDGHPHPTNFRTRLTGFHLPPPVTSTKSVFSLRLTSDFAVSAHGFKVYYEELQSSSCGNPGVPPKGVLYGTRFDVGDKIRYSCVTGYILDGHPQLTCIANSVNTASWDFPVPICRAEDACGGTMRGSSGIISSPSFPNEYHNNADCTWTIVAEPGDTISLIFTDFQMEEKYDYLEIEGSEPPTIWLSGMNIPPPIISNKNWLRLHFVTDSNHRYRGFSAPYQGSSTLTHTTSTGELEEHNRTTTGAIAVASTPADVTVSSVTAVTIHRLSEEQRVQVTSLRNSGLDPNTSKDGLSPHPADTQSTRRRPRHAEQIERTKELAVVTHRVKKAIDFKSRGFKLFPGKDNSNKFSILNEGGIKTASNLCPDPGEPENGKRIGSDFSLGSTVQFSCDEDYVLQGAKSITCQRIAEVFAAWSDHRPVCKVKTCGSNLQGPSGTFTSPNFPFQYDSNAQCVWVITAVNTNKVIQINFEEFDLEIGYDTLTIGDGGEVGDPRTVLQVLTGSFVPDLIVSMSSQMWLHLQTDESVGSVGFKVNYKEIEKESCGDPGTPLYGIREGDGFSNRDVLRFECQFGFELIGEKSIVCQENNQWSANIPICIFPCLSNFTAPMGTVLSPDYPEGYGNNLNCIWTIISDPGSRIHLSFNDFDLESQFDFLAVKDGDSPESPILGTFTGAEVPSHLTSNSHILRLEFQADHSMSGRGFNITYNTFGHNECPDPGIPINARRFGDNFQLGSSISVICEEGFIKTQGTETITCILMDGKVMWSGLIPKCGAPCGGHFSAPSGVILSPGWPGYYKDSLNCEWVIEAEPGHSIKITFERFQTELNYDVLEVHDGPNLLSPLLGSYNGTQVPQFLFSSSNFIYLLFTTDNSRSNNGFKIHYESVTVNTYSCLDPGIPVHGRRYGHDFSIGSTVSFSCDSGYRLSHEEPLLCEKNHWWSHPLPTCDALCGGDVRGPSGTILSPGYPEFYPNSLNCTWTVDVTHGKGVQFNFHTFHLEDHHDYLLITENGSFTQPLARLTGSDLPPTINAGLYGNFRAQLRFISDFSISYEGFNITFSEYNLEPCEDPGIPQYGSRIGFNFGIGDTLTFSCSSGYRLEGTSEIICLGGGRRVWSAPLPRCVAECGASATNNEGILLSPNYPLNYENNHECIYSIQVQAGKGINISARTFHLAQGDVLKIYDGKDKTTHLLGAFTGASMRGLTLSSTSNQLWLEFNSDTEGTDEGFQLVYTSFELSHCEDPGIPQFGYKISDQGHFAGSTIIYGCNPGYTLHGSSLLKCMTGERRAWDYPLPSCIAECGGRFKGESSGRILSPGYPFPYDNNLRCMWMIEVDPGNIVSLQFLAFDTEASHDILRVWDGPPENDMLLKEISGSLIPEGIHSTLNIVTIQFDTDFYISKSGFAIQFSSSVATACRDPGVPMNGTRNGDGREPGDTVVFQCDPGYELQGEERITCIQVENRYFWQPSPPVCIAPCGGNLTGSSGFILSPNFPHPYPHSRDCDWTITVNADYVISLAFISFSIEPNYDFLYIYDGPDSNSPLIGSFQDSKLPERIESSSNTMHLAFRSDGSVSYTGFHLEYKAKLRESCFDPGNIMNGTRLGMDYKLGSTVTYYCDAGYVLQGYSTLTCIMGDDGRPGWNRALPSCHAPCGSRSTGSEGTVLSPNYPKNYSVGHNCVYSIAVPKEFVVFGQFVFFQTSLHDVVEVYDGPTQQSSLLSSLSGSHSGESLPLSSGNQITIRFTSVGPITAKGFHFVYQAVPRTSSTQCSSVPEPRFGRRIGNEFAVGSSVLFDCNPGYILHGSIAIRCETVPNSLAQWNDSLPTCIVPCGGILTKRKGTILSPGYPEPYDNNLNCVWKITVPEGAGIQVQVVSFATEHNWDSLDFYDGGDNNAPRLGSYSGTTIPHLLNSTSNNLYLNFQSDISVSAAGFHLEYTAIGLDSCPEPQTPSSGIKIGDRYMVGDVVSFQCDQGYSLQGHSHITCMPGPVRRWNYPIPICLAQCGGAMSDFSGVILSPGFPGNYPSSLDCTWTINLPIGFGVHLQFVNFSTETIHDYLEVRSGSSETSTVIGRLSGPQIPSSLFSTTHETSLYFHSDYSQNKQGFHIVYQAYQLQSCPDPRPFRNGFVIGNDFTVGQTISFECFPGYTLIGNSALTCLHGVSRNWNHPLPRCEALCGGNITAMNGTIYSPGYPDEYPNFQDCFWLVRVPPGNGIYINFTVLQTEPIYDFITVWDGPDQNSPQIGQFSGNTALESVYSTSNQILIKFHSDFTTSGFFVLSYHAYQLRVCQPPPPVPNAEILTEDDEFEIGDIIRYQCLPGFTLVGNAILTCRLGERLQMDGAPPVCQVLCPANELRLDSTGVILSPGYPDSYPNLQMCAWSISVEKGYNITMFVEFFQTEKEFDVLQVYDGPNIQSPVLISLSGDYSSAFNITSNGHEVFLQWSADHGNNKKGFRIRYIAFYCSTPESPPHGYIISQTGGQLNSVVRWACDRGFRLVGKSSAVCRKSSYGYHAWDAPVPACQGEVYYAKMNKNMNVRLAPFNVFIWITHFSENGNIRKHIVNSFHKNKA

SEQ ID NO: 15412 - protein, 175 aa, Homo sapiens
MDIAIHHPWIRRPFFPFHSPSRLFDQFFGEHLLESDLFPTSTSLSPFYLRPPSFLRAPSWFDTGLSEMRLEKDRFSVNLDVKHFSPEELKVKVLGDVIEVHGKHEERQDEHGFISREFHRKYRIPADVDPLTITSSLSSDGVLTVNGPRKQVSGPERTIPITREEKPAVTAAPKK

SEQ ID NO: 15413 - protein, 1860 aa, Homo sapiens
MGAGSARGARGTAAAAAARGGGFLFSWILVSFACHLASTQGAPEDVDILQRLGLSWTKAGSPAPPGVIPFQSGFIFTQRARLQAPTGTVIPAALGTELALVLSLCSHRVNHAFLFAVRSQKRKLQLGLQFLPGKTVVHLGSRRSVAFDLDMHDGRWHHLALELRGRTVTLVTACGQRRVPVLLPFHRDPALDPGGSFLFGKMNPHAVQFEGALCQFSIYPVTQVAHNYCTHLRKQCGQADTYQSPLGPLFSQDSGRPFTFQSDLALLGLENLTTATPALGSLPAGRGPRGTVAPATPTKPQRTSPTNPHQHMAVGGPAQTPLLPAKLSASNALDPMLPASVGGSTRTPRPAAAQPSQKITATKIPKSLPTKPSAPSTSIVPIKSPHPTQKTAPSSFTKSALPTQKQVPPTSRPVPARVSRPAEKPIQRNPGMPRPPPPSTRPLPPTTSSSKKPIPTLARTEAKITSHASKPASARTSTHKPPPFTALSSSPAPTPGSTRSTRPPATMVPPTSGTSTPRTAPAVPTPGSAPTGSKKPIGSEASKKAGPKSSPRKPVPLRPGKAARDVPLSDLTTRPSPRQPQPSQQTTPALVLAPAQFLSSSPRPTSSGYSIFHLAGSTPFPLLMGPPGPKGDCGLPGPPGLPGLPGIPGARGPRGPPGPYGNPGLPGPPGAKGQKGDPGLSPGKAHDGAKGDMGLPGLSGNPGPPGRKGHKGYPGPAGHPGEQGQPGPEGSPGAKGYPGRQGLPGPVGDPGPKGSRGYIGLPGLFGLPGSDGERGLPGVPGKRGKMGMPGFPGVFGERGPPGLDGNPGELGLPGPPGVPGLIGDLGVLGPIGYPGPKGMKGLMGSVGEPGLKGDKGEQGVPGVSGDPGFQGDKGSQGLPGFPGARGKPGPLGKVGDKGSIGFPGPPGPEGFPGDIGPPGDNGPEGMKGKPGARGLPGPRGQLGPEGDEGPMGPPGAPGLEGQPGRKGFPGRPGLDGVKGEPGDPGRPGPVGEQGFMGFIGLVGEPGIVGEKGDRGMMGPPGVPGPKGSMGHPGMPGGMGTPGEPGPQGPPGSRGPPGMRGAKGRRGPRGPDGPAGEQGSRGLKGPPGPQGRPGRPGQQGVAGERGHLGSRGFPGIPGPSGPPGTKGLPGEPGPQGPQGPIGPPGEMGPKGPPGAVGEPGLPGEAGMKGDLGPLGTPGEQGLIGQRGEPGLEGDSGPMGPDGLKGDRGDPGPDGEHGEKGQEGLMGEDGPPGPPGVTGVRGPEGKSGKQGEKGRTGAKGAKGYQGQLGEMGVPGDPGPPGTPGPKGSRGSLGPTGAPGRMGAQGEPGLAGYDGHKGIVGPLGPPGPKGEKGEQGEDGKAEGPPGPPGDRGPVGDRGDRGEPGDPGYPGQEGVQGLRGKPGQQGQPGHPGPRGWPGPKGSKGAEGPKGKQGKAGAPGRRGVQGLQGLPGPRGVVGRQGLEGIAGPDGLPGRDGQAGQQGEQGDDGDPGPMGPAGKRGNPGVAGLPGAQGPPGFKGESGLPGQLGPPGKRGTEGRTGLPGNQGEPGSKGQPGDSGEMGFPGMAGLFGPKGPPGDIGFKGIQGPRGPPGLMGKEGIVGPLGILGPSGLPGPKGDKGSRGDWGLQGPRGPPGPRGRPGPPGPPGGPIQLQQDDLGAAFQTWMDTSGALRPESYSYPDRLVLDQGGEIFKTLHYLSNLIQSIKTPLGTKENPARVCRDLMDCEQKMVDGTYWVDPNLGCSSDTIEVSCNFTHGGQTCLKPITASKVEFAISRVQMNFLHLLSSEVTQHITIHCLNMTVWQEGTGQTPAKQAVRFRAWNGQIFEAGGQFRPEVSMDGCKVQDGRWHQTLFTFRTQDPQQLPIISVDNLPPASSGKQYRLEVGPACFL

SEQ ID NO: 15414 - protein, 827 aa, Homo sapiens
MPGGMGTPGEPGPQGPPGSRGPPGMRGAKGRRGPRGPDGPAGEQGSRGLKGPPGPQGRPGRPGQQGVAGERGHLGSRGFPGIPGPSGPPGTKGLPGEPGPQGPQGPIGPPGEMGPKGPPGAVGEPGLPGEAGMKGDLGPLGTPGEQGLIGQRGEPGLEGDSGPMGPDGLKGDRGDPGPDGEHGEKGQEGLMGEDGPPGPPGVTGVRGPEGKSGKQGEKGRTGAKGAKGYQGQLGEMGVPGDPGPPGTPGPKGSRGSLGPTGAPGRMGAQGEPGLAGYDGHKGIVGPLGPPGPKGEKGEQGEDGKAEGPPGPPGDRGPVGDRGDRGEPGDPGYPGQEGVQGLRGKPGQQGQPGHPGPRGWPGPKGSKGAEGPKGKQGKAGAPGRRGVQGLQGLPGPRGVVGRQGLEGIAGPDGLPGRDGQAGQQGEQGDDGDPGPMGPAGKRGNPGVAGLPGAQGPPGFKGESGLPGQLGPPGKRGTEGRTGLPGNQGEPGSKGQPGDSGEMGFPGMAGLFGPKGPPGDIGFKGIQGPRGPPGLMGKEGIVGPLGILGPSGLPGPKGDKGSRGDWGLQGPRGPPGPRGRPGPPGPPGGPIQLQQDDLGAAFQTWMDTSGALRPESYSYPDRLVLDQGGEIFKTLHYLSNLIQSIKTPLGTKENPARVCRDLMDCEQKMVDGTYWVDPNLGCSSDTIEVSCNFTHGGQTCLKPITASKVEFAISRVQMNFLHLLSSEVTQHITIHCLNMTVWQEGTGQTPAKQAVRFRAWNGQIFEAGGQFRPEVSMDGCKVQDGRWHQTLFTFRTQDPQQLPIISVDNLPPASSGKQYRLEVGPACFL

SEQ ID NO: 15415 - protein, 703 aa, Homo sapiens
MGAGSARGARGTAAAAAARGGGFLFSWILVSFACHLASTQGAPEDVDILQRLGLSWTKAGSPAPPGVIPFQSGFIFTQRARLQAPTGTVIPAALGTELALVLSLCSHRVNHAFLFAVRSQKRKLQLGLQFLPGKTVVHLGSRRSVAFDLDMHDGRWHHLALELRGRTVTLVTACGQRRVPVLLPFHRDPALDPGGSFLFGKMNPHAVQFEGALCQFSIYPVTQVAHNYCTHLRKQCGQADTYQSPLGPLFSQDSGRPFTFQSDLALLGLENLTTATPALGSLPAGRGPRGTVAPATPTKPQRTSPTNPHQHMAVGGPAQTPLLPAKLSASNALDPMLPASVGGSTRTPRPAAAQPSQKITATKIPKSLPTKPSAPSTSIVPIKSPHPTQKTAPSSFTKSALPTQKQVPPTSRPVPARVSRPAEKPIQRNPGMPRPPPPSTRPLPPTTSSSKKPIPTLARTEAKITSHASKPASARTSTHKPPPFTALSSSPAPTPGSTRSTRPPATMVPPTSGTSTPRTAPAVPTPGSAPTGSKKPIGSEASKKAGPKSSPRKPVPLRPGKAARDVPLSDLTTRPSPRQPQPSQQTTPALVLAPAQFLSSSPRPTSSGYSIFHLAGSTPFPLLMGPPGPKGDCGLPVRLSGVCMLLGAPVGDWGIGQVVAPSKDRKRSSLEQGAGYGYILGSSQAPGSSGSAKCIIAHPAPDS

SEQ ID NO: 15416 - protein, 512 aa, Homo sapiens [sequence omitted]

SEQ ID NO: 15417 - protein, 189 aa, Homo sapiens
MLFPISMSATEFLLASVIFCLVFWVIRASRPQVPKGLKNPPGPWGWPLIGHMLTLGKNPHLALSRMSQQYGDVLQIRIGSTPVVVLSGLDTIRQALVRQGDDFKGRPDLYTFTLISNGQSMSFSPDSGPVWAARRRLAQNGLKSFSIASDPASSTSCYLEEHVSKEAEVLISTLQELMAGPGHFNPYRT

SEQ ID NO: 15418 - protein, 157 aa, Homo sapiens
MQKMVKEHYKTFEKGHIRDITDSLIEHCQEKQLDENANVQLSDEKIINIVLDLFGAGFDTVTTAISWSLMYLVMNPRVQRKIQEELDTVIGRSRRPRLSDRSHLPYMEAFILETFRHSSFVPFTIPHSTTRDTSLKGFYIPKGRCVFVNQWQINHDQ

SEQ ID NO: 15419 - protein, 132 aa, Homo sapiens
MNRVLCAPAAGAVRALRLIGWASRSLHPLPGSRDRAHPAAEEEDDPDRPIEFSSSKANPHRWSVGHTMGKGHQRPWWKVLPLSCFLVALIIWCYLREESEADQWLRQVWGEVPEPSDRSEEPETPAAYRART

SEQ ID NO: 15420 - protein, 224 aa, Homo sapiens
MEKLLCFLVLTSLSHAFGQTDMSRKAFVFPKESDTSYVSLKAPLTKPLKAFTVCLHFYTELSSTRGYSIFSYATKRQDNEILIFWSKDIGYSFTVGGSEILFEVPEVTVAPVHICTSWESASGIVEFWVDGKPRVRKSLKKGYTVGAEASIILGQEQDSFGGNFEGSQSLVGDIGNVNMWDFVLSPDEINTIYLGGPFSPNVLNWRALKYEVQGEVFTKPQLWP

SEQ ID NO: 15421 - protein, 91 aa, Homo sapiens
MEKLLCFLVLTSLSHAFGQTDMSRKAFVFPKESDTSYVSLKAPLTKPLKAFTVCLHFYTELSSTRGPNVLNWRALKYEVQGEVFTKPQLWP

SEQ ID NO: 15422 - protein, 511 aa, Homo sapiens
MVLLAAAVCTKAGKAIVSRQFVEMTRTRIEGLLAAFPKLMNTGKQHTFVETESVRYVYQPMEKLYMVLITTKNSNILEDLETLRLFSRVIPEYCRALEENEISEHCFDLIFAFDEIVALGYRENVNLAQIRTFTEMDSHEEKVFRAVRETQEREAKAEMRRKAKELQQARRDAERQGKKAPGFGGFGSSAVSGGSTAAMITETIIETDKPKVAPAPARPSGPSKALKLGAKGKEVDNFVDKLKSEGETIMSSSMGKRTSEATKMHAPPINMESVHMKIEEKITLTCGRDGGLQNMELHGMIMLRISDDKYGRIRLHVENEDKKGVQLQTHPNVDKKLFTAESLIGLKNPEKSFPVNSDVGVLKWRLQTTEESFIPLTINCWPSESGNGCDVNIEYELQEDNLELNDVVITIPLPSGVGAPVIGEIDGEYRHDSRRNTLEWCLPVIDAKNKSGSLEFSIAGQPNDFFPVQVSFVSKKNYCNIQVTKVTQVDGNSPVRFSTETTFLVDKYEIL

SEQ ID NO: 15423 - protein, 423 aa, Homo sapiens
MIPEYCRALEENEISEHCFDLIFAFDEIVALGYRENVNLAQIRTFTEMDSHEEKVFRAVRETQEREAKAEMRRKAKELQQARRDAERQGKKAPGFGGFGSSAVSGGSTAAMITETIIETDKPKVAPAPARPSGPSKALKLGAKGKEVDNFVDKLKSEGETIMSSSMGKRTSEATKMHAPPINMESVHMKIEEKITLTCGRDGGLQNMELHGMIMLRISDDKYGRIRLHVENEDKKGVQLQTHPNVDKKLFTAESLIGLKNPEKSFPVNSDVGVLKWRLQTTEESFIPLTINCWPSESGNGCDVNIEYELQEDNLELNDVVITIPLPSGVGAPVIGEIDGEYRHDSRRNTLEWCLPVIDAKNKSGSLEFSIAGQPNDFFPVQVSFVSKKNYCNIQVTKVTQVDGNSPVRFSTETTFLVDKYEIL

SEQ ID NO: 15424 - protein, 874 aa, Homo sapiens
MLKKFDKKDEESGGGSNPFQHLEKSAVLQEARVFNETPINPRKCAHILTKILYLINQGEHLGTTEATEAFFAMTKLFQSNDPTLRRMCYLTIKEMSCIAEDVIIVTSSLTKDMTGKEDNYRGPAVRALCQITDSTMLQAIERYMKQAIVDKVPSVSSSALVSSLHLLKCSFDVVKRWVNEAQEAASSDNIMVQYHALGLLYHVRKNDRLAVNKMISKVTRHGLKSPFAYCMMIRVASKQLEEEDGSRDSPLFDFIESCLRNKHEMVVYEAASAIVNLPGCSAKELAPAVSVLQLFCSSPKAALRYAAVRTLNKVAMKHPSAVTACNLDLENLVTDSNRSIATLAITTLLKTGSESSIDRLMKQISSFMSEISDEFKVVVVQAISALCQKYPRKHAVLMNFLFTMLREEGGFEYKRAIVDCIISIIEENSESKETGLSHLCEFIEDCEFTVLATRILHLLGQEGPKTTNPSKYIRFIYNRVVLEHEEVRAGAVSALAKFGAQNEEMLPSILVLLKRCVMDDDNEVRDRATFYLNVLEQKQKALNAGYILNGLTVSIPGLERALQQYTLEPSEKPFDLKSVPLATAPMAEQRTESTPITAVKQPEKVAATRQEIFQEQLAAVPEFRGLGPLFKSSPEPVALTESETEYVIRCTKHTFTNHMVFQFDCTNTLNDQTLENVTVQMEPTEAYEVLCYVPARSLPYNQPGTCYTLVALPKEDPTAVACTFSCMMKFTVKDCDPTTGETDDEGYEDEYVLEDLEVTVADHIQKVMKLNFEAAWDEVGDEFEKEETFTLSTIKTLEEAVGNIVKFLGMHPCERSDKVPDNKNTHTLLLAGVFRGGHDILVRSRLLLLDTVTMQVTARSLEELPVDIILASVG

SEQ ID NO: 15425 - protein, 178 aa, Homo sapiens
MSKTGTKITFYEDKNFQGRRYDCDCDCADFHTYLSRCNSIKVEGGTWAVYERPNFAGYMYILPQGEYPEYQRWMGLNDRLSSCRAVHLPSGGQYKIQIFEKGDFSGQMYETTEDCPSIMEQFHMREIHSCKVLEGVWIFYELPNYRGRQYLLDKKEYRKPIDWGAASPAVQSFRRIVE

SEQ ID NO: 15426 - protein, 871 aa, Homo sapiens
MIKKFDKKDEESGSGSNPFQHLEKSAVLQEARIFNETPINPRRCLHILTKILYLLNQGEHFGTTEATEAFFAMTRLFQSNDQTLRRMCYLTIKEMATISEDVIIVTSSLTKDMTGKEDVYRGPAIRALCRITDGTMLQAIERYMKQAIVDKVSSVSSSALVSSLHMMKISYDVVKRWINEAQEAASSDNIMVQYHALGVLYHLRKNDRLAVSKMLNKFTKSGLKSQFAYCMLIRIASRLLKETEDGHESPLFDFIESCLRNKHEMVIYEAASAIIHLPNCTARELAPAVSVLQLFCSSPKPALRYAAVRTLNKVAMKHPSAVTACNLDLENLITDSNRSIATLAITTLLKTGSESSVDRLMKQISSFVSEISDEFKVVVVQAISALCQKYPRKHSVMMTFLSNMLRDDGGFEYKRAIVDCIISIVEENPESKEAGLAHLCEFIEDCEHTVLATKILHLLGKEGPRTPVPSKYIRFIFNRVVLENEAVRAAAVSALAKFGAQNESLLPSILVLLQRCMMDTDDEVRDRATFYLNVLQQRQMALNATYIFNGLTVSVPGMEKALHQYTLEPSEKPFDMKSIPLAMAPVFEQKAEITLVATKPEKLAPSRQDIFQEQLAAIPEFLNIGPLFKSSEPVQLTEAETEYFVRCIKHMFTNHIVFQFDCTNTLNDQLLEKVTVQMEPSDSYEVLSCIPAPSLPYNQPGICYTLVRLPDDDPTAVAGSFSCTMKFTVRDCDPNTGVPDEDGYDDEYVLEDLEVTVSDHIQKVLKPNFAAAWEEVGDTFEKEETFALSSTKTLEEAVNNIITFLGMQPCERSDKVPENKNSHSLYLAGIFRGGYDLLVRSRLALADGVTMQVTVRSKERTPVDVILASVG

SEQ ID NO: 15427 - protein, 726 aa, Homo sapiens
MIKKFDKKDEESGSGSNPFQHLEKSAVLQEARIFNETPINPRRCLHILTKILYLLNQGEHFGTTEATEAFFAMTRLFQSNDQTLRRMCYLTIKEMATISEDVIIVTSSLTKDMTGKEDVYRGPAIRALCRITDGTMLQAIERYMKQAIVDKVSSVSSSALVSSLHMMKISYDVVKRWINEAQEAASSDNIMVQYHALGVLYHLRKNDRLAVSKMLNKFTKSGLKSQFAYCMLIRIASRLLKETEDGHESPLFDFIESCLRNKHEMVIYEAASAIIHLPNCTARELAPAVSVLQLFCSSPKPALRYAAVRTLNKVAMKHPSAVTACNLDLENLITDSNRSIATLAITTLLKTGSESSVDRLMKQISSFVSEISDEFKVVVVQAISALCQKYPRKHSVMMTFLSNMLRDDGGFEYKRAIVDCIISIVEENPESKEAGLAHLCEFIEDCEHTVLATKILHLLGKEGPRTPVPSKYIRFIFNRVVLENEAVRAAAVSALAKFGAQNESLLPSILVLLQRCMMDTDDEVRDRATFYLNVLQQRQMALNATYIFNGLTVSVPGMEKALHQYTLEPSEKPFDMKSIPLAMAPVFEQKAEITLVATKPEKLAPSRQDIFQEQLAAIPEFLNIGPLFKSSEPVQLTEAETEYFVRCIKHMFTNHIVFQFDCTNTLNDQLLEKVTVQMEPSDSYEVLSCIPAPSLPYNQPGICYTLVRLPDDDPTAGTNPQKGGDT

SEQ ID NO: 15428 - protein, 319 aa, Homo sapiens
MASSAAGCVVIVGSGVIGRSWAMLFASGGFQVKLYDIEQQQIRNALENIRKEMKLLEQAGSLKGSLSVEEQLSLISGCPNIQEAVEGAMHIQECVPEDLELKKKIFAQLDSIIDDRVILSSSTSCLMPSKLFAGLVHVKQCIVAHPVNPPYYIPLVELVPHPETAPTTVDRTHALMKKIGQCPMRVQKEVAGFVLNRLQYAIISEAWRLVEEGIVSPSDLDLVMSEGLGMRYAFIGPLETMHLNAEGMLSYCDRYSEGIKHVLQTFGPIPEFSRATAEKVNQDMCMKVPDDPEHLAARRQWRDECLMRLAKLKSQVQPQ

SEQ ID NO: 15429 - protein, 297 aa, Homo sapiens
MLFASGGFQVKLYDIEQQQIRNALENIRKEMKLLEQAGSLKGSLSVEEQLSLISGCPNIQEAVEGAMHIQECVPEDLELKKKIFAQLDSIIDDRVILSSSTSCLMPSKLFAGLVHVKQCIVAHPVNPPYYIPLVELVPHPETAPTTVDRTHALMKKIGQCPMRVQKEVAGFVLNRLQYAIISEAWRLVEEGIVSPSDLDLVMSEGLGMRYAFIGPLETMHLNAEGMLSYCDRYSEGIKHVLQTFGPIPEFSRATAEKVNQDMCMKVPDDPEHLAARRQWRDECLMRLAKLKSQVQPQ

SEQ ID NO: 15430 - protein, 1042 aa, Homo sapiens
MKQSPALAPEERCRRAGSPKPVLRADDNNMGNGCSQKLATANLLRFLLLVLIPCICALVLLLVILLSYVGTLQKVYFKSNGSEPLVTDGEIQGSDVILTNTIYNQSTVVSTAHPDQHVPAWTTDASLPGDQSHRNTSACMNITHSQCQMLPYHATLTPLLSVVRNMEMEKFLKFFTYLHRLSCYQHIMLFGCTLAFPECIIDGDDSHGLLPCRSFCEAAKEGCESVLGMVNYSWPDFLRCSQFRNQTESSNVSRICFSPQQENGKQLLCGRGENFLCASGICIPGKLQCNGYNDCDDWSDEAHCNCSENLFHCHTGKCLNYSLVCDGYDDCGDLSDEQNCDCNPTTEHRCGDGRCIAMEWVCDGDHDCVDKSDEVNCSCHSQGLVECRNGQCIPSTFQCDGDEDCKDGSDEENCSVIQTSCQEGDQRCLYNPCLDSCGGSSLCDPNNSLNNCSQCEPITLELCMNLPYNSTSYPNYFGHRTQKEASISWESSLFPALVQTNCYKYLMFFSCTILVPKCDVNTGEHIPPCRALCEHSKERCESVLGIVGLQWPEDTDCSQFPEENSDNQTCLMPDEYVEECSPSHFKCRSGQCVLASRRCDGQADCDDDSDEENCGCKERDLWECPSNKQCLKHTVICDGFPDCPDYMDEKNCSFCQDDELECANHACVSRDLWCDGEADCSDSSDEWDCVTLSINVNSSSFLMVHRAATEHHVCADGWQEILSQLACKQMGLGEPSVTKLIQEQEKEPRWLTLHSNWESLNGTTLHELLVNGQSCESRSKISLLCTKQDCGRRPAARMNKRILGGRTSRPGRWPWQCSLQSEPSGHICGCVLIAKKWVLTVAHCFEGRENAAVWKVVLGINNLDHPSVFMQTRFVKTIILHPRYSRAVVDYDISIVELSEDISETGYVRPVCLPNPEQWLEPDTYCYITGWGHMGNKMPFKLQEGEVRIISLEHCQSYFDMKTITTRMICAGYESGTVDSCMGDSGGPLVCEKPGGRWTLFGLTSWGSVCFSKVLGPGVYSNVSYFVEWIKRQIYIQTFLLN

SEQ ID NO: 15431 - protein, 1013 aa, Homo sapiens
MGNGCSQKLATANLLRFLLLVLIPCICALVLLLVILLSYVGTLQKVYFKSNGSEPLVTDGEIQGSDVILTNTIYNQSTVVSTAHPDQHVPAWTTDASLPGDQSHRNTSACMNITHSQCQMLPYHATLTPLLSVVRNMEMEKFLKFFTYLHRLSCYQHIMLFGCTLAFPECIIDGDDSHGLLPCRSFCEAAKEGCESVLGMVNYSWPDFLRCSQFRNQTESSNVSRICFSPQQENGKQLLCGRGENFLCASGICIPGKLQCNGYNDCDDWSDEAHCNCSENLFHCHTGKCLNYSLVCDGYDDCGDLSDEQNCDCNPTTEHRCGDGRCIAMEWVCDGDHDCVDKSDEVNCSCHSQGLVECRNGQCIPSTFQCDGDEDCKDGSDEENCSVIQTSCQEGDQRCLYNPCLDSCGGSSLCDPNNSLNNCSQCEPITLELCMNLPYNSTSYPNYFGHRTQKEASISWESSLFPALVQTNCYKYLMFFSCTILVPKCDVNTGEHIPPCRALCEHSKERCESVLGIVGLQWPEDTDCSQFPEENSDNQTCLMPDEYVEECSPSHFKCRSGQCVLASRRCDGQADCDDDSDEENCGCKERDLWECPSNKQCLKHTVICDGFPDCPDYMDEKNCSFCQDDELECANHACVSRDLWCDGEADCSDSSDEWDCVTLSINVNSSSFLMVHRAATEHHVCADGWQEILSQLACKQMGLGEPSVTKLIQEQEKEPRWLTLHSNWESLNGTTLHELLVNGQSCESRSKISLLCTKQDCGRRPAARMNKRILGGRTSRPGRWPWQCSLQSEPSGHICGCVLIAKKWVLTVAHCFEGRENAAVWKVVLGINNLDHPSVFMQTRFVKTIILHPRYSRAVVDYDISIVELSEDISETGYVRPVCLPNPEQWLEPDTYCYITGWGHMGNKMPFKLQEGEVRIISLEHCQSYFDMKTITTRMICAGYESGTVDSCMGDSGGPLVCEKPGGRWTLFGLTSWGSVCFSKVLGPGVYSNVSYFVEWIKRQIYIQTFLLN

SEQ ID NO: 15432 - protein, 543 aa, Homo sapiens
MGTSLSPNDPWPLNPLSIQQTTLLLLLSVLATVHVGQRLLRQRRRQLRSAPPGPFAWPLIGNAAAVGQAAHLSFARLARRYGDVFQIRLGSCPIVVLNGERAIHQALVQQGSAFADRPAFASFRVVSGGRSMAFGHYSEHWKVQRRAAHSMMRNFFTRQPRSRQVLEGHVLSEARELVALLVRGSADGAFLDPRPLTVVAVANVMSAVCFGCRYSHDDPEFRELLSHNEEFGRTVGAGSLVDVMPWLQYFPNPVRTVFREFEQLNRNFSNFILDKFLRHCESLRPGAAPRDMMDAFILSAEKKAAGDSHGGGARLDLENVPATITDIFGASQDTLSTALQWLLLLFTRYPDVQTRVQAELDQVVGRDRLPCMGDQPNLPYVLAFLYEAMRFSSFVPVTIPHATTANTSVLGYHIPKDTVVFVNQWSVNHDPLKWPNPENFDPARFLDKDGLINKDLTSRVMIFSVGKRRCIGEELSKMQLFLFISILAHQCDFRANPNEPAKMNFSYGLTIKPKSFKVNVTLRESMELLDSAVQNLQAKETCQ

SEQ ID NO: 15433 - protein, 443 aa, Homo sapiens
MSDMEDDFMCDDEEDYDLEYSEDSNSEPNVDLENQYYNSKALKEDDPKAALSSFQKVLELEGEKGEWGFKALKQMIKINFKLTNFPEMMNRYKQLLTYIRSAVTRNYSEKSINSILDYISTSKQMDLLQEFYETTLEALKDAKNDRLWFKTNTKLGKLYLEREEYGKLQKILRQLHQSCQTDDGEDDLKKGTQLLEIYALEIQMYTAQKNNKKLKALYEQSLHIKSAIPHPLIMGVIRECGGKMHLREGEFEKAHTDFFEAFKNYDESGSPRRTTCLKYLVLANMLMKSGINPFDSQEAKPYKNDPEILAMTNLVSAYQNNDITEFEKILKTNHSNIMDDPFIREHIEELLRNIRTQVLIKLIKPYTRIHIPFISKELNIDVADVESLLVQCILDNTIHGRIDQVNQLLELDHQKRGGARYTALDKWTNQLNSLNQAVVSKLA

SEQ ID NO: 15434 - protein, 450 aa, Homo sapiens
MSDMEDDFMCDDEEDYDLEYSEDSNSEPNVDLENQYYNSKALKEDDPKAALSSFQKVLELEGEKGEWGFKALKQMIKINFKLTNFPEMMNRYKQLLTYIRSAVTRNYSEKSINSILDYISTSKQNSDFLCQMDLLQEFYETTLEALKDAKNDRLWFKTNTKLGKLYLEREEYGKLQKILRQLHQSCQTDDGEDDLKKGTQLLEIYALEIQMYTAQKNNKKLKALYEQSLHIKSAIPHPLIMGVIRECGGKMHLREGEFEKAHTDFFEAFKNYDESGSPRRTTCLKYLVLANMLMKSGINPFDSQEAKPYKNDPEILAMTNLVSAYQNNDITEFEKILKTNHSNIMDDPFIREHIEELLRNIRTQVLIKLIKPYTRIHIPFISKELNIDVADVESLLVQCILDNTIHGRIDQVNQLLELDHQKRGGARYTALDKWTNQLNSLNQAVVSKLA

SEQ ID NO: 15435 - protein, 72 aa, Homo sapiens
MPLLRGRCPARRHYRRLALLGLQPAPRFAHSGPPRQRPLSAAEMAVGLVVFFTTFLTPAAYVLGNLKQFRRN

SEQ ID NO: 15436 - protein, 472 aa, Homo sapiens
MSRRVVRQSKFRHVFGQAAKADQAYEDIRVSKVTWDSSFCAVNPKFLAIIVEAGGGGAFIVLPLAKTGRVDKNYPLVTGHTAPVLDIDWCPHNDNVIASASDDTTIMVWQIPDYTPMRNITEPIITLEGHSKRVGILSWHPTARNVLLSAGGDNVIIIWNVGTGEVLLSLDDMHPDVIHSVCWNSNGSLLATTCKDKTLRIIDPRKGQVVAEQARPHEGARPLRAVFTADGKLLSTGFSRMSERQLALWDPNNFEEPVALQEMDTSNGVLLPFYDPDSSIVYLCGKGDSSIRYFEITDEPPFVHYLNTFSSKEPQRGMGFMPKRGLDVSKCEIARFYKLHERKCEPIIMTVPRKSDLFQDDLYPDTPGPEPALEADEWLSGQDAEPVLISLRDGYVPPKHRELRVTKRNILDVRPPSGPRRSQSASDAPLSQQHTLETLLEEIKALRERVQAQEQRITALENMLCELVDGTD

SEQ ID NO: 15437 - protein, 286 aa, Homo sapiens
MCRGGGAMCAGEEERCAQGRGLQLWSLEVWGIGFGKARKRKGASGGPEVAREGGAGLVTPPVLGQNNFEEPVALQEMDTSNGVLLPFYDPDSSIVYLCGKGDSSIRYFEITDEPPFVHYLNTFSSKEPQRGMGFMPKRGLDVSKCEIARFYKLHERKCEPIIMTVPRKSDLFQDDLYPDTPGPEPALEADEWLSGQDAEPVLISLRDGYVPPKHRELRVTKRNILDVRPPSGPRRSQSASDAPLSQQHTLETLLEEIKALRERVQAQEQRITALENMLCELVDGTD

SEQ ID NO: 15438 - protein, 285 aa, Homo sapiens
MCRGGGAMCAGEEERCAQGRGLQLWSLEVWGIGFGKARKRKGASGGPEVAREGGAGLVTPPVLGQNNFEEPVALQEMDTSNGVLLPFYDPDSSIVYLCGKGDSSIRYFEITDEPPFVHYLNTFSSKEPQRGMGFMPKRGLDVSKCEIARFYKLHERKCEPIIMTVPRKSDLFQDDLYPDTPGPEPALEADEWLSGQDAEPVLISLRDGYVPPKHRELRVTKRNILDVRPPSGPRRSQSASDAPLSQHTLETLLEEIKALRERVQAQEQRITALENMLCELVDGTD

SEQ ID NO: 15439 - protein, 237 aa, Homo sapiens
MPSPWGWFAVTACGAQRNNFEEPVALQEMDTSNGVLLPFYDPDSSIVYLCGKGDSSIRYFEITDEPPFVHYLNTFSSKEPQRGMGFMPKRGLDVSKCEIARFYKLHERKCEPIIMTVPRKSDLFQDDLYPDTPGPEPALEADEWLSGQDAEPVLISLRDGYVPPKHRELRVTKRNILDVRPPSGPRRSQSASDAPLSQHTLETLLEEIKALRERVQAQEQRITALENMLCELVDGTD

SEQ ID NO: 15440 - protein, 472 aa, Homo sapiens
MSRRVVRQSKFRHVFGQAAKADQAYEDIRVSKVTWDSSFCAVNPKFLAIIVEAGGGGAFIVLPLAKTGRVDKNYPLVTGHTAPVLDIDWCPHNDNVIASASDDTTIMVWQIPDYTPMRNITEPIITLEGHSKRVGILSWHPTARNVLLSAGGDNVIIIWNVGTGEVLLSLDDMHPDVIHSVCWNSNGSLLATTCKDKTLRIIDPRKGQVVAERFAAHEGMRPMRAVFTRQGHIFTTGFTRMSQRELGLWDPNNFEEPVALQEMDTSNGVLLPFYDPDSSIVYLCGKGDSSIRYFEITDEPPFVHYLNTFSSKEPQRGMGFMPKRGLDVSKCEIARFYKLHERKCEPIIMTVPRKSDLFQDDLYPDTPGPEPALEADEWLSGQDAEPVLISLRDGYVPPKHRELRVTKRNILDVRPPSGPRRSQSASDAPLSQQHTLETLLEEIKALRERVQAQEQRITALENMLCELVDGTD

SEQ ID NO: 15441 - protein, 314 aa, Homo sapiens
MSRVPAFLSAAEVEEHLRSSSLLIPPLETALANFSSGPEGGVMQPVRTVVPVTKHRGYLGVMPAYSAAEDALTTKLVTFYEDRGITSVVPSHQATVLLFEPSNGTLLAVMDGNVITAKRTAAVSAIATKFLKPPSSEVLCILGAGVQAYSHYEIFTEQFSFKEVRIWNRTKENAEKFADTVQGEVRVCSSVQEAVAGADVIITVTLATEPILFGEWVKPGAHINAVGASRPDWRELDDELMKEAVLYVDSQEAALKESGDVLLSGAEIFAELGEVIKGVKPAHCEKTTVFKSLGMAVEDTVAAKLIYDSWSSGK

SEQ ID NO: 15442 - protein, 462 aa, Homo sapiens
MLDFAIFAVTFLLALVGAVLYLYPASRQAAGIPGITPTEEKDGNLPDIVNSGSLHEFLVNLHERYGPVVSFWFGRRLVVSLGTVDVLKQHINPNKTSDPFETMLKSLLRYQSGGGSVSENHMRKKLYENGVTDSLKSNFALLLKLSEELLDKWLSYPETQHVPLSQHMLGFAMKSVTQMVMGSTFEDDQEVIRFQKNHGTVWSEIGKGFLDGSLDKNMTRKKQYEDALMQLESVLRNIIKERKGRNFSQHIFIDSLVQGNLNDQQILEDSMIFSLASCIITAKLCTWAICFLTTSEEVQKKLYEEINQVFGNGPVTPEKIEQLRYCQHVLCETVRTAKLTPVSAQLQDIEGKIDRFIIPRETLVLYALGVVLQDPNTWPSPHKFDPDRFDDELVMKTFSSLGFSGTQECPELRFAYMVTTVLLSVLVKRLHLLSVEGQVIETKYELVTSSREEAWITVSKRY

SEQ ID NO: 15443 - protein, 435 aa, Homo sapiens
MLDFAIFAVTFLLALVGAVLYLYPASRQAAGIPGITPTEEKDGNLPDIVNSGSLHEFLVNLHERYGPVVSFWFGRRLVVSLGTVDVLKQHINPNKTSDPFETMLKSLLRYQSGGGSVSENHMRKKLYENGVTDSLKSNFALLLKLSEELLDKWLSYPETQHVPLSQHMLGFAMKSVTQMVMGSTFEDDQEVIRFQKNHGTPSCNWSLFKEHHKRTKRKELQSTYFIDSLVQGNLNDQQILEDSMIFSLASCIITAKLCTWAICFLTTSEEVQKKLYEEINQVFGNGPVTPEKIEQLRYCQHVLCETVRTAKLTPVSAQLQDIEGKIDRFIIPRETLVLYALGVVLQDPNTWPSPHKFDPDRFDDELVMKTFSSLGFSGTQECPELRFAYMVTTVLLSVLVKRLHLLSVEGQVIETKYELVTSSREEAWITVSKRY

SEQ ID NO: 15444 - protein, 925 aa, Homo sapiens
MNRFRVSKFRHTEARPPRRESWISDIRAGTAPSCRNHIKSSCSLIAFNSDRPGVLGIVPLQGQGEDKRRVAHLGCHSDLVTDLDFSPFDDFLLATGSADRTVKLWRLPGPGQALPSAPGVVLGPEDLPVEVLQFHPTSDGILVSAAGTTVKVWDAAKQQPLTELAAHGDLVQSAVWSRDGALVGTACKDKQLRIFDPRTKPRASQSTQAHENSRDSRLAWMGTWEHLVSTGFNQMREREVKLWDTRFFSSALASLTLDTSLGCLVPLLDPDSGLLVLAGKGERQLYCYEVVPQQPALSPVTQCVLESVLRGAALVPRQALAVMSCEVLRVLQLSDTAIVPIGYHVPRKAVEFHEDLFPDTAGCVPATDPHSWWAGDNQQVQKVSLNPACRPHPSFTSCLVPPAEPLPDTAQPAVMETPVGDADASEGFSSPPSSLTSPSTPSSLGPSLSSTSGIGTSPSLRSLQSLLGPSSKFRHAQGTVLHRDSHITNLKGLNLTTPGESDGFCANKLRVAVPLLSSGGQVAVLELRKPGRLPDTALPTLQNGAAVTDLAWDPFDPHRLAVAGEDARIRLWRVPAEGLEEVLTTPETVLTGHTEKICSLRFHPLAANVLASSSYDLTVRIWDLQAGADRLKLQGHQDQIFSLAWSPDGQQLATVCKDGRVRVYRPRSGPEPLQEGPGPKGGRGARIVWVCDGRCLLVSGFDSQSERQLLLYEAEALAGGPLAVLGLDVAPSTLLPSYDPDTGLVLLTGKGDTRVFLYELLPESPFFLECNSFTSPDPHKGLVLLPKTECDVREVELMRCLRLRQSSLEPVAFRLPRVRKEFFQDDVFPDTAVIWEPVLSAEAWLQGANGQPWLLSLQPPDMSPVSQAPREAPARRAPSSAQYLEEKSDQQKKEELLNAMVAKLGNREDPLPQDSFEGVDEDEWD

SEQ ID NO: 15445 - protein, 840 aa, Homo sapiens
MNRFRVSKFRHTEARPPRRESWISDIRAGTAPSCRNHIKSSCSLIAFNSDRPGVLGIVPLQGQGEDKRRVAHLGCHSELAAHGDLVQSAVWSRDGALVGTACKDKQLRIFDPRTKPRASQSTQAHENSRDSRLAWMGTWEHLVSTGFNQMREREVKLWDTRFFSSALASLTLDTSLGCLVPLLDPDSGLLVLAGKGERQLYCYEVVPQQPALSPVTQCVLESVLRGAALVPRQALAVMSCEVLRVLQLSDTAIVPIGYHVPRKAVEFHEDLFPDTAGCVPATDPHSWWAGDNQQVQKVSLNPACRPHPSFTSCLVPPAEPLPDTAQPAVMETPVGDADASEGFSSPPSSLTSPSTPSSLGPSLSSTSGIGTSPSLRSLQSLLGPSSKFRHAQGTVLHRDSHITNLKGLNLTTPGESDGFCANKLRVAVPLLSSGGQVAVLELRKPGRLPDTALPTLQNGAAVTDLAWDPFDPHRLAVAGEDARIRLWRVPAEGLEEVLTTPETVLTGHTEKICSLRFHPLAANVLASSSYDLTVRIWDLQAGADRLKLQGHQDQIFSLAWSPDGQQLATVCKDGRVRVYRPRSGPEPLQEGPGPKGGRGARIVWVCDGRCLLVSGFDSQSERQLLLYEAEALAGGPLAVLGLDVAPSTLLPSYDPDTGLVLLTGKGDTRVFLYELLPESPFFLECNSFTSPDPHKGLVLLPKTECDVREVELMRCLRLRQSSLEPVAFRLPRVRKEFFQDDVFPDTAVIWEPVLSAEAWLQGANGQPWLLSLQPPDMSPVSQAPREAPARRAPSSAQYLEEKSDQQKKEELLNAMVAKLGNREDPLPQDSFEGVDEDEWD

SEQ ID NO: 15446 - protein, 1048 aa, Homo sapiens
MNRFRVSKFRHTEARPPRRESWISDIRAGTAPSCRNHIKSSCSLIAFNSDRPGVLGIVPLQGQGEDKRRVAHLGCHSDLVTDLDFSPFDDFLLATGSADRTVKLWRLPGPGQALPSAPGVVLGPEDLPVEVLQFHPTSDGILVSAAGTTVKVWDAAKQQPLTELAAHGDLVQSAVWSRDGALVGTACKDKQLRIFDPRTKPRASQSTQAHENSRDSRLAWMGTWEHLVSTGFNQMREREVKLWDTRFFSSALASLTLDTSLGCLVPLLDPDSGLLVLAGKGERQLYCYEVVPQQPALSPVTQCVLESVLRGAALVPRQALAVMSCEVLRVLQLSDTAIVPIGYHVPRKAVEFHEDLFPDTAGCVPATDPHSWWAGDNQQVQKVSLNPACRPHPSFTSCLVPPAEPLPDTAQPAVMETPVGDADASEGFSSPPSSLTSPSTPSSLGPSLSSTSGIGTSPSLRSLQSLLGPSSKFRHAQGTVLHRDSHITNLKGLNLTTPGESDGFCANKLRVAVPLLSSGGQVAVLELRKPGRLPDTALPTLQNGAAVTDLAWDPFDPHRLAVAGEDARIRLWRVPAEGLEEVLTTPETVLTGHTEKICSLRFHPLAANVLASSSYDLTVRIWDLQAGADRLKLQGHQDQIFSLAWSPDGQQLATVCKDGRVRVYRPRSGPEPLQEGPGPKGGRGARIVWVCDGRCLLVSGFDSQSERQLLLYEAEALAGGPLAVLGLDVAPSTLLPSYDPDTGLVLLTGKGDTRVFLYELLPESPFFLECNSFTSPDPHKGLVLLPKTECDVREVELMRCLRLRQSSLEPVAFRLPRVRKEFFQDDVFPDTAVIWEPVLSAEAWLQGANGQPWLLSLQPPDMSPVSQAPREAPARRAPSSAQYLEEKSDQQKKEELLNAMVAKLGNREDPLPQDSFEGVDEDEWAKYLAQIIVMGVQVVGRAFARALRQEFAASRAAADARGRAGHRSAAASNLSGLSLQEAQQILNVSKLSPEEVQKNYEHLFKVNDKSVGGSFYLQSKVVRAKERLDEELKIQAQEDREKGQMPHT

SEQ ID NO: 15447 - protein, 907 aa, Homo sapiens
MNRFRVSKFRHTEARPPRRESWISDIRAGTAPSCRNHIKSSCSLIAFNSDRPGVLGIVPLQGQGEDKRRVAHLGCHSGSADRTVKLWRLPGPGQALPSAPGVVLGPEDLPVEVLQFHPTSDGILVSAAGTTVKVWDAAKQQPLTELAAHGDLVQSAVWSRDGALVGTACKDKQLRIFDPRTKPRASQSTQAHENSRDSRLAWMGTWEHLVSTGFNQMREREVKLWDTRFFSSALASLTLDTSLGCLVPLLDPDSGLLVLAGKGERQLYCYEVVPQQPALSPVTQCVLESVLRGAALVPRQALAVMSCEVLRVLQLSDTAIVPIGYHVPRKAVEFHEDLFPDTAGCVPATDPHSWWAGDNQQVQKVSLNPACRPHPSFTSCLVPPAEPLPDTAQPAVMETPVGDADASEGFSSPPSSLTSPSTPSSLGPSLSSTSGIGTSPSLRSLQSLLGPSSKFRHAQGTVLHRDSHITNLKGLNLTTPGESDGFCANKLRVAVPLLSSGGQVAVLELRKPGRLPDTALPTLQNGAAVTDLAWDPFDPHRLAVAGEDARIRLWRVPAEGLEEVLTTPETVLTGHTEKICSLRFHPLAANVLASSSYDLTVRIWDLQAGADRLKLQGHQDQIFSLAWSPDGQQLATVCKDGRVRVYRPRSGPEPLQEGPGPKGGRGARIVWVCDGRCLLVSGFDSQSERQLLLYEAEALAGGPLAVLGLDVAPSTLLPSYDPDTGLVLLTGKGDTRVFLYELLPESPFFLECNSFTSPDPHKGLVLLPKTECDVREVELMRCLRLRQSSLEPVAFRLPRVRKEFFQDDVFPDTAVIWEPVLSAEAWLQGANGQPWLLSLQPPDMSPVSQAPREAPARRAPSSAQYLEEKSDQQKKEELLNAMVAKLGNREDPLPQDSFEGVDEDEWD

SEQ ID NO: 15448 - protein, 401 aa, Homo sapiens
MEPGRRGAAALLALLCVACALRAGRAQYERYSFRSFPRDELMPLESAYRHALDKYSGEHWAESVGYLEISLRLHRLLRDSEAFCHRNCSAAPQPEPAAGLASYPELRLFGGLLRRAHCLKRCKQGLPAFRQSQPSREVLADFQRREPYKFLQFAYFKANNLPKAIAAAHTFLLKHPDDEMMKRNMAYYKSLPGAEDYIKDLETKSYESLFIRAVRAYNGENWRTSITDMELALPDFFKAFYECLAACEGSREIKDFKDFYLSIADHYVEVLECKIQCEENLTPVIGGYPVEKFVATMYHYLQFAYYKLNDLKNAAPCAVSYLLFDQNDKVMQQNLVYYQYHRDTWGLSDEHFQPRPEAVQFFNVTTLQKELYDFAKENIMDDDEGEVVEYVDDLLELEETS

SEQ ID NO: 15449 - protein, 199 aa, Homo sapiens
MRFRFCGDLDCPDWVLAEISTLAKMSSVKLRLLCSQVLKELLGQGIDYEKILKLTADAKFESGDVKATVAVLSFILSSAAKHSVDGESLSSELQQLGLPKEHAASLCRCYEEKQSPLQKHLRVCSLRMNRLAGVGWRVDYTLSSSLLQSVEEPMVHLRLEVAAAPGTPAQPVAMSLSADKFQVLLAELKQAQTLMSSLG

SEQ ID NO: 15450 - protein, 140 aa, Homo sapiens
MRFRFCGDLDCPDWVLAEISTLAKMSSVKLRLLCSQVLKELLGQGIDYEKILKLTADAKFESGDVKATVAVLSFILSSAAKHSVDGESLSSELQQLGLPKEHAASLCRCYEEKQSPLQKHLRVCSLRKLKQAQTLMSSLG

SEQ ID NO: 15451 - protein, 113 aa, Homo sapiens
MRFRFCGDLDCPDWVLAEISTLAKMSSVKLRLLCSQVLKELLGQGIDYEKILKLTADAKFESGDVKATVAVLSFILSSAAKHSVDGESLSSELQQLGLPKELKQAQTLMSSLG

SEQ ID NO: 15452 - protein, 358 aa, Homo sapiens
MATEQWFEGSLPLDPGETPPPDALEPGTPPCGDPSRSTPPGRPGNPSEPDPEDAEGRLAEARASTSSPKPLVPRPGPAPPRLSLDTLFSPITQQLRYLLKKADDFQSYLLYSRDQVQKEQLAKAMPTFLQMCEPYFLYLEAAARSIPPIYGPLQELVRKGLLEISQQLTLRLEQLVLMYASFGFVDLEEMNPLSISCFFCGRFSISLSHEVSIFRYCAPTAYTASRFPRYLYKKMRWHLEATPEAPGRGQDSLVDYYFLCYRDTWEDTGQSPANSCPQIQKLWSIGRWVPLGPAEDDLYSWILCPQPLGDYQQLLTIGFEEPTPTLATDLLVQILTGQAGQARPPSAAGPAGWAAQGS

SEQ ID NO: 15453 - protein, 1190 aa, Homo sapiens
MKTRQNKDSMSMRSGRKKEAPGPREELRSRGRASPGGVSTSSSDGKAEKSRQTAKKARVEEASTPKVNKQGRSEEISESESEETNAPKKTKTEQELPRPQSPSDLDSLDGRSLNDDGSSDPRDIDQDNRSTSPSIYSPGSVENDSDSSSGLSQGPARPYHPPPLFPPSPQPPDSTPRQPEASFEPHPSVTPTGYHAPMEPPTSRMFQAPPGAPPPHPQLYPGGTGGVLSGPPMGPKGGGAASSVGGPNGGKQHPPPTTPISVSSSGASGAPPTKPPTTPVGGGNLPSAPPPANFPHVTPNLPPPPALRPLNNASASPPGLGAQPLPGHLPSPHAMGQGMGGLPPGPEKGPTLAPSPHSLPPASSSAPAPPMRFPYSSSSSSSAAASSSSSSSSSSASPFPASQALPSYPHSFPPPTSLSVSNQPPKYTQPSLPSQAVWSQGPPPPPPYGRLLANSNAHPGPFPPSTGAQSTAHPPVSTHHHHHQQQQQQQQQQQQQQQQQQQHHGNSGPPPPGAFPHPLEGGSSHHAHPYAMSPSLGSLRPYPPGPAHLPPPHSQVSYSQAGPNGPPVSSSSNSSSSTSQGSYPCSHPSPSQGPQGAPYPFPPVPTVTTSSATLSTVIATVASSPAGYKTASPPGPPPYGKRAPSPGAYKTATPPGYKPGSPPSFRTGTPPGYRGTSPPAGPGTFKPGSPTVGPGPLPPAGPSGLPSLPPPPAAPASGPPLSATQIKQEPAEEYETPESPVPPARSPSPPPKVVDVPSHASQSARFNKHLDRGFNSCARSDLYFVPLEGSKLAKKRADLVEKVRREAEQRAREEKEREREREREKEREREKERELERSVKLAQEGRAPVECPSLGPVPHRPPFEPGSAVATVPPYLGPDTPALRTLSEYARPHVMSPGNRNHPFYVPLGAVDPGLLGYNVPALYSSDPAAREREREARERDLRDRLKPGFEVKPSELEPLHGVPGPGLDPFPRHGGLALQPGPPGLHPFPFHPSLGPLERERLALAAGPALRPDMSYAERLAAERQHAERVAALGNDPLARLQMLNVTPHHHQHSHIHSHLHLHQQDAIHAASASVHPLIDPLASGSHLTRIPYPAGTLPNPLLPHPLHENEVLRHQLFAAPYRDLPASLSAPMSAAHQLQAMHAQSAELQRLALEQQQWLHAHHPLHSVPLPAQEDYYSHLKKESDKPL

SEQ ID NO: 15454 - protein, 198 aa, Homo sapiens
MQPEVEPVCFPAMGSPTMHRKAGALLMDLETPEEMQARSLGRPIKSSKQYLRQVIAEYEALDRELPCIRKFPTPPASQPLCLCMETLPEEDFTHLEVLQALEAQLPGAMESGRVSSIRFENMNVICGTAGRRNRWLIAVTDFQTRSRLLRSGLSPRGLAHQIVRHDDLLLGDYRLHLRRSLVRRRMLEALGAEPNEEA

SEQ ID NO: 15455 - protein, 839 aa, Homo sapiens
MAQFDTEYQRLEASYSDSPPGEEDLLVHVAEGSKSPWHHIENLDLFFSRVYNLHQKNGFTCMLIGEIFELMQFLFVVAFTTFLVSCVDYDILFANKMVNHSLHPTEPVKVTLPDAFLPAQVCSARIQENGSLITILVIAGVFWIHRLIKFIYNICCYWEIHSFYLHALRIPMSALPYCTWQEVQARIVQTQKEHQICIHKRELTELDIYHRILRFQNYMVALVNKSLLPLRFRLPGLGEAVFFTRGLKYNFELILFWGPGSLFLNEWSLKAEYKRGGQRLELAQRLSNRILWIGIANFLLCPLILIWQILYAFFSYAEVLKREPGALGARCWSLYGRCYLRHFNELEHELQSRLNRGYKPASKYMNCFLSPLLTLLAKNGAFFAGSILAVLIALTIYDEDVLAVEHVLTTVTLLGVTVTVCRSFIPDQHMVFCPEQLLRVILAHIHYMPDHWQGNAHRSQTRDEFAQLFQYKAVFILEELLSPIVTPLILIFCLRPRALEIIDFFRNFTVEVVGVGDTCSFAQMDVRQHGHPQWLSAGQTEASVYQQAEDGKTELSLMHFAITNPGWQPPRESTAFLGFLKEQVQRDGAAASLAQGGLLPENALFTSIQSLQSESEPLSLIANVVAGSSCRGPPLPRDLQGSRHRAEVASALRSFSPLQPGQAPTGRAHSTMTGSGVDARTASSGSSVWEGQLQSLVLSEYASTEMSLHALYMHQLHKQQAQAEPERHVWHRRESDESGESAPDEGGEGARAPQSIPRSASYPCAAPRPGAPETTALHGGFQRRYGGITDPGTVPRVPSHFSRLPLGGWAEDGQSASRHPEPVPEEGSEDELPPQVHKV

SEQ ID NO: 15456 - protein, 778 aa, Homo sapiens
MLIGEIFELMQFLFVVAFTTFLVSCVDYDILFANKMVNHSLHPTEPVKVTLPDAFLPAQVCSARIQENGSLITILVIAGVFWIHRLIKFIYNICCYWEIHSFYLHALRIPMSALPYCTWQEVQARIVQTQKEHQICIHKRELTELDIYHRILRFQNYMVALVNKSLLPLRFRLPGLGEAVFFTRGLKYNFELILFWGPGSLFLNEWSLKAEYKRGGQRLELAQRLSNRILWIGIANFLLCPLILIWQILYAFFSYAEVLKREPGALGARCWSLYGRCYLRHFNELEHELQSRLNRGYKPASKYMNCFLSPLLTLLAKNGAFFAGSILAVLIALTIYDEDVLAVEHVLTTVTLLGVTVTVCRSFIPDQHMVFCPEQLLRVILAHIHYMPDHWQGNAHRSQTRDEFAQLFQYKAVFILEELLSPIVTPLILIFCLRPRALEIIDFFRNFTVEVVGVGDTCSFAQMDVRQHGHPQWLSAGQTEASVYQQAEDGKTELSLMHFAITNPGWQPPRESTAFLGFLKEQVQRDGAAASLAQGGLLPENALFTSIQSLQSESEPLSLIANVVAGSSCRGPPLPRDLQGSRHRAEVASALRSFSPLQPGQAPTGRAHSTMTGSGVDARTASSGSSVWEGQLQSLVLSEYASTEMSLHALYMHQLHKQQAQAEPERHVWHRRESDESGESAPDEGGEGARAPQSIPRSASYPCAAPRPGAPETTALHGGFQRRYGGITDPGTVPRVPSHFSRLPLGGWAEDGQSASRHPEPVPEEGSEDELPPQVHKV

SEQ ID NO: 15457 - protein, 528 aa, Homo sapiens
MAQFDTEYQRLEASYSDSPPGEEDLLVHVAEGSKSPWHHIENLDLFFSRVYNLHQKNGFTCMLIGEIFELMQFLFVVAFTTFLVSCVDYDILFANKMVNHSLHPTEPVKVTLPDAFLPAQVCSARIQENGSLITILVIAGVFWIHRLIKFIYNICCYWEIHSFYLHALRIPMSALPYCTWQEVQARIVQTQKEHQICIHKRELTELDIYHRILRFQNYMVALVNKSLLPLRFRLPGLGEAVFFTRGLKYNFELILFWGPGSLFLNEWSLKAEYKRGGQRLELAQRLSNRILWIGIANFLLCPLILIWQILYAFFSYAEVLKREPGALGARCWSLYGRCYLRHFNELEHELQSRLNRGYKPASKYMNCFLSPLLTLLAKNGAFFAGSILAVLIALTIYDEDVLAVEHVLTTVTLLGVTVTVCRSFIPDQHMVFCPEQLLRVILAHIHYMPDHWQGVHFGRVAEPHCHTPHPHLLPAPTGPGDYRLLPKLHRGGRWCGRYLLLCSDGCSPAWSSPVAICWADRGLSVPAS

SEQ ID NO: 15458 - protein, 634 aa, Homo sapiens
MATSNNPRKFSEKIALHNQKQAEETAAFEEVMKDLSLTRAARLQLQKSQYLQLGPSRGQYYGGSLPNVNQIGSGTMDLPFQTPFQSSGLDTSRTTRHHGLVDRVYRERGRLGSPHRRPLSVDKHGRQADSCPYGTMYLSPPADTSWRRTNSDSALHQSTMTPTQPESFSSGSQDVHQKRVLLLTVPGMEETTSEADKNLSKQAWDTKKTGSRPKSCEVPGINIFPSADQENTTALIPATHNTGGSLPDLTNIHFPSPLPTPLDPEEPTFPALSSSSSTGNLAANLTHLGIGGAGQGMSTPGSSPQHRPAGVSPLSLSTEARRQQASPTLSPLSPITQAVAMDALSLEQQLPYAFFTQAGSQQPPPQPQPPPPPPPASQQPPPPPPPQAPVRLPPGGPLLPSASLTRGPQPPPLAVTVPSSLPQSPPENPGQPSMGIDIASAPALQQYRTSAGSPANQSPTSPVSNQGFSPGSSPQHTSTLGSVFGDAYYEQQMAARQANALSHQLEQFNMMENAISSSSLYSPGSTLNYSQAAMMGLTGSHGSLPDSQQLGYASHSGIPNIILTVTGESPPSLSKELTSSLAGVGDVSFDSDSQFPLDELKIDPLTLDGLHMLNDPDMVLADPATEDTFRMDRL

SEQ ID NO: 15459 - protein, 650 aa, Homo sapiens
MATSNNPRKFSEKIALHNQKQAEETAAFEEVMKDLSLTRAARLQLQKSQYLQLGPSRGQYYGGSLPNVNQIGSGTMDLPFQPSGFLGEALAAAPVSLTPFQSSGLDTSRTTRHHGLVDRVYRERGRLGSPHRRPLSVDKHGRQADSCPYGTMYLSPPADTSWRRTNSDSALHQSTMTPTQPESFSSGSQDVHQKRVLLLTVPGMEETTSEADKNLSKQAWDTKKTGSRPKSCEVPGINIFPSADQENTTALIPATHNTGGSLPDLTNIHFPSPLPTPLDPEEPTFPALSSSSSTGNLAANLTHLGIGGAGQGMSTPGSSPQHRPAGVSPLSLSTEARRQQASPTLSPLSPITQAVAMDALSLEQQLPYAFFTQAGSQQPPPQPQPPPPPPPASQQPPPPPPPQAPVRLPPGGPLLPSASLTRGPQPPPLAVTVPSSLPQSPPENPGQPSMGIDIASAPALQQYRTSAGSPANQSPTSPVSNQGFSPGSSPQHTSTLGSVFGDAYYEQQMAARQANALSHQLEQFNMMENAISSSSLYSPGSTLNYSQAAMMGLTGSHGSLPDSQQLGYASHSGIPNIILTVTGESPPSLSKELTSSLAGVGDVSFDSDSQFPLDELKIDPLTLDGLHMLNDPDMVLADPATEDTFRMDRL

SEQ ID NO: 15460 - protein, 593 aa, Homo sapiens
MATSNNPRKFSEKIALHNQKQAEETAAFEEVMKDLSLTRAARLQLQKSQYLQLGPSRGQYYGGSLPNVNQIGSGTMDLPFQTPFQSSGLDTSRTTRHHGLVDRVYRERGRLGSPHRRPLSVDKHGRQADSCPYGTMYLSPPADTSWRRTNSDSALHQSTMTPTQPESFSSGSQDVHQKRVLLLTVPGMEETTSEADKNLSKQAWDTKKTGSRPKSCEVPGINIFPSADQENTTALIPATHNTGGSLPDLTNIHFPSPLPTPLDPEEPTFPALSSSSSTGNLAANLTHLGIGGAGQGMSTPGSSPQHRPAGVSPLSLSTEARRQQASPTLSPLSPITQAVAMDALSLEQQLPYAFFTQAGSQQPPPQPQPPPPPPPASQQPPPPPPPQAPVRLPPGGPLLPSASLTRGPQPPPLAVTVPSSLPQSPPENPGQPSMGIDIASAPALQQYRTSAGSPANQSPTSPVSNQGFSPGSSPQLEQFNMMENAISSSSLYSPGSTLNYSQAAMMGLTGSHGSLPDSQQLGYASHSGIPNIILTVTGESPPSLSKELTSHRGHLPDGPPVSGHAGTLPLSRPDGASPARGRPCSVPRQRPSL

SEQ ID NO: 15461 - protein, 369 aa, Homo sapiens
MWSGRKLGSSGGWFLRVLGPGGCNTKAARPLISSAVYVKNQLSGTLQIKPGVFNEYRTIWFKSYRTIFSCLNRIKSFRYPWARLYSTSQTTVDSGEVKTFLALAHKWWDEQGVYAPLHSMNDLRVPFIRDNLLKTIPNHQPGKPLLGMKILDVGCGGGLLTEPLGRLGASVIGIDPVDENIKTAQCHKSFDPVLDKRIEYRVCSLEEIVEETAETFDAVVASEVVEHVIDLETFLQCCCQVLKPGGSLFITTINKTQLSYALGIVFSEQIASIVPKGTHTWEKFVSPETLESILESNGLSVQTVVGMLYNPFSGYWHWSENTSLNYAAYAVKSRVQEHPASAEFVLKGETEELQANACTNPAVHEKLKK

SEQ ID NO: 15462 - protein, 494 aa, Homo sapiens
MLASGMLLVALLVCLTVMVLMSVWQQRKSKGKLPPGPTPLPFIGNYLQLNTEQMYNSLMKISERYGPVFTIHLGPRRVVVLCGHDAVREALVDQAEEFSGRGEQATFDWVFKGYGVVFSNGERAKQLRRFSIATLRDFGVGKRGIEERIQEEAGFLIDALRGTGGANIDPTFFLSRTVSNVISSIVFGDRFDYKDKEFLSLLRMMLGIFQFTSTSTGQLYEMFSSVMKHLPGPQQQAFQLLQGLEDFIAKKVEHNQRTLDPNSPRDFIDSFLIRMQEEEKNPNTEFYLKNLVMTTLNLFIGGTETVSTTLRYGFLLLMKHPEVEAKVHEEIDRVIGKNRQPKFEDRAKMPYMEAVIHEIQRFGDVIPMSLARRVKKDTKFRDFFLPKGTEVYPMLGSVLRDPSFFSNPQDFNPQHFLNEKGQFKKSDAFVPFSIGKRNCFGEGLARMELFLFFTTVMQNFRLKSSQSPKDIDVSPKHVGFATIPRNYTMSFLPR

SEQ ID NO: 15463 - protein, 327 aa, Homo sapiens
MAAAAAAAAATNGTGGSSGMEVDAAVVPSVMACGVTGSVSVALHPLVILNISDHWIRMRSQEGRPVQVIGALIGKQEGRNIEVMNSFELLSHTVEEKIIIDKEYYYTKEEQFKQVFKELEFLGWYTTGGPPDPSDIHVHKQVCEIIESPLFLKLNPMTKHTDLPVSVFESVIDIINGEATMLFAELTYTLATEEAERIGVDHVARMTATGSGENSTVAEHLIAQHSAIKMLHSRVKLILEYVKASEAGEVPFNHEILREAYALCHCLPVLSTDKFKTDFYDQCNDVGLMAYLGTITKTCNTMNQFVNKFNVLYDRQGIGRRMRGLFF

SEQ ID NO: 15464 - protein, 142 aa, Homo sapiens
MATKIDKEACRAAYNLVRDDGSAVIWVTFKYDGSTIVPGEQGAEYQHFIQQCTDDVRLFAFVRFTTGDAMSKRSKFALITWIGENVSGLQRAKTGTDKTLVKEVVQNFAKEFVISDRKELEEDFIKSELKKAGGANYDAQTE

SEQ ID NO: 15465 - protein, 217 aa, Homo sapiens
MAPGSRTSLLLAFALLCLPWLQEAGAVQTVPLSRLFDHAMLQAHRAHQLAIDTYQEFEETYIPKDQKYSFLHDSQTSFCFSDSIPTPSNMEETQQKSNLELLRISLLLIESWLEPVRFLRSMFANNLVYDTSDSDDYHLLKDLEEGIQTLMGRLEDGSRRTGQILKQTYSKFDTNSHNHDALLKNYGLLYCFRKDMDKVETFLRMVQCRSVEGSCGF

SEQ ID NO: 15466 - protein, 275 aa, Homo sapiens
MSAEVKVTGQNQEQFLLLAKSAKGAALATLIHQVLEAPGVYVFGELLDMPNVRELAESDFASTFRLLTVFAYGTYADYLAEARNLPPLTEAQKNKLRHLSVVTLAAKVKCIPYAVLLEALALRNVRQLEDLVIEAVYADVLRGSLDQRNQRLEVDYSIGRDIQRQDLSAIARTLQEWCVGCEVVLSGIEEQVSRANQHKEQQLGLKQQIESEVANLKKTIKVTTAAAAAATSQDPEQHLTELREPAPGTNQRQPSKKASKGKGLRGSAKIWSKSN

SEQ ID NO: 15467 - protein, 217 aa, Homo sapiens
MAAGSRTSLLLAFALLCLPWLQEAGAVQTVPLSRLFDHAMLQAHRAHQLAIDTYQEFEETYIPKDQKYSFLHDSQTSFCFSDSIPTPSNMEETQQKSNLELLRISLLLIESWLEPVRFLRSMFANNLVYDTSDSDDYHLLKDLEEGIQTLMGRLEDGSRRTGQILKQTYSKFDTNSHNHDALLKNYGLLYCFRKDMDKVETFLRMVQCRSVEGSCGF

SEQ ID NO: 15468 - protein, 167 aa, Homo sapiens
MAAGSRTSLLLAFALLCLPWLQEAGAVQTVPLSRLFDHAMLQAHRAHQLAIDTYQEFEETYIPKDQKYSFLHDSQTSFCFSDSIPTPSNMEETQQKSNLELLRISLLLIESWLEPVRFLRSMFANNLVYDTSDSDDYHLLKDLEEGIQTLMGVRVAPGVANPGTPLA

SEQ ID NO: 15469 - protein, 122 aa, Homo sapiens
MAAGSRTSLLLAFALLCLPWLQEAGAVQTVPLSRLFDHAMLQAHRAHQLAIDTYQEFRLEDGSRRTGQILKQTYSKFDTNSHNHDALLKNYGLLYCFRKDMDKVETFLRMVQCRSVEGSCGF

SEQ ID NO: 15470 - protein, 264 aa, Homo sapiens
MAGEQKPSSNLLEQFILLAKGTSGSALTALISQVLEAPGVYVFGELLELANVQELAEGANAAYLQLLNLFAYGTYPDYIANKESLPELSTAQQNKLKHLTIVSLASRMKCIPYSVLLKDLEMRNLRELEDLIIEAVYTDIIQGKLDQRNQLLEVDFCIGRDIRKKDINNIVKTLHEWCDGCEAVLLGIEQQVLRANQYKENHNRTQQQVEAEVTNIKKTLKATASSSAQEMEQQLAERECPPHAEQRQPTKKMSKVKGLVSSRH

SEQ ID NO: 15471 - protein, 157 aa, Homo sapiens
MKCIPYSVLLKDLEMRNLRELEDLIIEAVYTDIIQGKLDQRNQLLEVDFCIGRDIRKKDINNIVKTLHEWCDGCEAVLLGIEQQVLRANQYKENHNRTQQQVEAEVTNIKKTLKATASSSAQEMEQQLAERECPPHAEQRQPTKKMSKVKGLVSSRH

SEQ ID NO: 15472 - protein, 273 aa, Homo sapiens
MAGEQKPSSNLLEQFILLAKGTSGSALTALISQVLEAPGVYVFGELLELANVQELAEGANAAYLQLLNLFAYGTYPDYIANKESLPELSTAQQNKLKHLTIVSLASRMKCIPYSVLLKDLEMRNLRELEDLIIEAVYTDIIQGKLDQRNQLLEVDFCIGRDIRKKDINNIVKTLHEWCDGCEAVLLGIEQQVLRANQYKENHNRTQQQVEAEREKRDVPLLNLITTAFFWLPTSRRHSKPPHPPRLRRWSSSWLNGSVPLTLSRGSPPRRCPK

SEQ ID NO: 15473 - protein, 734 aa, Homo sapiens
MVPLAYYGQHFVPLDYFYQLSSANTLTHQHTGEKLNQFNNQPMAKVQSHSNHFAVPPLGSNKKVQRCSVLPSPKSQDKISQSFCDRFLNSPLFHAKHQNTPSIGLHWRSSLWPAQRALNSHLLHSKAQTTSSSDLNMTSSLELNQAALSLQLPFCKPQTTSSSLDVCWRSLSLKSHQRVSSSSLFRLQNQEIPSINIIWTSSSLGPKRKALSSTLLQSKPQKTSSLDYLWTSSLQRNQRSLSSPSLNTKLQTSDLFWTSPSFKPNQIALTSPLLDSRLQKTPILNSNPTIGGLPVSHSKARQSASSYFVHPSENLPLFQLNSQSMFMLDCNFQTTNSPVCHSKFQNTTSPNGKHRVTHLPSPHPKTNISGQLLSSSKHCTRNTAASTLGFRLQSKSSFQFSPKTESNKEIPWTLKYSQPCIVKGGTVPDDVVNKIVNSISNTRIQRDLCRQILFRRMRGRPNPHPGPRLSSNYVVCLACASCLKSPCNHLRGKKNPHCATLSVIPTPEANSEGKIEVKLVLILSLPETFSSCLPFPMKENQPNEVPEDNLEGVEKIQQFFPTSERDIQGLNMKQIWWAVAPENKVIGQQPQAIDWLFYVKKNNSQPQSLLPSTSSSTSSSSTTSSSSSVASASSDSSSSSSSSSSFSISSSSSPSKEFMTLTLSRPVFRKVLSYHRLPAGVSWLEFIYSKDYQLHPRKPNRSQSSSLKTKPVRNNNTVKWRKGANTLFKFFRTK

SEQ ID NO: 15474 - protein, 757 aa, Homo sapiens
MVPDTACVLLLTLAALGASGQGQSPLGSDLGPQMLRELQETNAALQDVRELLRQQVREITFLKNTVMECDACGMQQSVRTGLPSVRPLLHCAPGFCFPGVACIQTESGARCGPCPAGFTGNGSHCTDVNECNAHPCFPRVRCINTSPGFRCEACPPGYSGPTHQGVGLAFAKANKQVCTDINECETGQHNCVPNSVCINTRGSFQCGPCQPGFVGDQASGCQRRAQRFCPDGSPSECHEHADCVLERDGSRSCVCAVGWAGNGILCGRDTDLDGFPDEKLRCPERQCRKDNCVTVPNSGQEDVDRDGIGDACDPDADGDGVPNEKDNCPLVRNPDQRNTDEDKWGDACDNCRSQKNDDQKDTDQDGRGDACDDDIDGDRIRNQADNCPRVPNSDQKDSDGDGIGDACDNCPQKSNPDQADVDHDFVGDACDSDQDQDGDGHQDSRDNCPTVPNSAQEDSDHDGQGDACDDDDDNDGVPDSRDNCRLVPNPGQEDADRDGVGDVCQDDFDADKVVDKIDVCPENAEVTLTDFRAFQTVVLDPEGDAQIDPNWVVLNQGREIVQTMNSDPGLAVGYTAFNGVDFEGTFHVNTVTDDDYAGFIFGYQDSSSFYVVMWKQMEQTYWQANPFRAVAEPGIQLKAVKSSTGPGEQLRNALWHTGDTESQVRLLWKDPRNVGWKDKKSYRWFLQHRPQVGYIRVRFYEGPELVADSNVVLDTTMRGGRLGVFCFSQENIIWANLRYRCNDTIPEDYETHQLRQA

SEQ ID NO: 15475 - protein, 704 aa, Homo sapiens
MVPDTACVLLLTLAALGASGQGQSPLGSDLGPQMLRELQETNAALQDVRELLRQQVREITFLKNTVMECDACGMQQSVRTGLPSVRPLLHCAPGFCFPGVACIQTESGARCGPCPAGFTGNGSHCTDVNECETGQHNCVPNSVCINTRGSFQCGPCQPGFVGDQASGCQRRAQRFCPDGSPSECHEHADCVLERDGSRSCVCAVGWAGNGILCGRDTDLDGFPDEKLRCPERQCRKDNCVTVPNSGQEDVDRDGIGDACDPDADGDGVPNEKDNCPLVRNPDQRNTDEDKWGDACDNCRSQKNDDQKDTDQDGRGDACDDDIDGDRIRNQADNCPRVPNSDQKDSDGDGIGDACDNCPQKSNPDQADVDHDFVGDACDSDQDQDGDGHQDSRDNCPTVPNSAQEDSDHDGQGDACDDDDDNDGVPDSRDNCRLVPNPGQEDADRDGVGDVCQDDFDADKVVDKIDVCPENAEVTLTDFRAFQTVVLDPEGDAQIDPNWVVLNQGREIVQTMNSDPGLAVGYTAFNGVDFEGTFHVNTVTDDDYAGFIFGYQDSSSFYVVMWKQMEQTYWQANPFRAVAEPGIQLKAVKSSTGPGEQLRNALWHTGDTESQVRLLWKDPRNVGWKDKKSYRWFLQHRPQVGYIRVRFYEGPELVADSNVVLDTTMRGGRLGVFCFSQENIIWANLRYRCNDTIPEDYETHQLRQA

SEQ ID NO: 15476 - protein, 209 aa, Homo sapiens
MPVAVMAESAFSFKKLLDQCENQELEAPGGIATPPVYGQLLALYLLHNDMNNARYLWKRIPPAIKSANSELGGIWSVGQRIWQRDFPGIYTTINAHQWSETVQPIMEALRDATRRRAFALVSQAYTSIIADDFAAFVGLPVEEAVKGILEQGWQADSTTRMVLPRKPVAGALDVSFNKFIPLSEPAPVPPIPNEQQLARLTDYVAFLEN

SEQ ID NO: 15477 - protein, 160 aa, Homo sapiens
MNNARYLWKRIPPAIKSANSELGGIWSVGQRIWQRDFPGIYTTINAHQWSETVQPIMEALRDATRRRAFALVSQAYTSIIADDFAAFVGLPVEEAVKGILEQGWQADSTTRMVLPRKPVAGALDVSFNKFIPLSEPAPVPPIPNEQQLARLTDYVAFLEN

SEQ ID NO: 15478 - protein, 391 aa, Homo sapiens
MSGPVPSRARVYTDVNTHRPREYWDYESHVVEWGNQDDYQLVRKLGRGKYSEVFEAINITNNEKVVVKILKPVKKKKIKREIKILENLRGGPNIITLADIVKDPVSRTPALVFEHVNNTDFKQLYQTLTDYDIRFYMYEILKALDYCHSMGIMHRDVKPHNVMIDHEHRKLRLIDWGLAEFYHPGQEYNVRVASRYFKGPELLVDYQMYDYSLDMWSLGCMLASMIFRKEPFFHGHDNYDQLVRIAKVLGTEDLYDYIDKYNIELDPRFNDILGRHSRKRWERFVHSENQHLVSPEALDFLDKLLRYDHQSRLTAREAMEHPYFYTVVKDQARMGSSSMPGGSTPVSSANMMSGISSVPTPSPLGPLAGSPVIAAANPLGMPVPAAAGAQQ

SEQ ID NO: 15479 - protein, 255 aa, Homo sapiens
MYEILKALDYCHSMGIMHRDVKPHNVMIDHEHRKLRLIDWGLAEFYHPGQEYNVRVASRYFKGPELLVDYQMYDYSLDMWSLGCMLASMIFRKEPFFHGHDNYDQLVRIAKVLGTEDLYDYIDKYNIELDPRFNDILGRHSRKRWERFVHSENQHLVSPEALDFLDKLLRYDHQSRLTAREAMEHPYFYTVVKDQARMGSSSMPGGSTPVSSANMMSGISSVPTPSPLGPLAGSPVIAAANPLGMPVPAAAGAQQ

SEQ ID NO: 15480 - protein, 1285 aa, Homo sapiens
MALARPGTPDPQALASVLLLLLWAPALSLLAGTVPSEPPSACASDPCAPGTECQATESGGYTCGPMEPRGCATQPCHHGALCVPQGPDPTGFRCYCVPGFQGPRCELDIDECASRPCHHGATCRNLADRYECHCPLGYAGVTCEMEVDECASAPCLHGGSCLDGVGSFRCVCAPGYGGTRCQLDLDECQSQPCAHGGTCHDLVNGFRCDCAGTGYEGTHCEREVLECASAPCEHNASCLEGLGSFRCLCWPGYSGELCEVDEDECASSPCQHGGRCLQRSDPALYGGVQAAFPGAFSFRHAAGFLCHCPPGFEGADCGVEVDECASRPCLNGGHCQDLPNGFQCHCPDGYAGPTCEEDVDECLSDPCLHGGTCSDTVAGYICRCPETWGGRDCSVQLTGCQGHTCPLAATCIPIFESGVHSYVCHCPPGTHGPFCGQNTTFSVMAGSPIQASVPAGGPLGLALRFRTTLPAGTLATRNDTKESLELALVAATLQATLWSYSTTVLVLRLPDLALNDGHWHQVEVVLHLATLELRLWHEGCPARLCVASGPVALASTASATPLPAGISSAQLGDATFAGCLQDVRVDGHLLLPEDLGENVLLGCERREQCRPLPCVHGGSCVDLWTHFRCDCARPHRGPTCADEIPAATFGLGGAPSSASFLLQELPGPNLTVSFLLRTRESAGLLLQFANDSAAGLTVFLSEGRIRAEVPGSPAVVLPGRWDDGLRHLVMLSFGPDQLQDLGQHVHVGGRLLAADSQPWGGPFRGCLQDLRLDGCHLPFFPLPLDNSSQPSELGGRQSWNLTAGCVSEDMCSPDPCFNGGTCLVTWNDFHCTCPANFTGPTCAQQLWCPGQPCLPPATCEEVPDGFVCVAEATFREGPPAAFSGHNASSGRLLGGLSLAFRTRDSEAWLLRAAAGALEGVWLAVRNGSLAGGVRGGHGLPGAVLPIPGPRVADGAWHRVRLAMERPAATTSRWLLWLDGAATPVALRGLASDLGFLQGPGAVRILLAENFTGCLGRVALGGLPLPLARPRPGAAPGAREHFASWPGTPAPILGCRGAPVCAPSPCLHDGACRDLFDAFACACGPGWEGPRCEAHVDPCHSAPCARGRCHTHPDGRFECRCPPGFGGPRCRLPVPSKECSLNVTCLDGSPCEGGSPAANCSCLEGLAGQRCQVPTLPCEANPCLNGGTCRAAGGVSECICNARFSGQFCEVAKGLPLPLPFPLLEVAVPAACACLLLLLLGLLSGILAARKRRQSEGTYSPSQQEVAGARLEMDSVLKVPPEERLI

SEQ ID NO: 15481 - protein, 1176 aa, Homo sapiens
MALARPGTPDPQALASVLLLLLWAPALSLLAGTVPSEPPSACASDPCAPGTECQATESGGYTCGPMEPRGCATQPCHHGALCVPQGPDPTGFRCYCVPGFQGPRCELDIDECASRPCHHGATCRNLADRYECHCPLGYAGVTCEMEVDECASAPCLHGGSCLDGVGSFRCVCAPGYGGTRCQLDLDECQSQPCAHGGTCHDLVNGFRCDCAGTGYEGTHCEREVLECASAPCEHNASCLEGLGSFRCLCWPGYSGELCEVDEDECASSPCQHGGRCLQRSDPALYGGVQAAFPGAFSFRHAAGFLCHCPPGFEGADCGVEVDECASRPCLNGGHCQDLPNGFQCHCPDGYAGPTCEEDVDECLSDPCLHGGTCSDTVAGYICRCPETWGGRDCSVQLTGCQGHTCPLAATCIPIFESGVHSYVCHCPPGTHGPFCGQNTTFSVMAGSPIQASVPAGGPLGLALRFRTTLPAGTLATRNDTKESLELALVAATLQATLWSYSTTVLVLRLPDLALNDGHWHQVEVVLHLATLELRLWHEGCPARLCVASGPVALASTASATPLPAGISSAQLGDATFAGCLQDVRVDGHLLLPEDLGENVLLGCERREQCRPLPCVHGGSCVDLWTHFRCDCARPHRGPTCADEIPAATFGLGGAPSSASFLLQELPGPNLTVSFLLRTRESAGLLLQFANDSAAGLTVFLSEGRIRAEVPGSPAVVLPGRWDDGLRHLVMLSFGPDQLQDLGQHVHVGGRLLAADSQPWGGPFRGCLQDLRLDGCHLPFFPLPLDNSSQPSELGGRQSWNLTAGCVSEDMCSPDPCFNGGTCLVTWNDFHCTCPANFTGPTCAQQLWCPGQPCLPPATCEEVPDGFVCVAEATFREGPPAAFSGHNASSGRLLGGLSLAFRTRDSEAWLLRAAAGALEGVWLAVRNGSLAGGVRGGHGLPGAVLPIPGPRVADGAWHRVRLAMERPAATTSRWLLWLDGAATPVALRGLASDLGFLQGPGAVRILLAENFTGCLGRVALGGLPLPLARPRPGAAPGAREHFASWPGTPAPILGCRGAPVCAPSPCLHDGACRDLFDAFACACGPGWEGPRCEAHVDPCHSAPCARGRCHTHPDGRFECRCPPGFGGPRCRWDGWAGGWAANAPWGYGGAEKSARSVDESLPFPGPHVLICDMRRTV

SEQ ID NO: 15482 - protein, 953 aa, Homo sapiens
MAMEPGALWTFLGHLWLLAGPTCEEDVDECLSDPCLHGGTCSDTVAGYICRCPETWGGRDCSVQLTGCQGHTCPLAATCIPIFESGVHSYVCHCPPGTHGPFCGQNTTFSVMAGSPIQASVPAGGPLGLALRFRTTLPAGTLATRNDTKESLELALVAATLQATLWSYSTTVLVLRLPDLALNDGHWHQVEVVLHLATLELRLWHEGCPARLCVASGPVALASTASATPLPAGISSAQLGDATFAGCLQDVRVDGHLLLPEDLGENVLLGCERREQCRPLPCVHGGSCVDLWTHFRCDCARPHRGPTCADEIPAATFGLGGAPSSASFLLQELPGPNLTVSFLLRTRESAGLLLQFANDSAAGLTVFLSEGRIRAEVPGSPAVVLPGRWDDGLRHLVMLSFGPDQLQDLGQHVHVGGRLLAADSQPWGGPFRGCLQDLRLDGCHLPFFPLPLDNSSQPSELGGRQSWNLTAGCVSEDMCSPDPCFNGGTCLVTWNDFHCTCPANFTGPTCAQQLWCPGQPCLPPATCEEVPDGFVCVAEATFREGPPAAFSGHNASSGRLLGGLSLAFRTRDSEAWLLRAAAGALEGVWLAVRNGSLAGGVRGGHGLPGAVLPIPGPRVADGAWHRVRLAMERPAATTSRWLLWLDGAATPVALRGLASDLGFLQGPGAVRILLAENFTGCLGRVALGGLPLPLARPRPGAAPGAREHFASWPGTPAPILGCRGAPVCAPSPCLHDGACRDLFDAFACACGPGWEGPRCEAHVDPCHSAPCARGRCHTHPDGRFECRCPPGFGGPRCRLPVPSKECSLNVTCLDGSPCEGGSPAANCSCLEGLAGQRCQVPTLPCEANPCLNGGTCRAAGGVSECICNARFSGQFCEVAKGLPLPLPFPLLEVAVPAACACLLLLLLGLLSGILAARKRRQSEGTYSPSQQEVAGARLEMDSVLKVPPEERLI

SEQ ID NO: 15483 - protein, 785 aa, Homo sapiens
MLPAAPGKGLGSPDPAPCGPAPPGNTKDIIMIYEEDAEEWALYLTEVFLHVVKREAILLYRLENFSFRHLELLNLTSYKCKLLILSNSLLRDLTPKKCQFLEKILHSPKSVVTLLCGVKSSDQLYELLNISQSRWEISTEQEPEDYISVIQSIIFKDSEDYFEVNIPTDLRAKHSGEISERKEIEELSEASRNTIPLAVVLPTEIPCENPGEIFIILRDEVIGDTVEVEFTSSNKRIRTRPALWNKKVWCMKALEFPAGSVHVNVYCDGIVKATTKIKYYPTAKAKECLFRMADSGESLCQNSIEELDGVLTSIFKHEIPYYEFQSLQTEICSQNKYTHFKELPTLLHCAAKFGLKNLAIHLLQCSGATWASKMKNMEGSDPAHIAERHGHKELKKIFEDFSIQEIDINNEQENDYEEDIASFSTYIPSTQNPAFHHESRKTYGQSADGAEANEMEGEGKQNGSGMETKHSPLEVGSESSEDQYDDLYVFIPGADPENNSQEPLMSSRPPLPPPRPVANAFQLERPHFTLPGTMVEGQMERSQNWGHPGVRQETGDEPKGEKEKKEEEKEQEEEEDPYTFAEIDDSEYDMILANLSIKKKTGSRSFIINRPPAPTPRPTSIPPKEETTPYIAQVFQQKTARRQSDDDKFCGLPKKQDRARIESPAFSTLRGCLTDGQEELILLQEKVKNGKMSMDEALEKFKHWQMGKSGLEMIQQEKLRQLRDCIIGKRPEEENVYNKLTIVHHPGGKETAHNENKFYNVHFSNKLPARPQVEKEFGFCCKKDH

SEQ ID NO: 15484 - protein, 770 aa, Homo sapiens
MVNCHLKIGNTKDIIMIYEEDAEEWALYLTEVFLHVVKREAILLYRLENFSFRHLELLNLTSYKCKLLILSNSLLRDLTPKKCQFLEKILHSPKSVVTLLCGVKSSDQLYELLNISQSRWEISTEQEPEDYISVIQSIIFKDSEDYFEVNIPTDLRAKHSGEISERKEIEELSEASRNTIPLAVVLPTEIPCENPGEIFIILRDEVIGDTVEVEFTSSNKRIRTRPALWNKKVWCMKALEFPAGSVHVNVYCDGIVKATTKIKYYPTAKAKECLFRMADSGESLCQNSIEELDGVLTSIFKHEIPYYEFQSLQTEICSQNKYTHFKELPTLLHCAAKFGLKNLAIHLLQCSGATWASKMKNMEGSDPAHIAERHGHKELKKIFEDFSIQEIDINNEQENDYEEDIASFSTYIPSTQNPAFHHESRKTYGQSADGAEANEMEGEGKQNGSGMETKHSPLEVGSESSEDQYDDLYVFIPGADPENNSQEPLMSSRPPLPPPRPVANAFQLERPHFTLPGTMVEGQMERSQNWGHPGVRQETGDEPKGEKEKKEEEKEQEEEEDPYTFAEIDDSEYDMILANLSIKKKTGSRSFIINRPPAPTPRPTSIPPKEETTPYIAQVFQQKTARRQSDDDKFCGLPKKQDRARIESPAFSTLRGCLTDGQEELILLQEKVKNGKMSMDEALEKFKHWQMGKSGLEMIQQEKLRQLRDCIIGKRPEEENVYNKLTIVHHPGGKETAHNENKFYNVHFSNKLPARPQVEKEFGFCCKKDH

SEQ ID NO: 15485 - protein, 755 aa, Homo sapiens
MIYEEDAEEWALYLTEVFLHVVKREAILLYRLENFSFRHLELLNLTSYKCKLLILSNSLLRDLTPKKCQFLEKILHSPKSVVTLLCGVKSSDQLYELLNISQSRWEISTEQEPEDYISVIQSIIFKDSEDYFEVNIPTDLRAKHSGEISERKEIEELSEASRNTIPLAVVLPTEIPCENPGEIFIILRDEVIGDTVEVEFTSSNKRIRTRPALWNKKVWCMKALEFPAGSVHVNVYCDGIVKATTKIKYYPTAKAKECLFRMADSGESLCQNSIEELDGVLTSIFKHEIPYYEFQSLQTEICSQNKYTHFKELPTLLHCAAKFGLKNLAIHLLQCSGATWASKMKNMEGSDPAHIAERHGHKELKKIFEDFSIQEIDINNEQENDYEEDIASFSTYIPSTQNPAFHHESRKTYGQSADGAEANEMEGEGKQNGSGMETKHSPLEVGSESSEDQYDDLYVFIPGADPENNSQEPLMSSRPPLPPPRPVANAFQLERPHFTLPGTMVEGQMERSQNWGHPGVRQETGDEPKGEKEKKEEEKEQEEEEDPYTFAEIDDSEYDMILANLSIKKKTGSRSFIINRPPAPTPRPTSIPPKEETTPYIAQVFQQKTARRQSDDDKFCGLPKKQDRARIESPAFSTLRGCLTDGQEELILLQEKVKNGKMSMDEALEKFKHWQMGKSGLEMIQQEKLRQLRDCIIGKRPEEENVYNKLTIVHHPGGKETAHNENKFYNVHFSNKLPARPQVEKEFGFCCKKDH

SEQ ID NO: 15486 - protein, 652 aa, Homo sapiens
MLPAAPGKGLGSPDPAPCGPAPPDSEDYFEVNIPTDLRAKHSGEISERKEIEELSEASRNTIPLAVVLPTEIPCENPGEIFIILRDEVIGDTVEVEFTSSNKRIRTRPALWNKKVWCMKALEFPAGSVHVNVYCDGIVKATTKIKYYPTAKAKECLFRMADSGESLCQNSIEELDGVLTSIFKHEIPYYEFQSLQTEICSQNKYTHFKELPTLLHCAAKFGLKNLAIHLLQCSGATWASKMKNMEGSDPAHIAERHGHKELKKIFEDFSIQEIDINNEQENDYEEDIASFSTYIPSTQNPAFHHESRKTYGQSADGAEANEMEGEGKQNGSGMETKHSPLEVGSESSEDQYDDLYVFIPGADPENNSQEPLMSSRPPLPPPRPVANAFQLERPHFTLPGTMVEGQMERSQNWGHPGVRQETGDEPKGEKEKKEEEKEQEEEEDPYTFAEIDDSEYDMILANLSIKKKTGSRSFIINRPPAPTPRPTSIPPKEETTPYIAQVFQQKTARRQSDDDKFCGLPKKQDRARIESPAFSTLRGCLTDGQEELILLQEKVKNGKMSMDEALEKFKHWQMGKSGLEMIQQEKLRQLRDCIIGKRPEEENVYNKLTIVHHPGGKETAHNENKFYNVHFSNKLPARPQVEKEFGFCCKKDH

SEQ ID NO: 15487 - protein, 129 aa, Homo sapiens
MASRLLRGAGTLAAQALRARGPSGAAAMRSMASGGGVPTDEEQATGLEREIMLAAKKGLDPYNVLAPKGASGTREDPNLVPSISNKRIVGCICEEDNTSVVWFWLHKGEAQRCPRCGAHYKLVPQQLAH

SEQ ID NO: 15488 - protein, 174 aa, Homo sapiens
MGKITLYEDRGFQGRHYECSSDHPNLQPYLSRCNSARVDSGCWMLYEQPNYSGLQYFLRRGDYADHQQWMGLSDSVRSCRLIPHSGSHRIRLYEREDYRGQMIEFTEDCSCLQDRFRFNEIHSLNVLEGSWVLYELSNYRGRQYLLMPGDYRRYQDWGATNARVGSLRRVIDFS

SEQ ID NO: 15489 - protein, 489 aa, Homo sapiens
MSFRKVVRQSKFRHVFGQPVKNDQCYEDIRVSRVTWDSTFCAVNPKFLAVIVEASGGGAFLVLPLSKTGRIDKAYPTVCGHTGPVLDIDWCPHNDEVIASGSEDCTVMVWQIPENGLTSPLTEPVVVLEGHTKRVGIIAWHPTARNVLLSAGCDNVVLIWNVGTAEELYRLDSLHPDLIYNVSWNHNGSLFCSACKDKSVRIIDPRRGTLVAEREKAHEGARPMRAIFLADGKVFTTGFSRMSERQLALWDPENLEEPMALQELDSSNGALLPFYDPDTSVVYVCGKGDSSIRYFEITEEPPYIHFLNTFTSKEPQRGMGSMPKRGLEVSKCEIARFYKLHERKCEPIVMTVPRKSDLFQDDLYPDTAGPEAALEAEEWVSGRDADPILISLREAYVPSKQRDLKISRRNVLSDSRPAMAPGSSHLGAPASTTTAADATPSGSLARAGEAGKLEEVMQELRALRALVKEQGDRICRLEEQLGRMENGDA

SEQ ID NO: 15490 - protein, 75 aa, Homo sapiens
MAPEVLPKPRMRGLLARRLRNHMAVAFVLSLGVAALYKFRVADQRKKAYADFYRNYDVMKDFEEMRKAGIFQSVK

SEQ ID NO: 15491 - protein, 1653 aa, Homo sapiens
MSSASSEPGNGDASQQPLLGLDTVIQRLEDTILSPTASREDRALTVRGEGRQASPTPVPTRIREIVAGSLSEEPPQAGVQEPTATVARVQEENELLQEELTRLGDLLAQASAERDELASRCRVVSEQLQARLETTEAQLRRSELEHSVDLEEALGRLEAAEERSTGLCQVNALLREQLEHMKKANDALGRELAGMTGSVQRLQGELELRRWAQRQTRSGGLGQPRDLLLLWRQAVVLGTDLAELRVATERGLADLQADTARTARRLHTACLNLDSNLRLSASSTASTLGQQLRDKAGEMLQLQGRWDAEKVALQARLSEQTLLVEKLTEQNEQKAKTIAALRTDLQNLVAQEDARCLELAGSSITELGEPRRPLRSPQRATSPHQGASPPHICSPATLDPALQAMRAAIERRWRREQELCLQLKSSQALVASLQEQLSESRRELWAAQKLQQERAREQAREREALRGQLEAQRLEVQQCRASCKLLGREKAALEMVVEELKGKADAADAEKQGLEAEAAELQRSLLLQAERREELALRRERSCRALETSQGRLQQLEEKVSGLREELASVREALSTAQLQRDVVESEREGLRSALARAECSNADLELLVRRLKSEGVEQRDSLAAMAALMEGLAQDKSALNHLALQLEQERDQLREQRKTLEQERARAGEQLAQAEQQLALERAERRGLQQACGRLEQRQEQLEGQAALLGREKAQLQEQVGQVTCQKQALEEQLAQSLQDQEAQMGTLQQALQGKDALSEERAQLLAKQEALERQGRLAAEEAADLRVERDSLESSLLEAQQLATKLQEQLEEEARSAGLARQALQVEMEQLQSDWEVQEMKLRQDTVRLQRQVAQQEREAQRALESQALAHREALAQLQREKETLSLTLAEEKEVARCQLEQEKELVTKSAAEREALKGEIQSLKQERDESLLQLEHKMQQALSLKETERSLLSEELSRARRTLERVQQEAQSQQEQAQATISATTEELKALQAQFEDAITAHQRETTALRESLQDLAAERGDVEREAERLRAQLTVAQEGLAALRQELQGVEESREGLHREAQEARRALSDEAREKDVLLLFNSELRATICRAEQEKASFKRSKEEKEQKLLILEEAQAALQQEASALRAHLWELEQAGGDARQELRELHRQVRTLKAENQRRSGEAHELQAQCSQEVLELRRQAAKAEAKHEGARKEVLGLQRKLAEVEAAGEAHGQRLQEHLRESRGAEQTLRAELHSVTRKLQEASGVADALQARLDQACHRIHSLEQELAQAEGARQDAEAQLGRLCSTLRRGLGLQRQSPWASPEQPGSPTKGSDSSQALPGQQGTSPPARPHSPLRWPSPTPGGRSSELMDVATVQDILRDFVQKLREAQRERDDSRIQMATLSSRLSEAECRCARAQSRVGQLQKALAEAEEGQRRVEGALSSARAARALQKEALRRLELEHLASVRAAGQEKRRLQEQLETLRQALEESRRHSQGLAKQGKLLEEQLTNLEHRCQKAEVSLEPLRQMEQETLKREEDVARLGAEKEQLDQSLNSLHQEVDGALRQNQQLQAQMTEMEQAHTQRLQDLTAQHQRDLATEAERLHGARPQATQALESQEWTHQQQVKVLEEQVASLKEQLDQEVQWRQQAHLGQAFQTGHAQRD

SEQ ID NO: 15492 - protein, 241 aa, Homo sapiens
MTLQWAAVATFLYAEIGLILIFCLPFIPPQRWQKIFSFNVWGKIATFWNKAFLTIIILLIVLFLDAVREVRKYSSVHTIEKSSTSRPDAYEHTQMKLFRSQRNLYISGFSLFFWLVLRRLVTLITQLAKELSNKGVLKTQAENTNKAAKKFMEENEKLKRILKSHGKDEECVLEAENKKLVEDQEKLKTELRKTSDALSKAQNDVMEMKMQSERLSKEYDQLLKEHSELQDRLERGNKKRL

SEQ ID NO: 15493 - protein, 348 aa, Homo sapiens
MTLQWAAVATFLYAEIGLILIFCLPFIPPQRWQKIFSFNVWGKIATFWNKAFLTIIILLIVLFLDAVREVRKYSSVHTIEKSSTSRPDAYEHTQMKLFRSQRNLYISGFSLFFWLVLRRLVTLITQLAKELSNKGVLKTQAENTNKAAKKFMEENEKLKRILKSHGKDEECVLEAENKKLVEDQEKLKTELRKTSDALSKAQNDVMEMKMQSERLSKEYDQLLKEHSELQHSSFGEFLSKRSHKNGSIGKQTGSRKGSFRKRQQEKTVNFIKDTCNILCQNDNFVMLASRKFKFRKMHYDRFVIFLMPHIGCIVMALSKYLMMFQIYCKVCIPALKKNISMLNTIFTY

SEQ ID NO: 15494 - protein, 322 aa, Homo sapiens
MSPNFKLQCHFILIFLTALRGESRYLELREAADYDPFLLFSANLKRELAGEQPYRRALRCLDMLSLQGQFTFTADRPQLHCAAFFISEPEEFITIHYDQVSIDCQGGDFLKVFDGWILKGEKFPSSQDHPLPSAERYIDFCESGLSRRSIRSSQNVAMIFFRVHEPGNGFTLTIKTDPNLFPCNVISQTPNGKFTLVVPHQHRNCSFSIIYPVVIKISDLTLGHVNGLQLKKSSAGCEGIGDFVELLGGTGLDPSKMTPLADLCYPFHGPAQMKVGCDNTVVRMVSSGKHVNRVTFEYRQLEPYELENPNGNSIGEFCLSGL

SEQ ID NO: 15495 - protein, 766 aa, Homo sapiens [sequence omitted]

SEQ ID NO: 15496 - protein, 106 aa, Homo sapiens
MLWNLLALHQIGQRTISTASHRHFKNKVPEKQKLFQEDDGIPLYLKGGIADALLHRATMILTVGGTAYAIYQLAVASFPNKGVTSIIPAITWFTFIQLSMDQKSDK

SEQ ID NO: 15497 - protein, 208 aa, Homo sapiens
MASKCPKCDKTVYFAEKVSSLGKDWHKFCLKCERCSKTLTPGGHAEHDGKPFCHKPCYATLFGPKGVNIGGAGSYIYEKPLAEGPQVTGPIEVPAARAEERKASGPPKGPSRASSVTTFTGEPNTCPRCSKKVYFAEKVTSLGKDWHRPCLRCERCGKTLTPGGHAEHDGQPYCHKPCYGILFGPKGVNTGAVGSYIYDRDPEGKVQP

SEQ ID NO: 15498 - protein, 282 aa, Homo sapiens
MPPHHLLPWLAQVPSAEGELVRLVSRAGGRGACFWPAVTMEMAVAAGCVCKGGGCCHREPSQDHHESQEHRGPLVGSQTCLVHQAEGTAEKVSSLGKDWHKFCLKCERCSKTLTPGGHAEHDGKPFCHKPCYATLFGPKGVNIGGAGSYIYEKPLAEGPQVTGPIEVPAARAEERKASGPPKGPSRASSVTTFTGEPNTCPRCSKKVYFAEKVTSLGKDWHRPCLRCERCGKTLTPGGHAEHDGQPYCHKPCYGILFGPKGVNTGAVGSYIYDRDPEGKVQP

SEQ ID NO: 15499 - protein, 246 aa, Homo sapiens
MSLQWTAVATFLYAEVFVVLLLCIPFISPKRWQKIFKSRLVELLVSYGNTFFVVLIVILVLLVIDAVREIRKYDDVTEKVNLQNNPGAMEHFHMKLFRAQRNLYIAGFSLLLSFLLRRLVTLISQQATLLASNEAFKKQAESASEAAKKYMEENDQLKKGAAVDGGKLDVGNAEVKLEEENRSLKADLQKLKDELASTKQKLEKAENQVLAMRKQSEGLTKEYDRLLEEHAKLQAAVDGPMDKKEE

SEQ ID NO: 15500 - protein, 313 aa, Homo sapiens
MGAEASSSWCPGTALPEERLSVKRASEISGFLGQGSSGEAALDVLTHVLEGAGNKLTSSCGKPSSNRMSLQWTAVATFLYAEVFVVLLLCIPFISPKRWQKIFKSRLVELLVSYGNTFFVVLIVILVLLVIDAVREIRKYDDVTEKVNLQNNPGAMEHFHMKLFRAQRNLYIAGFSLLLSFLLRRLVTLISQQATLLASNEAFKKQAESASEAAKKYMEENDQLKKGAAVDGGKLDVGNAEVKLEEENRSLKADLQKLKDELASTKQKLEKAENQVLAMRKQSEGLTKEYDRLLEEHAKLQAAVDGPMDKKEE

SEQ ID NO: 15501 - protein, 101 aa, Homo sapiens
MVCEKCEKKLGTVITPDTWKDGARNTTESGGRKLNENKALTSKKARFDPYGKNKFSTCRICKSSVHQPGSHYCQGCAYKKGICAMCGKKVLDTKNYKQTSV

SEQ ID NO: 15502 - protein, 180 aa, Homo sapiens
MASTSYDYCRVPMEDGDKRCKLLLGIGILVLLIIVILGVPLIIFTIKANSEACRDGLRAVMECRNVTHLLQQELTEAQKGFQDVEAQAATCNHTVMALMASLDAEKAQGQKKVEELEGEITTLNHKLQDASAEVERLRRENQVLSVRIADKKYYPSSQDSSSAAAPQLLIVLLGLSALLQ

SEQ ID NO: 15503 - protein, 168 aa, Homo sapiens
MEDGDKRCKLLLGIGILVLLIIVILGVPLIIFTIKANSEACRDGLRAVMECRNVTHLLQQELTEAQKGFQDVEAQAATCNHTVMALMASLDAEKAQGQKKVEELEGEITTLNHKLQDASAEVERLRRENQVLSVRIADKKYYPSSQDSSSAAAPQLLIVLLGLSALLQ

SEQ ID NO: 15504 - protein, 911 aa, Homo sapiens
MEELQDDYEDMMEENLEQEEYEDPDIPESQMEEPAAHDTEATATDYHTTSHPGTHKVYVELQELVMDEKNQELRWMEAARWVQLEENLGENGAWGRPHLSHLTFWSLLELRRVFTKGTVLLDLQETSLAGVANQLLDRFIFEDQIRPQDREELLRALLLKHSHAGELEALGGVKPAVLTRSGDPSQPLLPQHSSLETQLFCEQGDGGTEGHSPSGILEKIPPDSEATLVLVGRADFLEQPVLGFVRLQEAAELEAVELPVPIRFLFVLLGPEAPHIDYTQLGRAAATLMSERVFRIDAYMAQSRGELLHSLEGFLDCSLVLPPTDAPSEQALLSLVPVQRELLRRRYQSSPAKPDSSFYKGLDLNGGPDDPLQQTGQLFGGLVRDIRRRYPYYLSDITDAFSPQVLAAVIFIYFAALSPAITFGGLLGEKTRNQMGVSELLISTAVQGILFALLGAQPLLVVGFSGPLLVFEEAFFSFCETNGLEYIVGRVWIGFWLILLVVLVVAFEGSFLVRFISRYTQEIFSFLISLIFIYETFSKLIKIFQDHPLQKTYNYNVLMVPKPQGPLPNTALLSLVLMAGTFFFAMMLRKFKNSSYFPGKLRRVIGDFGVPISILIMVLVDFFIQDTYTQKLSVPDGFKVSNSSARGWVIHPLGLRSEFPIWMMFASALPALLVFILIFLESQITTLIVSKPERKMVKGSGFHLDLLLVVGMGGVAALFGMPWLSATTVRSVTHANALTVMGKASTPGAAAQIQEVKEQRISGLLVAVLVGLSILMEPILSRIPLAVLFGIFLYMGVTSLSGIQLFDRILLLFKPPKYHPDVPYVKRVKTWRMHLFTGIQIICLAVLWVVKSTPASLALPFVLILTVPLRRVLLPLIFRNVELQCLDADDAKATFDEEEGRDEYDEVAMPV

SEQ ID NO: 15505 - protein, 846 aa, Homo sapiens
MDEKNQELRWMEAARWVQLEENLGENGAWGRPHLSHLTFWSLLELRRVFTKGTVLLDLQETSLAGVANQLLDRFIFEDQIRPQDREELLRALLLKHSHAGELEALGGVKPAVLTRSGDPSQPLLPQHSSLETQLFCEQGDGGTEGHSPSGILEKIPPDSEATLVLVGRADFLEQPVLGFVRLQEAAELEAVELPVPIRFLFVLLGPEAPHIDYTQLGRAAATLMSERVFRIDAYMAQSRGELLHSLEGFLDCSLVLPPTDAPSEQALLSLVPVQRELLRRRYQSSPAKPDSSFYKGLDLNGGPDDPLQQTGQLFGGLVRDIRRRYPYYLSDITDAFSPQVLAAVIFIYFAALSPAITFGGLLGEKTRNQMGVSELLISTAVQGILFALLGAQPLLVVGFSGPLLVFEEAFFSFCETNGLEYIVGRVWIGFWLILLVVLVVAFEGSFLVRFISRYTQEIFSFLISLIFIYETFSKLIKIFQDHPLQKTYNYNVLMVPKPQGPLPNTALLSLVLMAGTFFFAMMLRKFKNSSYFPGKLRRVIGDFGVPISILIMVLVDFFIQDTYTQKLSVPDGFKVSNSSARGWVIHPLGLRSEFPIWMMFASALPALLVFILIFLESQITTLIVSKPERKMVKGSGFHLDLLLVVGMGGVAALFGMPWLSATTVRSVTHANALTVMGKASTPGAAAQIQEVKEQRISGLLVAVLVGLSILMEPILSRIPLAVLFGIFLYMGVTSLSGIQLFDRILLLFKPPKYHPDVPYVKRVKTWRMHLFTGIQIICLAVLWVVKSTPASLALPFVLILTVPLRRVLLPLIFRNVELQCLDADDAKATFDEEEGRDEYDEVAMPV

SEQ ID NO: 15506 - protein, 243 aa, Homo sapiens
MLLSLLGACAVVGPFHGPEWEPVQGLLSQNHSCRDPQCCGNLLVLCLFLVWQVRHCWHQVTRTRFSTRNVIKVPLQKRAVPSMRCETVFKLTPEFFSPGKSRGLDSQQCAQRQRWGYRRSLQESWAQNLLSPQHPCPGPPSGVHTHSEPIFCTTSISNTCLLPQNSSWKAWQVPWCLHDGQTRPALDMCQEMEQLLLHSQERLVSLEPVISVRSRPTSMTLTTSLPNLLSAERLQFCPQRAPA

SEQ ID NO: 15507 - protein, 777 aa, Homo sapiens
MPDNRQPRNRQPRIRSGNEPRSAPAMEPDGRGAWAHSRAALDRLEKLLRCSRCTNILREPVCLGGCEHIFCSNCVSDCIGTGCPVCYTPAWIQDLKINRQLDSMIQLCSKLRNLLHDNELSDLKEDKPRKSLFNDAGNKKNSIKMWFSPRSKKVRYVVSKASVQTQPAIKKDASAQQDSYEFVSPSPPADVSERAKKASARSGKKQKKKTLAEINQKWNLEAEKEDGEFDSKEESKQKLVSFCSQPSVISSPQINGEIDLLASGSLTESECFGSLTEVSLPLAEQIESPDTKSRNEVVTPEKVCKNYLTSKKSLPLENNGKRGHHNRLSSPISKRCRTSILSTSGDFVKQTVPSENIPLPECSSPPSCKRKVGGTSGRKNSNMSDEFISLSPGTPPSTLSSSSYRRVMSSPSAMKLLPNMAVKRNHRGETLLHIASIKGDIPSVEYLLQNGSDPNVKDHAGWTPLHEACNHGHLKVVELLLQHKALVNTTGYQNDSPLHDAAKNGHVDIVKLLLSYGASRNAVNIFGLRPVDYTDDESMKSLLLLPEKNESSSASHCSVMNTGQRRDGPLVLIGSGLSSEQQKMLSELAVILKAKKYTEFDSTVTHVVVPGDAVQSTLKCMLGILNGCWILKFEWVKACLRRKVCEQEEKYEIPEGPRRSRLNREQLLPKLFDGCYFYLWGTFKHHPKDNLIKLVTAGGGQILSRKPKPDSDVTQTINTVAYHARPDSDQRFCTQYIIYEDLCNYHPERVRQGKVWKAPSSWFIDCVMSFELLPLDS

SEQ ID NO: 15508 - protein, 758 aa, Homo sapiens
MPDNRQPRNRQPRIRSGNEPRSAPAMEPDGRGAWAHSRAALDRLEKLLRCSRCNCVSDCIGTGCPVCYTPAWIQDLKINRQLDSMIQLCSKLRNLLHDNELSDLKEDKPRKSLFNDAGNKKNSIKMWFSPRSKKVRYVVSKASVQTQPAIKKDASAQQDSYEFVSPSPPADVSERAKKASARSGKKQKKKTLAEINQKWNLEAEKEDGEFDSKEESKQKLVSFCSQPSVISSPQINGEIDLLASGSLTESECFGSLTEVSLPLAEQIESPDTKSRNEVVTPEKVCKNYLTSKKSLPLENNGKRGHHNRLSSPISKRCRTSILSTSGDFVKQTVPSENIPLPECSSPPSCKRKVGGTSGRKNSNMSDEFISLSPGTPPSTLSSSSYRRVMSSPSAMKLLPNMAVKRNHRGETLLHIASIKGDIPSVEYLLQNGSDPNVKDHAGWTPLHEACNHGHLKVVELLLQHKALVNTTGYQNDSPLHDAAKNGHVDIVKLLLSYGASRNAVNIFGLRPVDYTDDESMKSLLLLPEKNESSSASHCSVMNTGQRRDGPLVLIGSGLSSEQQKMLSELAVILKAKKYTEFDSTVTHVVVPGDAVQSTLKCMLGILNGCWILKFEWVKACLRRKVCEQEEKYEIPEGPRRSRLNREQLLPKLFDGCYFYLWGTFKHHPKDNLIKLVTAGGGQILSRKPKPDSDVTQTINTVAYHARPDSDQRFCTQYIIYEDLCNYHPERVRQGKVWKAPSSWFIDCVMSFELLPLDS

SEQ ID NO: 15509 - protein, 680 aa, Homo sapiens
MVAVPGPTVAPRSTAWRSCCAARVDLKEDKPRKSLFNDAGNKKNSIKMWFSPRSKKVRYVVSKASVQTQPAIKKDASAQQDSYEFVSPSPPADVSERAKKASARSGKKQKKKTLAEINQKWNLEAEKEDGEFDSKEESKQKLVSFCSQPSVISSPQINGEIDLLASGSLTESECFGSLTEVSLPLAEQIESPDTKSRNEVVTPEKVCKNYLTSKKSLPLENNGKRGHHNRLSSPISKRCRTSILSTSGDFVKQTVPSENIPLPECSSPPSCKRKVGGTSGRKNSNMSDEFISLSPGTPPSTLSSSSYRRVMSSPSAMKLLPNMAVKRNHRGETLLHIASIKGDIPSVEYLLQNGSDPNVKDHAGWTPLHEACNHGHLKVVELLLQHKALVNTTGYQNDSPLHDAAKNGHVDIVKLLLSYGASRNAVNIFGLRPVDYTDDESMKSLLLLPEKNESSSASHCSVMNTGQRRDGPLVLIGSGLSSEQQKMLSELAVILKAKKYTEFDSTVTHVVVPGDAVQSTLKCMLGILNGCWILKFEWVKACLRRKVCEQEEKYEIPEGPRRSRLNREQLLPKLFDGCYFYLWGTFKHHPKDNLIKLVTAGGGQILSRKPKPDSDVTQTINTVAYHARPDSDQRFCTQYIIYEDLCNYHPERVRQGKVWKAPSSWFIDCVMSFELLPLDS

SEQ ID NO: 15510 - protein, 127 aa, Homo sapiens
MPDNRQPRNRQPRIRSGNEPRSAPAMEPDGRGAWAHSRAALDRLEKLLRCSRCTNILREPVCLGGCEHIFCSNCVSDCIGTGCPVCYTPAWIQDLKINRQLDSMIQLCSKLRNLLHDNELSGRHTFC

SEQ ID NO: 15511 - protein, 586 aa, Homo sapiens
MEPAAALHFSRPASLLLLLSLCALVSAQVTVVGPTDPILAMVGENTTLRCCLSPEENAEDMEVRWFQSQFSPAVFVYKGGRERTEEQKEEYRGRTTFVSKDSRGSVALIIHNVTAEDNGIYQCYFQEGRSCNEAILHLVVAGLDSEPVIEMRDHEDGGIQLECISGGWYPKPLTVWRDPYGEVVPALKEVSTPDADSLFMVTTAVIIRDKSVRNVSCSINDTLLGQKKESVIFIPESFMPSRSPCVVILPVIMIILMIPIAICIYWINNLQKEKKDSHLMTFNLCLSLAGWRRTFLHAANVVLDQDTGHPYLFVSEDKRSVTLDPSRESIPGNPERFDSQLCVLGQESFASGKHYLEVDVENVIEWTVGICRDNVERKWEVPLLPQNGFWTLEMHKRKYWALTSLKWILSLEEPLCQVGIFLDYEAGDVSFYNMRDRSHIYTFPHSAFSVPVRPFFSLGSYDSQILICSAFTGASGVTVPEEGWTLHRAGTHHSPQNQFPSLTAMETSPGHLSSHCTMPLVEDTPSSPLVTQENIFQLPLSHPLQTSAPVHLLIRCGFSSSFGCNYGMESRHRELVVPQLPARKKV

SEQ ID NO: 15512 - protein, 327 aa, Homo sapiens
MEGSNGFGIDSILSHRAGSPALPKGDPLLGDCRSPLELSPRSESSSDCSSPASPGRDCLETGTPRPGGASGPGLDSHLQPGQLSAPAQSRTVTSSFLIRDILADCKPLAACAPYSSSGQPAAPEPGGRLAAKAAEDFRDKLDKSGSNASSDSEYKVKEEGDREISSSRDSPPVRLKKPRKARTAFTDHQLAQLERSFERQKYLSVQDRMELAASLNLTDTQVKTWYQNRRTKWKRQTAVGLELLAEAGNYSALQRMFPSPYFYPQSLVSNLDPGAALYLYRGPSAPPPALQRPLVPRILIHGLQGASEPPPPLPPLAGVLPRAAQPR

SEQ ID NO: 15513 - protein, 385 aa, Homo sapiens
MAAALFVLLGFALLGTHGASGAAGFVQAPLSQQRWVGGSVELHCEAVGSPVPEIQWWFEGQGPNDTCSQLWDGARLDRVHIHATYHQHAASTISIDTLVEEDTGTYECRASNDPDRNHLTRAPRVKWVRAQAVVLVLEPGTVFTTVEDLGSKILLTCSLNDSATEVTGHRWLKGGVVLKEDALPGQKTEFKVDSDDQWGEYSCVFLPEPMGTANIQLHGPPRVKAVKSSEHINEGETAMLVCKSESVPPVTDWAWYKITDSEDKALMNGSESRFFVSSSQGRSELHIENLNMEADPGQYRCNGTSSKGSDQAIITLRVRSHLAALWPFLGIVAEVLVLVTIIFIYEKRRKPEDVLDDDDAGSAPLKSSGQHQNDKGKNVRQRNSS

SEQ ID NO: 15514 - protein, 269 aa, Homo sapiens
MAAALFVLLGFALLGTHGASGAAGTVFTTVEDLGSKILLTCSLNDSATEVTGHRWLKGGVVLKEDALPGQKTEFKVDSDDQWGEYSCVFLPEPMGTANIQLHGPPRVKAVKSSEHINEGETAMLVCKSESVPPVTDWAWYKITDSEDKALMNGSESRFFVSSSQGRSELHIENLNMEADPGQYRCNGTSSKGSDQAIITLRVRSHLAALWPFLGIVAEVLVLVTIIFIYEKRRKPEDVLDDDDAGSAPLKSSGQHQNDKGKNVRQRNSS

SEQ ID NO: 15515 - protein, 176 aa, Homo sapiens
MGTANIQLHGPPRVKAVKSSEHINEGETAMLVCKSESVPPVTDWAWYKITDSEDKALMNGSESRFFVSSSQGRSELHIENLNMEADPGQYRCNGTSSKGSDQAIITLRVRSHLAALWPFLGIVAEVLVLVTIIFIYEKRRKPEDVLDDDDAGSAPLKSSGQHQNDKGKNVRQRNSS

SEQ ID NO: 15516 - protein, 205 aa, Homo sapiens
MKQSDASPQERVDSDDQWGEYSCVFLPEPMGTANIQLHGPPRVKAVKSSEHINEGETAMLVCKSESVPPVTDWAWYKITDSEDKALMNGSESRFFVSSSQGRSELHIENLNMEADPGQYRCNGTSSKGSDQAIITLRVRSHLAALWPFLGIVAEVLVLVTIIFIYEKRRKPEDVLDDDDAGSAPLKSSGQHQNDKGKNVRQRNSS

SEQ ID NO: 15517 - protein, 498 aa, Homo sapiens
MRPPACWWLLAPPALLALLTCSLAFGLASEDTKKEVKQSQDLEKSGISRKNDIDLKGIVFVIQSQSNSFHAKRAEQLKKSILKQAADLTQELPSVLLLHQLAKQEGAWTILPLLPHFSVTYSRNSSWIFFCEEETRIQIPKLLETLRRYDPSKEWFLGKALHDEEATIIHHYAFSENPTVFKYPDFAAGWALSIPLVNKLTKRLKSESLKSDFTIDLKHEIALYIWDKGGGPPLTPVPEFCTNDVDFYCATTFHSFLPLCRKPVKKKDIFVAVKTCKKFHGDRIPIVKQTWESQASLIEYYSDYTENSIPTVDLGIPNTDRGHCGKTFAILERFLNRSQDKTAWLVIVDDDTLISISRLQHLLSCYDSGEPVFLGERYGYGLGTGGYSYITGGGGMVFSREAVRRLLASKCRCYSNDAPDDMVLGMCFSGLGIPVTHSPLFHQARPVDYPKDYLSHQVPISFHKHWNIDPVKVYFTWLAPSDEDKARQETQKGFREEL

SEQ ID NO: 15518 - protein, 612 aa, Homo sapiens
MSNSHPLRPFTAVGEIDHVHILSEHIGALLIGEEYGDVTFVVEKKRFPAHRVILAARCQYFRALLYGGMRESQPEAEIPLQDTTAEAFTMLLKYIYTGRATLTDEKEEVLLDFLSLAHKYGFPELEDSTSEYLCTILNIQNVCMTFDVASLYSLPKLTCMCCMFMDRNAQEVLSSEGFLSLSKTALLNIVLRDSFAAPEKDIFLALLNWCKHNSKENHAEIMQAVRLPLMSLTELLNVVRPSGLLSPDAILDAIKVRSESRDMDLNYRGMLIPEENIATMKYGAQVVKGELKSALLDGDTQNYDLDHGFSRHPIDDDCRSGIEIKLGQPSIINHIRILLWDRDSRSYSYFIEVSMDELDWVRVIDHSQYLCRSWQKLYFPARVCRYIRIVGTHNTVNKIFHIVAFECMFTNKTFTLEKGLIVPMENVATIADCASVIEGVSRSRNALLNGDTKNYDWDSGYTCHQLGSGAIVVQLAQPYMIGSIRLLLWDCDDRSYSYYVEVSTNQQQWTMVADRTKVSCKSWQSVTFERQPASFIRIVGTHNTANEVFHCVHFECPEQQSSQKEENSEESGTGDTSLAGQQLDSHALRAPSGSSLPSSPGSNSRSPNRQHQ

SEQ ID NO: 15519 - protein, 582 aa, Homo sapiens
MCRALLYGGMRESQPEAEIPLQDTTAEAFTMLLKYIYTGRATLTDEKEEVLLDFLSLAHKYGFPELEDSTSEYLCTILNIQNVCMTFDVASLYSLPKLTCMCCMFMDRNAQEVLSSEGFLSLSKTALLNIVLRDSFAAPEKDIFLALLNWCKHNSKENHAEIMQAVRLPLMSLTELLNVVRPSGLLSPDAILDAIKVRSESRDMDLNYRGMLIPEENIATMKYGAQVVKGELKSALLDGDTQNYDLDHGFSRHPIDDDCRSGIEIKLGQPSIINHIRILLWDRDSRSYSYFIEVSMDELDWVRVIDHSQYLCRSWQKLYFPARVCSGDGVSLWCPLWSRTPELKQSSLLGLPKCRYIRIVGTHNTVNKIFHIVAFECMFTNKTFTLEKGLIVPMENVATIADCASVIEGVSRSRNALLNGDTKNYDWDSGYTCHQLGSGAIVVQLAQPYMIGSIRLLLWDCDDRSYSYYVEVSTNQQQWTMVADRTKVSCKSWQSVTFERQPASFIRIVGTHNTANEVFHCVHFECPEQQSSQKEENSEESGTGDTSLAGQQLDSHALRAPSGSSLPSSPGSNSRSPNRQHQ

SEQ ID NO: 15520 - protein, 544 aa, Homo sapiens
MRESQPEAEIPLQDTTAEAFTMLLKYIYTGRATLTDEKEEVLLDFLSLAHKYGFPELEDSTSEYLCTILNIQNVCMTFDVASLYSLPKLTCMCCMFMDRNAQEVLSSEGFLSLSKTALLNIVLRDSFAAPEKDIFLALLNWCKHNSKENHAEIMQAVRLPLMSLTELLNVVRPSGLLSPDAILDAIKVRSESRDMDLNYRGMLIPEENIATMKYGAQVVKGELKSALLDGDTQNYDLDHGFSRHPIDDDCRSGIEIKLGQPSIINHIRILLWDRDSRSYSYFIEVSMDELDWVRVIDHSQYLCRSWQKLYFPARVCRYIRIVGTHNTVNKIFHIVAFECMFTNKTFTLEKGLIVPMENVATIADCASVIEGVSRSRNALLNGDTKNYDWDSGYTCHQLGSGAIVVQLAQPYMIGSIRLLLWDCDDRSYSYYVEVSTNQQQWTMVADRTKVSCKSWQSVTFERQPASFIRIVGTHNTANEVFHCVHFECPEQQSSQKEENSEESGTGDTSLAGQQLDSHALRAPSGSSLPSSPGSNSRSPNRQHQ

SEQ ID NO: 15521 - protein, 108 aa, Homo sapiens
MVTLLPIEGQEIHFFEILESECVLYTGWIERASGSSIYPEAKARLPLEALLGSNKEPMLPKETVLSLKRYNLGSSAMKRNVPGHVLQRPSYLTRIQVTLLCNSSAEAL

SEQ ID NO: 15522 - protein, 378 aa, Homo sapiens
MRMLVSGRRVKKWQLIIQLFATCFLASLMFFWEPIDNHIVSHMKSYSYRYLINSYDFVNDTLSLKHTSAGPRYQYLINHKEKCQAQDVLLLLFVKTAPENYDRRSGIRRTWGNENYVRSQLNANIKTLFALGTPNPLEGEELQRKLAWEDQRYNDIIQQDFVDSFYNLTLKLLMQFSWANTYCPHAKFLMTADDDIFIHMPNLIEYLQSLEQIGVQDFWIGRVHRGAPPIRDKSSKYYVSYEMYQWPAYPDYTAGAAYVISGDVAAKVYEASQTLNSSLYIDDVFMGLCANKIGIVPQDHVFFSGEGKTPYHPCIYEKMMTSHGHLEDLQDLWKNATDPKVKTISKGFFGQIYCRLMKIILLCKISYVDTYPCRAAFI

SEQ ID NO: 15523 - protein, 1058 aa, Homo sapiens
MRRKGRCHRGSAARHPSSPCSVKHSPTRETLTYAQAQRMVEIEIEGRLHRISIFDPLEIILEDDLTAQEMSECNSNKENSERPPVCLRTKRHKNNRVKKKNEALPSAHGTPASASALPEPKVRIVEYSPPSAPRRPPVYYKFIEKSAEELDNEVEYDMDEEDYAWLEIVNEKRKGDCVPAVSQSMFEFLMDRFEKESHCENQKQGEQQSLIDEDAVCCICMDGECQNSNVILFCDMCNLAVHQECYGVPYIPEGQWLCRHCLQSRARPADCVLCPNKGGAFKKTDDDRWGHVVCALWIPEVGFANTVFIEPIDGVRNIPPARWKLTCYLCKQKGVGACIQCHKANCYTAFHVTCAQKAGLYMKMEPVKELTGGGTTFSVRKTAYCDVHTPPGCTRRPLNIYGDVEMKNGVCRKESSVKTVRSTSKVRKKAKKAKKALAEPCAVLPTVCAPYIPPQRLNRIANQVAIQRKKQFVERAHSYWLLKRLSRNGAPLLRRLQSSLQSQRSSQQRENDEEMKAAKEKLKYWQRLRHDLERARLLIELLRKREKLKREQVKVEQVAMELRLTPLTVLLRSVLDQLQDKDPARIFAQPVSLKEVPDYLDHIKHPMDFATMRKRLEAQGYKNLHEFEEDFDLIIDNCMKYNARDTVFYRAAVRLRDQGGVVLRQARREVDSIGLEEASGMHLPERPAAAPRRPFSWEDVDRLLDPANRAHLGLEEQLRELLDMLDLTCAMKSSGSRSKRAKLLKKEIALLRNKLSQQHSQPLPTGPGLEGFEEDGAALGPEAGEEVLPRLETLLQPRKRSRSTCGDSEVEEESPGKRLDAGLTNGFGGARSEQEPGGGLGRKATPRRRCASESSISSSNSPLCDSSFNAPKCGRGKPALVRRHTLEDRSELISCIENGNYAKAARIAAEVGQSSMWISTDAAASVLEPLKVVWAKCSGYPSYPALIIDPKMPRVPGHHNGVTIPAPPLDVLKIGEHMQTKSDEKLFLVLFFDNKRSWQWLPKSKMVPLGIDETIDKLKMMEGRNSSIRKAVRIAFDRAMNHLSRVHGEPTSDLSDID

SEQ ID NO: 15524 - protein, 1189 aa, Homo sapiens
MRRKGRCHRGSAARHPSSPCSVKHSPTRETLTYAQAQRMVEIEIEGRLHRISIFDPLEIILEDDLTAQEMSECNSNKENSERPPVCLRTKRHKNNRVKKKNEALPSAHGTPASASALPEPKVRIVEYSPPSAPRRPPVYYKFIEKSAEELDNEVEYDMDEEDYAWLEIVNEKRKGDCVPAVSQSMFEFLMDRFEKESHCENQKQGEQQSLIDEDAVCCICMDGECQNSNVILFCDMCNLAVHQECYGVPYIPEGQWLCRHCLQSRARPADCVLCPNKGGAFKKTDDDRWGHVVCALWIPEVGFANTVFIEPIDGVRNIPPARWKLTCYLCKQKGVGACIQCHKANCYTAFHVTCAQKAGLYMKMEPVKELTGGGTTFSVRKTAYCDVHTPPGCTRRPLNIYGDVEMKNGVCRKESSVKTVRSTSKVRKKAKKAKKALAEPCAVLPTVCAPYIPPQRLNRIANQVAIQRKKQFVERAHSYWLLKRLSRNGAPLLRRLQSSLQSQRSSQQRENDEEMKAAKEKLKYWQRLRHDLERARLLIELLRKREKLKREQVKVEQVAMELRLTPLTVLLRSVLDQLQDKDPARIFAQPVSLKEVPDYLDHIKHPMDFATMRKRLEAQGYKNLHEFEEDFDLIIDNCMKYNARDTVFYRAAVRLRDQGGVVLRQARREVDSIGLEEASGMHLPERPAAAPRRPFSWEDVDRLLDPANRAHLGLEEQLRELLDMLDLTCAMKSSGSRSKRAKLLKKEIALLRNKLSQQHSQPLPTGPGLEGFEEDGAALGPEAGEEGDKSPPKLEPSDALPLPSNSETNSEPPTLKPVELNPEQSKLFKRVTFDNESHSACTQSALVSGRPPEPTRASSGDVPAAAASAVAEPASDVNRRTSVLFCKSKSVSPPKSAKNTETQPTSPQLGTKTFLSVVLPRLETLLQPRKRSRSTCGDSEVEEESPGKRLDAGLTNGFGGARSEQEPGGGLGRKATPRRRCASESSISSSNSPLCDSSFNAPKCGRGKPALVRRHTLEDRSELISCIENGNYAKAARIAAEVGQSSMWISTDAAASVLEPLKVVWAKCSGYPSYPALIIDPKMPRVPGHHNGVTIPAPPLDVLKIGEHMQTKSDEKLFLVLFFDNKRSWQWLPKSKMVPLGIDETIDKLKMMEGRNSSIRKAVRIAFDRAMNHLSRVHGEPTSDLSDID

SEQ ID NO: 15525 - protein, 402 aa, Homo sapiens
MRRRLRLRRDALLTLLLGASLGLLLYAQRDGAAPTASAPRGRGRAAPRPTPGPRAFQLPDAGAAPPAYEGDTPAPPTPTGPFDFARYLRAKDQRRFPLLINQPHKCRGDGAPGGRPDLLIAVKSVAEDFERRQAVRQTWGAEGRVQGALVRRVFLLGVPRGAGSGGADEVGEGARTHWRALLRAESLAYADILLWAFDDTFFNLTLKEIHFLAWASAFCPDVRFVFKGDADVFVNVGNLLEFLAPRDPAQDLLAGDVIVHARPIRTRASKYYIPEAVYGLPAYPAYAGGGGFVLSGATLHRLAGACAQVELFPIDDVFLGMCLQRLRLTPEPHPAFRTFGIPQPSAAPHLSTFDPCFYRELVVVHGLSAADIWLMWRLLHGPHGPACAHPQPVAAGPFQWDS

SEQ ID NO: 15526 - protein, 128 aa, Homo sapiens
MESKEERALNNLIVENVNQENDEKDEKEQVANKGEPLALPLNVSEYCVPRGNRRRFRVRQPILQYRWDIMHRLGEPQARMREENMERIGEEVRQLMEKLREKQLSHSLRAVSTDPPHHDHHDEFCLMP

SEQ ID NO: 15527 - protein, 160 aa, Homo sapiens
MQKMVVCGAKCCGDAPHVENREEETARIGPGVMESKEERALNNLIVENVNQENDEKDEKEQVANKGEPLALPLNVSEYCVPRGNRRRFRVRQPILQYRWDIMHRLGEPQARMREENMERIGEEVRQLMEKLREKQLSHSLRAVSTDPPHHDHHDEFCLMP

SEQ ID NO: 15528 - protein, 1235 aa, Homo sapiens
MATGTGKHKLLSTGPTEPWSIREKLCLASSVMRSGDQNWVSVSRAIKPFAEPGRPPDWFSQKHCASQYSELLETTETPKRKRGEKGEVVETVEDVIVRKLTAERVEELKKVIKETQERYRRLKRDAELIQAGHMDSRLDELCNDIATKKKLEEEEAEVKRKATDAAYQARQAVKTPPRRLPTVMVRSPIDSASPGGDYPLGDLTPTTMEEATSGVNESEMAVASGHLNSTGVLLEVGGVLPMIHGGEIQQTPNTVAASPAASGAPTLSRLLEAGPTQFTTPLASFTTVASEPPVKLVPPPVESVSQATIVMMPALPAPSSAPAVSTTESVAPVSQPDNCVPMEAVGDPHTVTVSMDSSEISMIINSIKEECFRSGVAEAPVGSKAPSIDGKEELDLAEKMDIAVSYTGEELDFETVGDIIAIIEDKVDDHPEVLDVAAVEAALSFCEENDDPQSLPGPWEHPIQQERDKPVPLPAPEMTVKQERLDFEETENKGIHELVDIREPSAEIKVEPAEPEPVISGAEIVAGVVPATSMEPPELRSQDLDEELGSTAAGEIVEADVAIGKGDETPLTNVKTEASPESMLSPSHGSNPIEDPLEAETQHKFEMSDSLKEESGTIFGSQIKDAPGEDEEEDGVSEAASLEEPKEEDQGEGYLSEMDNEPPVSESDDGFSIHNATLQSHTLADSIPSSPASSQFSVCSEDQEAIQAQKIWKKAIMLVWRAAANHRYANVFLQPVTDDIAPGYHSIVQRPMDLSTIKKNIENGLIRSTAEFQRDIMLMFQNAVMYNSSDHDVYHMAVEMQRDVLEQIQQFLATQLIMQTSESGISAKSLRGRDSTRKQDASEKDSVPMGSPAFLLSLFMGHEWVWLDSEQDHPNDSELSNDCRSLFSSWDSSLDLDVGNWRETEDPEAEELEESSPEREPSELLVGDGGSEESQEAARKASHQNLLHFLSEVAYLMEPLCISSNESSEGCCPPSGTRQEGREIKASEGERELCRETEELSAKGDPLVAEKPLGENGKPEVASAPSVICTVQGLLTESEEGEAQQESKGEDQGEVYVSEMEDQPPSGECDDAFNIKETPLVDTLFSHATSSKLTDLSQDDPVQDHLLFKKTLLPVWKMIASHRFSSPFLKPVSERQAPGYKDVVKRPMDLTSLKRNLSKGRIRTMAQFLRDLMLMFQNAVMYNDSDHHVYHMAVEMRQEVLEQIQVLNIWLDKRKGSSSLEGEPANPVDDGKPVF

SEQ ID NO: 15529 - protein, 951 aa, Homo sapiens
MATGTGKHKLLSTGPTEPWSIREKLCLASSVMRSGDQNWVSVSRAIKPFAEPGRPPDWFSQKHCASQYSELLETTETPKRKRGEKGEVVETVEDVIVRKLTAERVEELKKVIKETQERYRRLKRDAELIQAGHMDSRLDELCNDIATKKKLEEEEAEVKRKATDAAYQARQAVKTPPRRLPTVMVRSPIDSASPGGDYPLGDLTPTTMEEATSGVTPGTLPSTPVTSFPGIPDTLPPGSAPLEAPMTPVTDDSPQKKMLGQKATPPPSPLLSELLKKGSLLPTSPRLVNESEMAVASGHLNSTGVLLEVGGVLPMIHGGEIQQTPNTVAASPAASGAPTLSRLLEAGPTQFTTPLASFTTVASEPPVKLVPPPVESVSQATIVMMPALPAPSSAPAVSTTESVAPVSQPDNCVPMEAVGDPHTVTVSMDSSEISMIINSIKEECFRSGVAEAPVGSKAPSIDGKEELDLAEKMDIAVSYTGEELDFETVGDIIAIIEDKVDDHPEVLDVAAVEAALSFCEENDDPQSLPGPWEHPIQQERDKPVPLPAPEMTVKQERLDFEETENKGIHELVDIREPSAEIKVEPAEPEPVISGAEIVAGVVPATSMEPPELRSQDLDEELGSTAAGEIVEADVAIGKGDETPLTNVKTEASPESMLSPSHGSNPIEDPLEAETQHKFEMSDSLKEESGTIFGSQIKDAPGEDEEEDGVSEAASLEEPKEEDQGEGYLSEMDNEPPVSESDDGFSIHNATLQSHTLADSIPSSPASSQFSVCSEDQEAIQAQKIWKKAIMLVWRAAANHRYANVFLQPVTDDIAPGYHSIVQRPMDLSTIKKNIENGLIRSTAEFQRDIMLMFQNAVMYNSSDHDVYHMAVEMQRDVLEQIQQFLATQLIMQTSESGISAKSLRGRDSTRKQDASEKDSVPMGSPAFLLSLFDGGTRGRRCAIEADMKMKK

SEQ ID NO: 15530 - protein, 757 aa, Homo sapiens
MSFAMTLKKKLEEEEAEVKRKATDAAYQARQAVKTPPRRLPTVMVRSPIDSASPGGDYPLGDLTPTTMEEATSGVTPGTLPSTPVTSFPGIPDTLPPGSAPLEAPMTPVTDDSPQKKMLGQKATPPPSPLLSELLKKGSLLPTSPRLVNESEMAVASGHLNSTGVLLEVGGVLPMIHGGEIQQTPNTVAASPAASESVSQATIVMMPALPAPSSAPAVSTTESVAPVSQPDNCVPMEAVGDPHTVTVSMDSSEISMIINSIKEECFRSGVAEAPVGSKAPSIDGKEELDLAEKMDIAVSYTGEELDFETVGDIIAIIEDKVDDHPEVLDVAAVEAALSFCEENDDPQSLPGPWEHPIQQERDKPVPLPAPEMTVKQERLDFEETENKGIHELVDIREPSAEIKVEPAEPEPVISGAEIVAGVVPATSMEPPELRSQDLDEELGSTAAGEIVEADVAIGKGDETPLTNVKTEASPESMLSPSHGSNPIEDPLEAETQHKFEMSDSLKEESGTIFGSQIKDAPGEDEEEDGVSEAASLEEPKEEDQGEGYLSEMDNEPPVSESDDGFSIHNATLQSHTLADSIPSSPASSQFSVCSEDQEAIQAQKIWKKAIMLVWRAAANHRYANVFLQPVTDDIAPGYHSIVQRPMDLSTIKKNIENGLIRSTAEFQRDIMLMFQNAVMYNSSDHDVYHMAVEMQRDVLEQIQQFLATQLIMQTSESGISAKSLRGRDSTRKQDASEKDGGTRGRRCAIEADMKMKK

SEQ ID NO: 15531 - protein, 866 aa, Homo sapiens
MATGTGKHKLLSTGPTEPWSIREKLCLASSVMRSGDQNWVSVSRAIKPFAEPGRPPDWFSQKHCASQYSELLETTETPKRKRGEKGEVVETVEDVIVRKLTAERVEELKKVIKETQERYRRLKRDAELIQAGHMDSRLDELCNDIATKKKLEEEEAEVKRKATDAAYQARQAVKTPPRRLPTVMVRSPIDSASPGGDYPLGDLTPTTMEEATSGVTPGTLPSTPVTSFPGIPDTLPPGSAPLEAPMTPVTDDSPQKKMLGQKATPPPSPLLSELLKKGSLLPTSPRLVNESEMAVASGHLNSTGVLLEVGGVLPMIHGGEIQQTPNTVAASPAASVSQPDNCVPMEAVGDPHTVTVSMDSSEISMIINSIKEECFRSGVAEAPVGSKAPSIDGKEELDLAEKMDIAVSYTGEELDFETVGDIIAIIEDKVDDHPEVLDVAAVEAALSFCEENDDPQSLPGPWEHPIQQERDKPVPLPAPEMTVKQERLDFEETENKGIHELVDIREPSAEIKVEPAEPEPVISGAEIVAGVVPATSMEPPELRSQDLDEELGSTAAGEIVEADVAIGKGDETPLTNVKTEASPESMLSPSHGSNPIEDPLEAETQHKFEMSDSLKEESGTIFGSQIKDAPGEDEEEDGVSEAASLEEPKEEDQGEGYLSEMDNEPPVSESDDGFSIHNATLQSHTLADSIPSSPASSQFSVCSEDQEAIQAQKIWKKAIMLVWRAAANHRYANVFLQPVTDDIAPGYHSIVQRPMDLSTIKKNIENGLIRSTAEFQRDIMLMFQNAVMYNSSDHDVYHMAVEMQRDVLEQIQQFLATQLIMQTSESGISAKSLRGRDSTRKQDASEKDGGTRGRRCAIEADMKMKK

SEQ ID NO: 15532 - protein, 659 aa, Homo sapiens; identical to SEQ ID NO: 281

SEQ ID NO: 15533 - protein, 693 aa, Homo sapiens
MASWSIQQMVIGCPLCGRHCSGGEHTGELQKEEAMAAVILESIFLKRSQQKKKTSPLNFKKRLFLLTVHKLSYYEYDFERGRRGSKKGSIDVEKITCVETVVPEKNPPPERQIPRRGEESSEMEQISIIERFPYPFQVVYDEGPLYVFSPTEELRKRWIHQLKNVIRYNSDLVQKYHPCFWIDGQYLCCSQTAKNAMGCQILENRNGSLKPGSSHRKTKKPLPPTPEEDQILKKPLPPEPAAAPVSTSELKKVVALYDYMPMNANDLQLRKGDEYFILEESNLPWWRARDKNGQEGYIPSNYVTEAEDSIEMYEWYSKHMTRSQAEQLLKQEGKEGGFIVRDSSKAGKYTVSVFAKSTGDPQGVIRHYVVCSTPQSQYYLAEKHLFSTIPELINYHQHNSAGLISRLKYPVSQQNKNAPSTAGLGYGSWEIDPKDLTFLKELGTGQFGVVKYGKWRGQYDVAIKMIKEGSMSEDEFIEEAKVMMNLSHEKLVQLYGVCTKQRPIFIITEYMANGCLLNYLREMRHRFQTQQLLEMCKDVCEAMEYLESKQFLHRDLAARNCLVNDQGVVKVSDFGLSRYVLDDEYTSSVGSKFPVRWSPPEVLMYSKFSSKSDIWAFGVLMWEIYSLGKMPYERFTNSETAEHIAQGLRLYRPHLASEKVYTIMYSCWHEKADERPTFKILLSNILDVMDEES

SEQ ID NO: 15534 - protein, 289 aa, Homo sapiens
MKTLPAMLGTGKLFWVFFLIPYLDIWNIHGKESCDVQLYIKRQSEHSILAGDPFELECPVKYCANRPHVTWCKLNGTTCVKLEDRQTSWKEEKNISFFILHFEPVLPNDNGSYRCSANFQSNLIESHSTTLYVTDVKSASERPSKDEMASRPWLLYRLLPLGGLPLLITTCFCLFCCLRRHQGKQNELSDTAGREINLVDAHLKSEQTEASTRQNSQVLLSETGIYDNDPDLCFRMQEGSEVYSNPCLEENKPGIVYASLNHSVIGPNSRLARNVKEAPTEYASICVRS

SEQ ID NO: 15535 - protein, 241 aa, Homo sapiens
MKTLPAMLGTGKLFWVFFLIPYLDIWNIHGKESCDVQLYIKRQSEHSILAGDPFELECPVKYCANRPHVTWCKLNGTTCVKLEDRQTSWKEEKNISFFILHFEPVLPNDNGSYRCSANFQSNLIESHSTTLYVTGKQNELSDTAGREINLVDAHLKSEQTEASTRQNSQVLLSETGIYDNDPDLCFRMQEGSEVYSNPCLEENKPGIVYASLNHSVIGPNSRLARNVKEAPTEYASICVRS

SEQ ID NO: 15536 - protein, 975 aa, Homo sapiens
MSGIGNKRAAGEPGTSMPPEKKAAVEDSGTTVETIKLGGVSSTEELDIRTLQTKNRKLAEMLDQRQAIEDELREHIEKLERRQATDDASLLIVNRYWSQFDENIRIILKRYDLEQGLGDLLTERKALVVPEPEPDSDSNQERKDDRERGEGQEPAFSFLATLASSSSEEMESQLQERVESSRRAVSQIVTVYDKLQEKVELLSRKLNSGDNLIVEEAVQELNSFLAQENMRLQELTDLLQEKHRTMSQEFSKLQSKVETAESRVSVLESMIDDLQWDIDKIRKREQRLNRHLAEVLERVNSKGYKVYGAGSSLYGGTITINARKFEEMNAELEENKELAQNRLCELEKLRQDFEEVTTQNEKLKVELRSAVEQVVKETPEYRCMQSQFSVLYNESLQLKAHLDEARTLLHGTRGTHQHQVELIERDEVSLHKKLRTEVIQLEDTLAQVRKEYEMLRIEFEQTLAANEQAGPINREMRHLISSLQNHNHQLKGEVLRYKRKLREAQSDLNKTRLRSGSALLQSQSSTEDPKDEPAELKPDSEDLSSQSSASKASQEDANEIKSKRDEEERERERREKEREREREREKEKEREREKQKLKESEKERDSAKDKEKGKHDDGRKKEAEIIKQLKIELKKAQESQKEMKLLLDMYRSAPKEQRDKVQLMAAEKKSKAELEDLRQRLKDLEDKEKKENKKMADEDALRKIRAVEEQIEYLQKKLAMAKQEEEALLSEMDVTGQAFEDMQEQNIRLMQQLREKDDANFKLMSERIKSNQIHKLLKEEKEELADQVLTLKTQVDAQLQVVRKLEEKEHLLQSNIGTGEKELGLRTQALEMNKRKAMEAAQLADDLKAQLELAQKKLHDFQDEIVENSVTKEKDMFNFKRAQEDISRLRRKLETTKKPDNVPKCDEILMEEIKDYKARLTCPCCNMRKKDAVLTKCFHVFCFECVKTRYDTRQRKCPKCNAAFGANDFHRIYIG

SEQ ID NO: 15537 - protein, 261 aa, Homo sapiens
MKFGMGSAQACPCQVPRAASTTWVPCQICGPRERHGPRTPGGQLPGARRGPGPRRPAPLPARPPGALGSVLRPLRARPGCRPRRPHPAARCLPLRPHRPTRRHRRPGGFPLAWGSPQPAPRPAPGRSSALALAGGAAPGVARAQRPGGSGGRSHPGGPGSPRGGGTVGPGDRGPAAADGGRPQRTVRAAETRGAAAAPPLTLEGPVQSHHGTPALTQGPQSPRDGAQLGACTRPVDVRDSGGRPLPPPDTLASAGDFLCTM

SEQ ID NO: 15538 - protein, 101 aa, Homo sapiens
MKFGMGSAQACPCQVPRAASTTWVPCQICETRGAAAAPPLTLEGPVQSHHGTPALTQGPQSPRDGAQLGACTRPVDVRDSGGRPLPPPDTLASAGDFLCTM

SEQ ID NO: 15539 - protein, 344 aa, Homo sapiens
MGFNLTFHLSYKFRLLLLLTLCLTVVGWATSNYFVGAIQEIPKAKEFMANFHKTLILGKGKTLTNEASTKKVELDNCPSVSPYLRGQSKLIFKPDLTLEEVQAENPKVSRGRYRPQECKALQRVAILVPHRNREKHLMYLLEHLHPFLQRQQLDYGIYVIHQAEGKKFNRAKLLNVGYLEALKEENWDCFIFHDVDLVPENDFNLYKCEEHPKHLVVGRNSTGYRLRYSGYFGGVTALSREQFFKVNGFSNNYWGWGGEDDDLRLRVELQRMKISRPLPEVGKYTMVFHTRDKGNEVNAERMKLLHQVSRVWRTDGLSSCSYKLVSVEHNPLYINITVDFWFGA

SEQ ID NO: 15540 - protein, 327 aa, Homo sapiens
MFPSRRKAAQLPWEDGRSGLLSGGLPRKCSVFHLFVACLSLGFFSLLWLQLSCSGDVARAVRGQGQETSGPPRACPPEPPPEHWEEDASWGPHRLAVLVPFRERFEELLVFVPHMRRFLSRKKIRHHIYVLNQVDHFRFNRAALINVGFLESSNSTDYIAMHDVDLLPLNEELDYGFPEAGPFHVASPELHPLYHYKTYVGGILLLSKQHYRLCNGMSNRFWGWGREDDEFYRRIKGAGLQLFRPSGITTGYKTFRHLHDPAWRKRDQKRIAAQKQEQFKVDREGGLNTVKYHVASRTALSVGGAPCTVLNIMLDCDKTATPWCTFS

SEQ ID NO: 15541 - protein, 575 aa, Homo sapiens
MSAATHSPMMQVASGNGDRDPLPPGWEIKIDPQTGWPFFVDHNSRTTTWNDPRVPSEGPKETPSSANGPSREGSRLPPAREGHPVYPQLRPGYIPIPVLHEGAENRQVHPFHVYPQPGMQRFRTEAAAAAPQRSQSPLRGMPETTQPDKQCGQVAAAAAAQPPASHGPERSQSPAASDCSSSSSSASLPSSGRSSLGSHQLPRGYISIPVIHEQNVTRPAAQPSFHQAQKTHYPAQQGEYQTHQPVYHKIQGDDWEPRPLRAASPFRSSVQGASSREGSPARSSTPLHSPSPIRVHTVVDRPQQPMTHRETAPVSQPENKPESKPGPVGPELPPGHIPIQVIRKEVDSKPVSQKPPPPSEKVEVKVPPAPVPCPPPSPGPSAVPSSPKSVATEERAAPSTAPAEATPPKPGEAEAPPKHPGVLKVEAILEKVQGLEQAVDNFEGKKTDKKYLMIEEYLTKELLALDSVDPEGRADVRQARRDGVRKVQTILEKLEQKAIDVPGQVQVYELQPSNLEADQPLQAIMEMGAVAADKGKKNAGNAEDPHTETQQPEATAAATSNPSSMTDTPGNPAAP

SEQ ID NO: 15542 - protein, 292 aa, Homo sapiens
MAVPTELDGGSVKETAAEEESRVLAPGAAPFGNFPHYSRFHPPEQRLRLLPPELLRQLFPESPENGPILGLDVGCNSGDLSVALYKHFLSLPDGETCSDASREFRLLCCDIDPVLVKRAEKECPFPDALTFITLDFMNQRTRKVLLSSFLSQFGRSVFDIGFCMSITMWIHLNHGDHGLWEFLAHLSSLCHYLLVEPQPWKCYRAAARRLRKLGLHDFDHFHSLAIRGDMPNQIVQILTQDHGMELICCFGNTSWDRSLLLFRAKQTIETHPIPESLIEKGKEKNRLSFQKQ

SEQ ID NO: 15543 - protein, 39 aa, Homo sapiens
MAAGAVFLALSAQLLQARLMKEESPVVSWWLEPEDGTAL

SEQ ID NO: 15544 - protein, 43 aa, Homo sapiens
MAAGAVFLALSAQLLQARLMKEESPVVSWRLEPEDGTALCFIF

SEQ ID NO: 15545 - protein, 357 aa, Homo sapiens
MGTIQEAGKKTDVGVREIAEAPELGAALRHGELELKEEWQDEEFPRLLPEEAGTSEDPEDPKGDSQAAAGTPSTLALCGQRPMRKRLSAPELRLSLTKGPGNDGASPTQSAPSSPDGSSDLEIDELETPSDSEQLDSGHEFEWEDELPRAEGLGTSETAERLGRGCMWDVTGEDGHHWRVFRMGPREQRVDMTVIEPYKKVLSHGGYHGDGLNAVILFASCYLPRSSIPNYTYVMEHLFRYMVGTLELLVAENYLLVHLSGGTSRAQVPPLSWIRQCYRTLDRRLRKNLRALVVVHATWYVKAFLALLRPFISSKFTRKIRFLDSLGELAQLISLDQVHIPEAVRQLDRDLHGSGGT

SEQ ID NO: 15546 - protein, 275 aa, Homo sapiens
MRKRLSAPELRLSLTKGPGNDGASPTQSAPSSPDGSSDLEIDELETPSDSEQLDSGHEFEWEDELPRAEGLGTSETAERLGRGCMWDVTGEDGHHWRVFRMGPREQRVDMTVIEPYKKVLSHGGYHGDGLNAVILFASCYLPRSSIPNYTYVMEHLFRYMVGTLELLVAENYLLVHLSGGTSRAQVPPLSWIRQCYRTLDRRLRKNLRALVVVHATWYVKAFLALLRPFISSKFTRKIRFLDSLGELAQLISLDQVHIPEAVRQLDRDLHGSGGT

SEQ ID NO: 15547 - protein, 204 aa, Homo sapiens
MRKRLSAPELRLSLTKGPGNDGASPTQSAPSSPDGSSDLEIDELETPSDSEQLDSGHEFEWEDELPRAEGLGTSETAERLGRGCMWDVTGEDGHHWRVFRMGPREQRVDMTVIEPYKKVLSHGGYHGDGLNAVILFASCYLPRSSIPNYTYVMEHLFRYMVGTLELLVAENYLLVHLSGGTSRAQVPPLSWIRQCYRTLDRRVL

SEQ ID NO: 15548 - protein, 329 aa, Homo sapiens
MSAEASGPAAAAAPSLEAPKPSGLEPGPAAYGLKPLTPNSKYVKLNVGGSLHYTTLRTLTGQDTMLKAMFSGRVEVLTDAGGWVLIDRSGRHFGTILNYLRDGSVPLPESTRELGELLGEARYYLVQGLIEDCQLALQQKRETLSPLCLIPMVTSPREEQQLLASTSKPVVKLLHNRSNNKYSYTSTSDDNLLKNIELFDKLALRFHGRLLFLKDVLGDEICCWSFYGQGRKIAEVCCTSIVYATEKKQTKVEFPEARIFEETLNILIYETPRGPDPALLEATGGAAGAGGAGRGEDEENREHRVRRIHVRRHITHDERPHGQQIVFKD

SEQ ID NO: 15549 - protein, 298 aa, Homo sapiens
MGPKDSAKCLHRGPQPSHWAAGDGPTQERCGPRSLGSPVLGLDTCRAWDHVDGQILGQLRPLTEEEEEEGAGATLSRGPAFPGMGSEELRLASFYDWPLTAEVPPELLAAAGFFHTGHQDKVRCFFCYGGLQSWKRGDDPWTEHAKWFPSCQFLLRSKGRDFVHSVQETHSQLLGSWDPWEEPEDAAPVAPSVPASGYPELPTPRREVQSESAQEPGGVSPAEAQRAWWVLEPPGARDVEAQLRRLQEERTCKVCLDRAVSIVFVPCGHLVCAECAPGLQLCPICRAPVRSRVRTFLS

SEQ ID NO: 15550 - protein, 280 aa, Homo sapiens
MGPKDSAKCLHRGPQPSHWAAGDGPTQERCGPRSLGSPVLGLDTCRAWDHVDGQILGQLRPLTEEEEEEGAGATLSRGPAFPGMGSEELRLASFYDWPLTAEVPPELLAAAGFFHTGHQDKVRCFFCYGGLQSWKRGDDPWTEHAKWFPSCQFLLRSKGRDFVHSVQETHSQLLGSWDPWEEPEDAAPVAPSVPASGYPELPTPRREVQSESAQEPGARDVEAQLRRLQEERTCKVCLDRAVSIVFVPCGHLVCAECAPGLQLCPICRAPVRSRVRTFLS

SEQ ID NO: 15551 - protein, 454 aa, Homo sapiens
MHLTVFLLKGIVGFLWSCWVLVGYAKGGLGDNHVHSSFIYRRLRNHERREIQREILSILGLPHRPRPFSPGKQASSAPLFMLDLYNAMTNEENPEESEYSVRASLAEETRGARKGYPASPNGYPRRIQLSRTTPLTTQSPPLASLHDTNFLNDADMVMSFVNLVERDKDFSHQRRHYKEFRFDLTQIPHGEAVTAAEFRIYKDRSNNRFENETIKISIYQIIKEYTNRDADLFLLDTRKAQALDVGWLVFDITVTSNHWVINPQNNLGLQLCAETGDGRSINVKSAGLVGRQGPQSKQPFMVAFFKASEVLLRSVRAANKRKNQNRNKSSSHQDSSRMSSVGDYNTSEQKQACKKHELYVSFRDLGWQDWIIAPEGYAAFYCDGECSFPLNAHMNATNHAIVQTLVHLMFPDHVPKPCCAPTKLNAISVLYFDDSSNVILKKYRNMVVRSCGCH

SEQ ID NO: 15552 - protein, 417 aa, Homo sapiens
MHLTVFLLKGIVGFLWSCWVLVGYAKGGLGDNHVHSSFIYRRLRNHERREIQREILSILGLPHRPRPFSPGKQASSAPLFMLDLYNAMTNEENPEESEYSVRASLAEETRGARKGYPASPNGYPRRIQLSRTTPLTTQSPPLASLHDTNFLNDADMVMSFVNLVERDKDFSHQRRHYKEFRFDLTQIPHGEAVTAAEFRIYKDRSNNRFENETIKISIYQIIKEYTNRDADLFLLDTRKAQALDVGWLVFDITVTSNHWVINPQNNLGLQLCAETGDGRSINVKSAGLVGRQGPQSKQPFMVAFFKASEVLLRSVRAANKRKNQNRNKSSSHQDSSRMSSVGDYNTSEQKQACKKHELYVSFRDLGWQVHLMFPDHVPKPCCAPTKLNAISVLYFDDSSNVILKKYRNMVVRSCGCH

SEQ ID NO: 15553 - protein, 421 aa, Homo sapiens
MYAFVRFLEDNVCYALPVSCVRDFSPRSRLDFDNQKVYAVYRGPEELGAGPESPPRAPRDWGALLLHKAQILALAEDKSDLENSVMQKKIKIPKLSLNHVEEDGEVKDYGEEDLQLRHIKRPEGRKPSEVAHKSIEAVVARLEKQNGLSLGHSTCPEEVFVEASPGTEDMDSLEDAVVPRALYEELLRNYQQQQEEMRHLQQELERTRRQLVQQAKKLKEYGALVSEMKELRDLNRRLQDVLLLRLGSGPAIDLEKVKSECLEPEPELRSTFSEEANTSSYYPAPAPVMDKYILDNGKVHLGSGIWVDEEKWHQLQVTQGDSKYTKNLAVMIWGTDVLKNRSVTGVATKKKKDAVPKPPLSPHKLSIVRECLYDRIAQETVDETEIAQRLSKVNKYICEKIMDINKSCKNEERREAKYNLQ

SEQ ID NO: 15554 - protein, 252 aa, Homo sapiens
MDSLEDAVVPRALYEELLRNYQQQQEEMRHLQQELERTRRQLVQQAKKLKEYGALVSEMKELRDLNRRLQDVLLLRLGSGPAIDLEKVKSECLEPEPELRSTFSEEANTSSYYPAPAPVMDKYILDNGKVHLGSGIWVDEEKWHQLQVTQGDSKYTKNLAVMIWGTDVLKNRSVTGVATKKKKDAVPKPPLSPHKLSIVRECLYDRIAQETVDETEIAQRLSKVNKYICEKIMDINKSCKNEERREAKYNLQ

SEQ ID NO: 15555 - protein, 593 aa, Homo sapiens
MAEMGSKGVTAGKIASNVQKKLTRAQEKVLQKLGKADETKDEQFEQCVQNFNKQLTEGTRLQKDLRTYLASVKAMHEASKKLNECLQEVYEPDWPGRDEANKIAENNDLLWMDYHQKLVDQALLTMDTYLGQFPDIKSRIAKRGRKLVDYDSARHHYESLQTAKKKDEAKIAKPVSLLEKAAPQWCQGKLQAHLVAQTNLLRNQAEEELIKAQKVFEEMNVDLQEELPSLWNSRVGFYVNTFQSIAGLEENFHKEMSKLNQNLNDVLVGLEKQHGSNTFTVKAQPSDNAPAKGNKSPSPPDGSPAATPEIRVNHEPEPAGGATPGATLPKSPSQLRKGPPVPPPPKHTPSKEVKQEQILSLFEDTFVPEISVTTPSQFEAPGPFSEQASLLDLDFDPLPPVTSPVKAPTPSGQSIPWDLWEPTESPAGSLPSGEPSAAEGTFAVSWPSQTAEPGPAQPAEASEVAGGTQPAAGAQEPGETAASEAASSSLPAVVVETFPATVNGTVEGGSGAGRLDLPPGFMFKVQAQHDYTATDTDELQLKAGDVVLVIPFQNPEEQDEGWLMGVKESDWNQHKELEKCRGVFPENFTERVP

SEQ ID NO: 15556 - protein, 518 aa, Homo sapiens
MAEMGSKGVTAGKIASNVQKKLTRAQEKVLQKLGKADETKDEQFEQCVQNFNKQLTEGTRLQKDLRTYLASVKAMHEASKKLNECLQEVYEPDWPGRDEANKIAENNDLLWMDYHQKLVDQALLTMDTYLGQFPDIKSRIAKRGRKLVDYDSARHHYESLQTAKKKDEAKIAKAEEELIKAQKVFEEMNVDLQEELPSLWNSRVGFYVNTFQSIAGLEENFHKEMSKLNQNLNDVLVGLEKQHGSNTFTVKAQPSDNAPAKGNKSPSPPDGSPAATPEIRVNHEPEPAGGATPGATLPKSPSQLRKGPPVPPPPKHTPSKEVKQEQILSLFEDTFVPEISVTTPSQPTESPAGSLPSGEPSAAEGTFAVSWPSQTAEPGPAQPAEASEVAGGTQPAAGAQEPGETAASEAASSSLPAVVVETFPATVNGTVEGGSGAGRLDLPPGFMFKVQAQHDYTATDTDELQLKAGDVVLVIPFQNPEEQDEGWLMGVKESDWNQHKELEKCRGVFPENFTERVP

SEQ ID NO: 15557 - protein, 506 aa, Homo sapiens
MAEMGSKGVTAGKIASNVQKKLTRAQEKVLQKLGKADETKDEQFEQCVQNFNKQLTEGTRLQKDLRTYLASVKAMHEASKKLNECLQEVYEPDWPGRDEANKIAENNDLLWMDYHQKLVDQALLTMDTYLGQFPDIKSRIAKRGRKLVDYDSARHHYESLQTAKKKDEAKIAKPVSLLEKAAPQWCQGKLQAHLVAQTNLLRNQAEEELIKAQKVFEEMNVDLQEELPSLWNSRVGFYVNTFQSIAGLEENFHKEMSKLNQNLNDVLVGLEKQHGSNTFTVKAQPSDNAPAKGNKSPSPPDGSPAATPEIRVNHEPEPAGGATPGATLPKSPSQPTESPAGSLPSGEPSAAEGTFAVSWPSQTAEPGPAQPAEASEVAGGTQPAAGAQEPGETAASEAASSSLPAVVVETFPATVNGTVEGGSGAGRLDLPPGFMFKVQAQHDYTATDTDELQLKAGDVVLVIPFQNPEEQDEGWLMGVKESDWNQHKELEKCRGVFPENFTERVP

SEQ ID NO: 15558 - protein, 475 aa, Homo sapiens
MAEMGSKGVTAGKIASNVQKKLTRAQEKVLQKLGKADETKDEQFEQCVQNFNKQLTEGTRLQKDLRTYLASVKAMHEASKKLNECLQEVYEPDWPGRDEANKIAENNDLLWMDYHQKLVDQALLTMDTYLGQFPDIKSRIAKRGRKLVDYDSARHHYESLQTAKKKDEAKIAKAEEELIKAQKVFEEMNVDLQEELPSLWNSRVGFYVNTFQSIAGLEENFHKEMSKLNQNLNDVLVGLEKQHGSNTFTVKAQPSDNAPAKGNKSPSPPDGSPAATPEIRVNHEPEPAGGATPGATLPKSPSQPTESPAGSLPSGEPSAAEGTFAVSWPSQTAEPGPAQPAEASEVAGGTQPAAGAQEPGETAASEAASSSLPAVVVETFPATVNGTVEGGSGAGRLDLPPGFMFKVQAQHDYTATDTDELQLKAGDVVLVIPFQNPEEQDEGWLMGVKESDWNQHKELEKCRGVFPENFTERVP

SEQ ID NO: 15559 - protein, 550 aa, Homo sapiens
MAEMGSKGVTAGKIASNVQKKLTRAQEKVLQKLGKADETKDEQFEQCVQNFNKQLTEGTRLQKDLRTYLASVKAMHEASKKLNECLQEVYEPDWPGRDEANKIAENNDLLWMDYHQKLVDQALLTMDTYLGQFPDIKSRIAKRGRKLVDYDSARHHYESLQTAKKKDEAKIAKPVSLLEKAAPQWCQGKLQAHLVAQTNLLRNQAEEELIKAQKVFEEMNVDLQEELPSLWNSRVGFYVNTFQSIAGLEENFHKEMSKLNQNLNDVLVGLEKQHGSNTFTVKAQPSDNAPAKGNKSPSPPDGSPAATPEIRVNHEPEPAGGATPGATLPKSPSQFEAPGPFSEQASLLDLDFDPLPPVTSPVKAPTPSGQSIPWDLWEPTESPAGSLPSGEPSAAEGTFAVSWPSQTAEPGPAQPAEASEVAGGTQPAAGAQEPGETAASEAASSSLPAVVVETFPATVNGTVEGGSGAGRLDLPPGFMFKVQAQHDYTATDTDELQLKAGDVVLVIPFQNPEEQDEGWLMGVKESDWNQHKELEKCRGVFPENFTERVP

SEQ ID NO: 15560 - protein, 482 aa, Homo sapiens
MAEMGSKGVTAGKIASNVQKKLTRAQEKVLQKLGKADETKDEQFEQCVQNFNKQLTEGTRLQKDLRTYLASVKAMHEASKKLNECLQEVYEPDWPGRDEANKIAENNDLLWMDYHQKLVDQALLTMDTYLGQFPDIKSRIAKRGRKLVDYDSARHHYESLQTAKKKDEAKIAKAEEELIKAQKVFEEMNVDLQEELPSLWNSRVGFYVNTFQSIAGLEENFHKEMSKLNQNLNDVLVGLEKQHGSNTFTVKAQPSDNAPAKGNKSPSPPDGSPAATPEIRVNHEPEPAGGATPGATLPKSPSQLRKGPPVPPPPKHTPSKEVKQEQILSLFEDTFVPEISVTTPSQPAEASEVAGGTQPAAGAQEPGETAASEAASSSLPAVVVETFPATVNGTVEGGSGAGRLDLPPGFMFKVQAQHDYTATDTDELQLKAGDVVLVIPFQNPEEQDEGWLMGVKESDWNQHKELEKCRGVFPENFTERVP

SEQ ID NO: 15561 - protein, 439 aa, Homo sapiens
MAEMGSKGVTAGKIASNVQKKLTRAQEKVLQKLGKADETKDEQFEQCVQNFNKQLTEGTRLQKDLRTYLASVKAMHEASKKLNECLQEVYEPDWPGRDEANKIAENNDLLWMDYHQKLVDQALLTMDTYLGQFPDIKSRIAKRGRKLVDYDSARHHYESLQTAKKKDEAKIAKAEEELIKAQKVFEEMNVDLQEELPSLWNSRVGFYVNTFQSIAGLEENFHKEMSKLNQNLNDVLVGLEKQHGSNTFTVKAQPSDNAPAKGNKSPSPPDGSPAATPEIRVNHEPEPAGGATPGATLPKSPSQPAEASEVAGGTQPAAGAQEPGETAASEAASSSLPAVVVETFPATVNGTVEGGSGAGRLDLPPGFMFKVQAQHDYTATDTDELQLKAGDVVLVIPFQNPEEQDEGWLMGVKESDWNQHKELEKCRGVFPENFTERVP

SEQ ID NO: 15562 - protein, 454 aa, Homo sapiens
MAEMGSKGVTAGKIASNVQKKLTRAQEKVLQKLGKADETKDEQFEQCVQNFNKQLTEGTRLQKDLRTYLASVKAMHEASKKLNECLQEVYEPDWPGRDEANKIAENNDLLWMDYHQKLVDQALLTMDTYLGQFPDIKSRIAKRGRKLVDYDSARHHYESLQTAKKKDEAKIAKAEEELIKAQKVFEEMNVDLQEELPSLWNSRVGFYVNTFQSIAGLEENFHKEMSKLNQNLNDVLVGLEKQHGSNTFTVKAQPRKKSKLFSRLRRKKNSDNAPAKGNKSPSPPDGSPAATPEIRVNHEPEPAGGATPGATLPKSPSQPAEASEVAGGTQPAAGAQEPGETAASEAASSSLPAVVVETFPATVNGTVEGGSGAGRLDLPPGFMFKVQAQHDYTATDTDELQLKAGDVVLVIPFQNPEEQDEGWLMGVKESDWNQHKELEKCRGVFPENFTERVP

SEQ ID NO: 15563 - protein, 409 aa, Homo sapiens
MAEMGSKGVTAGKIASNVQKKLTRAQEKVLQKLGKADETKDEQFEQCVQNFNKQLTEGTRLQKDLRTYLASVKAMHEASKKLNECLQEVYEPDWPGRDEANKIAENNDLLWMDYHQKLVDQALLTMDTYLGQFPDIKSRIAKRGRKLVDYDSARHHYESLQTAKKKDEAKIAKAEEELIKAQKVFEEMNVDLQEELPSLWNSRVGFYVNTFQSIAGLEENFHKEMSKLNQNLNDVLVGLEKQHGSNTFTVKAQPSDNAPAKGNKSPSPPDGSPAATPEIRVNHEPEPAGGATPGATLPKSPSQSSLPAVVVETFPATVNGTVEGGSGAGRLDLPPGFMFKVQAQHDYTATDTDELQLKAGDVVLVIPFQNPEEQDEGWLMGVKESDWNQHKELEKCRGVFPENFTERVP

SEQ ID NO: 15564 - protein, 424 aa, Homo sapiens
MAEMGSKGVTAGKIASNVQKKLTRAQEKVLQKLGKADETKDEQFEQCVQNFNKQLTEGTRLQKDLRTYLASVKAMHEASKKLNECLQEVYEPDWPGRDEANKIAENNDLLWMDYHQKLVDQALLTMDTYLGQFPDIKSRIAKRGRKLVDYDSARHHYESLQTAKKKDEAKIAKAEEELIKAQKVFEEMNVDLQEELPSLWNSRVGFYVNTFQSIAGLEENFHKEMSKLNQNLNDVLVGLEKQHGSNTFTVKAQPRKKSKLFSRLRRKKNSDNAPAKGNKSPSPPDGSPAATPEIRVNHEPEPAGGATPGATLPKSPSQSSLPAVVVETFPATVNGTVEGGSGAGRLDLPPGFMFKVQAQHDYTATDTDELQLKAGDVVLVIPFQNPEEQDEGWLMGVKESDWNQHKELEKCRGVFPENFTERVP

SEQ ID NO: 15565 - protein, 497 aa, Homo sapiens
MAEMGSKGVTAGKIASNVQKKLTRAQEKVLQKLGKADETKDEQFEQCVQNFNKQLTEGTRLQKDLRTYLASVKAMHEASKKLNECLQEVYEPDWPGRDEANKIAENNDLLWMDYHQKLVDQALLTMDTYLGQFPDIKSRIAKRGRKLVDYDSARHHYESLQTAKKKDEAKIAKAEEELIKAQKVFEEMNVDLQEELPSLWNSRVGFYVNTFQSIAGLEENFHKEMSKLNQNLNDVLVGLEKQHGSNTFTVKAQPRKKSKLFSRLRRKKNSDNAPAKGNKSPSPPDGSPAATPEIRVNHEPEPAGGATPGATLPKSPSQLRKGPPVPPPPKHTPSKEVKQEQILSLFEDTFVPEISVTTPSQPAEASEVAGGTQPAAGAQEPGETAASEAASSSLPAVVVETFPATVNGTVEGGSGAGRLDLPPGFMFKVQAQHDYTATDTDELQLKAGDVVLVIPFQNPEEQDEGWLMGVKESDWNQHKELEKCRGVFPENFTERVP

SEQ ID NO: 15566 - protein, 273 aa, Homo sapiens
MTAAETGRGKPRLGGGSGLGGSPAAVVWLHVGATGRDAVSPREPVVAAQAAGRPLKLPRRLLRQPTPGLRGAESGPTVDMPVPSSFNDIGQGWRLRHFVSWLWYEREVTLLERWIQDLCTRVVLRIGSAHFYAIVWVNGVDTVEHEGGYLPFEADISSLFQVEPLPSHLCITIAINNTLTPQPCHQGPSVHDRHLQVGTILPPLHAPTFPPHPVVFLPGTGYPKGYFVQNTDFDFFSYAGLLWSLLLYTTPPTYIDDVTVTTGVKRDSGEGFW

SEQ ID NO: 15567 - protein, 196 aa, Homo sapiens
MGSEQSSEAESRPNDLNSSVTPSPAKHRAKMDDIVVVAQGSQASRNVSNDPDVIKLQEIPTFQPLLKGLLSGQTSPTNAKLEKLDSQQVLQLCLRYQDHLHQCAEAVAFDQNALVKRIKEMDLSVETLFSFMQERQKRYAKYAEQIQKVNEMSAILRRIQMGIDQTVPLLDRLNSMLPEGERLEPFSMKPDRELRL

SEQ ID NO: 15568 - protein, 148 aa, Homo sapiens
MGSEQSSEAESRPNDLNSSGLLSGQTSPTNAKLEKLDSQQVLQLCLRYQDHLHQCAEAVAFDQNALVKRIKEMDLSVETLFSFMQERQKRYAKYAEQIQKVNEMSAILRRIQMGIDQTVPLLDRLNSMLPEGERLEPFSMKPDRELRL

SEQ ID NO: 15569 - protein, 454 aa, Homo sapiens
MPRCPAGAMDEGPVDLRTRPKAAGLPGAALPLRKRPLRAPSPEPAAPRGAAGLVVPLDPLRGGCDLPAVPGPPHGLARPEALYYPGALLPLYPTRAMGSPFPLVNLPTPLYPMMCPMEHPLSADIAMATRADEDGDTPLHIAVVQGNLPAVHRLVNLFQQGGRELDIYNNLRQTPLHLAVITTLPSVVRLLVTAGASPMALDRHGQTAAHLACEHRSPTCLRALLDSAAPGTLDLEARNYDGLTALHVAVNTECQETVQLLLERGADIDAVDIKSGRSPLIHAVENNSLSMVQLLLQHGANVNAQMYSGSSALHSASGRGLLPLVRTLVRSGADSSLKNCHNDTPLMVARSRRVIDILRGKATRPASTSQPDPSPDRSANTSPESSSRLSSNGLLSASPSSSPSQSPPRDPPGFPMAPPNFFLPSPSPPAFLPFAGVLRGPGRPVPPSPAPGGS

SEQ ID NO: 15570 - protein, 500 aa, Homo sapiens
MALMLSLVLSLLKLGSGQWQVFGPDKPVQALVGEDAAFSCFLSPKTNAEAMEVRFFRGQFSSVVHLYRDGKDQPFMQMPQYQGRTKLVKDSIAEGRISLRLENITVLDAGLYGCRISSQSYYQKAIWELQVSALGSVPLISITGYVDRDIQLLCQSSGWFPRPTAKWKGPQGQDLSTDSRTNRDMHGLFDVEISLTVQENAGSISCSMRHAHLSREVESRVQIGDTFFEPISWHLATKVLGILCCGLFFGIVGLKIFFSKFQWKIQAELDWRRKHGQAELRDARKHAVEVTLDPETAHPKLCVSDLKTVTHRKAPQEVPHSEKRFTRKSVVASQSFQAGKHYWEVDGGHNKRWRVGVCRDDVDRRKEYVTLSPDHGYWVLRLNGEHLYFTLNPRFISVFPRTPPTKIGVFLDYECGTISFFNINDQSLIYTLTCRFEGLLRPYIEYPSYNEQNGTPIVICPVTQESEKEASWQRASAIPETSNSESSSQATTPFLPRGEM

SEQ ID NO: 15571 - protein, 333 aa, Homo sapiens
MALMLSLVLSLLKLGSGQWQVFGPDKPVQALVGEDAAFSCFLSPKTNAEAMEVRFFRGQFSSVVHLYRDGKDQPFMQMPQYQGRTKLVKDSIAEGRISLRLENITVLDAGLYGCRISSQSYYQKAIWELQVSALGSVPLISITGYVDRDIQLLCQSSGWFPRPTAKWKGPQGQDLSTDSRTNRDMHGLFDVEISLTVQENAGSISCSMRHAHLSREVESRVQIGDTFFEPISWHLATKVLGILCCGLFFGIVGLKIFFSKFQCKREREAWAGALFMVPAGTGSEMLPHPAASLLLVLASRGPGPKKENPGGTGLEKKARTGRIERRPETRSGG

SEQ ID NO: 15572 - protein, 340 aa, Homo sapiens
MALMLSLVLSLLKLGSGQWQVFGPDKPVQALVGEDAAFSCFLSPKTNAEAMEVRFFRGQFSSVVHLYRDGKDQPFMQMPQYQGRTKLVKDSIAEGRISLRLENITVLDAGLYGCRISSQSYYQKAIWELQVSALGSVPLISITGYVDRDIQLLCQSSGWFPRPTAKWKGPQGQDLSTDSRTNRDMHGLFDVEISLTVQENAGSISCSMRHAHLSREVESRVQIGDTFFEPISWHLATKVLGILCCGLFFGIVGLKIFFSKFQCKREREAWAGALFMVPAGTGSEMLPHPAASLLLVLASRGPGPKKLEKKARTGRIERRPETRSGGDSGSRDGSPEALRF

SEQ ID NO: 15573 - protein, 316 aa, Homo sapiens
MHGLFDVEISLTVQENAGSISCSMRHAHLSREVESRVQIGDTFFEPISWHLATKVLGILCCGLFFGIVGLKIFFSKFQWKIQAELDWRRKHGQAELRDARKHAVEVTLDPETAHPKLCVSDLKTVTHRKAPQEVPHSEKRFTRKSVVASQSFQAGKHYWEVDGGHNKRWRVGVCRDDVDRRKEYVTLSPDHGYWVLRLNGEHLYFTLNPRFISVFPRTPPTKIGVFLDYECGTISFFNINDQSLIYTLTCRFEGLLRPYIEYPSYNEQNGTPIVICPVTQESEKEASWQRASAIPETSNSESSSQATTPFLPRGEM

SEQ ID NO: 15574 - protein, 347 aa, Homo sapiens
MALMLSLVLSLLKLGSGQWQVFGPDKPVQALVGEDAAFSCFLSPKTNAEAMEVRFFRGQFSSVVHLYRDGKDQPFMQMPQYQGRTKLVKDSIAEGRISLRLENITVLDAGLYGCRISSQSYYQKAIWELQVSALGSVPLISITGYVDRDIQLLCQSSGWFPRPTAKWKGPQGQDLSTDSRTNRDMHGLFDVEISLTVQENAGSISCSMRHAHLSREVESRVQIGDTFFEPISWHLATKVLGILCCGLFFGIVGLKIFFSKFQCKREREAWAGALFMVPAGTGSEMLPHPAASLLLVLASRGPGPKKENPGGTGLEKKARTGRIERRPETRSGGDSGSRDGSPEALRF

SEQ ID NO: 15575 - protein, 384 aa, Homo sapiens
MALMLSLVLSLLKLGSALGSVPLISITGYVDRDIQLLCQSSGWFPRPTAKWKGPQGQDLSTDSRTNRDMHGLFDVEISLTVQENAGSISCSMRHAHLSREVESRVQIGDTFFEPISWHLATKVLGILCCGLFFGIVGLKIFFSKFQWKIQAELDWRRKHGQAELRDARKHAVEVTLDPETAHPKLCVSDLKTVTHRKAPQEVPHSEKRFTRKSVVASQSFQAGKHYWEVDGGHNKRWRVGVCRDDVDRRKEYVTLSPDHGYWVLRLNGEHLYFTLNPRFISVFPRTPPTKIGVFLDYECGTISFFNINDQSLIYTLTCRFEGLLRPYIEYPSYNEQNGTPIVICPVTQESEKEASWQRASAIPETSNSESSSQATTPFLPRGEM

SEQ ID NO: 15576 - protein, 375 aa, Homo sapiens
MWTWFVKSLGSVPLISITGYVDRDIQLLCQSSGWFPRPTAKWKGPQGQDLSTDSRTNRDMHGLFDVEISLTVQENAGSISCSMRHAHLSREVESRVQIGDTFFEPISWHLATKVLGILCCGLFFGIVGLKIFFSKFQWKIQAELDWRRKHGQAELRDARKHAVEVTLDPETAHPKLCVSDLKTVTHRKAPQEVPHSEKRFTRKSVVASQSFQAGKHYWEVDGGHNKRWRVGVCRDDVDRRKEYVTLSPDHGYWVLRLNGEHLYFTLNPRFISVFPRTPPTKIGVFLDYECGTISFFNINDQSLIYTLTCRFEGLLRPYIEYPSYNEQNGTPIVICPVTQESEKEASWQRASAIPETSNSESSSQATTPFLPRGEM

SEQ ID NO: 15577 - protein, 455 aa, Homo sapiens
MVDFPGYNLSGAVASFLFILLTMKQSEDFRVIGPAHPILAGVGEDALLTCQLLPKRTTMHVEVRWYRSEPSTPVFVHRDGVEVTEMQMEEYRGWVEWIENGIAKGNVALKIHNIQPSDNGQYWCHFQDGNYCGETSLLLKVAGLGSAPSIHMEGPGESGVQLVCTARGWFPEPQVYWEDIRGEKLLAVSEHRIQDKDGLFYAEATLVVRNASAESVSCLVHNPVLTEEKGSVISLPEKLQTELASLKVNGPSQPILVRVGEDIQLTCYLSPKANAQSMEVRWDRSHRYPAVHVYMDGDHVAGEQMAEYRGRTVLVSDAIDEGRLTLQILSARPSDDGQYRCLFEKDDVYQEASLDLKVVSLGSSPLITVEGQEDGEMQPMCSSDGWFPQPHVPWRDMEGKTIPSSSQALTQGSHGLFHVQTLLRVTNISAVDVTCSISIPFLGEEKIATFSLSGW

SEQ ID NO: 15578 - protein, 388 aa, Homo sapiens
MVDFPGYNLSGAVASFLFILLTMKQSEDFRVIGPAHPILAGVGEDALLTCQLLPKRTTMHVEVRWYRSEPSTPVFVHRDGVEVTEMQMEEYRGWVEWIENGIAKGNVALKIHNIQPSDNGQYWCHFQDGNYCGETSLLLKVAEKLQTELASLKVNGPSQPILVRVGEDIQLTCYLSPKANAQSMEVRWDRSHRYPAVHVYMDGDHVAGEQMAEYRGRTVLVSDAIDEGRLTLQILSARPSDDGQYRCLFEKDDVYQEASLDLKVVSLGSSPLITVEGQEDGEMQPMCSSDGWFPQPHVPWRDMEGKTIPSSSQALTQGSHGLFHVQTLLRVTNISAVDVTCSISIPFLGEEKIATFSLSESRMTFLWKTLLVWGLLLAVAVGLPRKRS

SEQ ID NO: 15579 - protein, 270 aa, Homo sapiens
MVDFPGYNLSGAVASFLFILLTMKQSEDFRVIGPAHPILAGVGEDALLTCQLLPKRTTMHVEVRWYRSEPSTPVFVHRDGVEVTEMQMEEYRGWVEWIENGIAKGNVALKIHNIQPSDNGQYWCHFQDGNYCGETSLLLKVAEKLQTELASLKVNGPSQPILVRVGEDIQLTCYLSPKANAQSMEVRWDRSHRYPAVHVYMDGDHVAGEQMAEYRGRTVLVSDAIDEGRLTLQILSARPSDDGQYRCLFEKDDVYQEASLDLKVVWVLPH

SEQ ID NO: 15580 - protein, 245 aa, Homo sapiens
MVDFPGYNLSGAVASFLFILLTMKQSEKLQTELASLKVNGPSQPILVRVGEDIQLTCYLSPKANAQSMEVRWDRSHRYPAVHVYMDGDHVAGEQMAEYRGRTVLVSDAIDEGRLTLQILSARPSDDGQYRCLFEKDDVYQEASLDLKVVSLGSSPLITVEGQEDGEMQPMCSSDGWFPQPHVPWRDMEGKTIPSSSQALTQGSHGLFHVQTLLRVTNISAVDVTCSISIPFLGEEKIATFSLSGW

SEQ ID NO: 15581 - protein, 178 aa, Homo sapiens
MEVRWDRSHRYPAVHVYMDGDHVAGEQMAEYRGRTVLVSDAIDEGRLTLQILSARPSDDGQYRCLFEKDDVYQEASLDLKVVSLGSSPLITVEGQEDGEMQPMCSSDGWFPQPHVPWRDMEGKTIPSSSQALTQGSHGLFHVQTLLRVTNISAVDVTCSISIPFLGEEKIATFSLSGW

SEQ ID NO: 15582 - protein, 259 aa, Homo sapiens
MVDFPGYNLSGAVASFLFILLTMKQSEDFRVIGPAHPILAGVGEDALLTCQLLPKRTTMHVEVRWYRSEPSTPVFVHRDGVEVTEMQMEEYRGWVEWIENGIAKGNVALKIHNIQPSDNGQYWCHFQDGNYCGETSLLLKVAGLGSAPSIHMEGPGESGVQLVCTARGWFPEPQVYWEDIRGEKLLAVSEHRIQDKDGLFYAEATLVVRNASAESVSCLVHNPVLTEEKGSVISLPEKLQTELGKYEVLAHTCGGSLCP

SEQ ID NO: 15583 - protein, 535 aa, Homo sapiens
MVDLSVSPDSLKPVSLTSSLVFLMHLLLLQPGEPSSEVKVLGPEYPILALVGEEVEFPCHLWPQLDAQQMEIRWFRSQTFNVVHLYQEQQELPGRQMPAFRNRTKLVKDDIAYGSVVLQLHSIIPSDKGTYGCRFHSDNFSGEALWELEVAGLGSDPHLSLEGFKEGGIQLRLRSSGWYPKPKVQWRDHQGQCLPPEFEAIVWDAQDLFSLETSVVVRAGALSNVSVSIQNLLLSQKKELVVQIADVFVPGASAWKSAFVATLPLLLVLAALALGVLRKQRRSREKLRKQAEKRQEKLTAELEKLQTELDWRRAEGQAEWRAAQKYAVDVTLDPASAHPSLEVSEDGKSVSSRGAPPGPAPGHPQRFSEQTCALSLERFSAGRHYWEVHVGRRSRWFLGACLAAVPRAGPARLSPAAGYWVLGLWNGCEYFVLAPHRVALTLRVPPRRLGVFLDYEAGELSFFNVSDGSHIFTFHDTFSGALCAYFRPRAHDGGEHPDPLTICPLPVRGTGVPEENDSDTWLQPYEPADPALDWW

SEQ ID NO: 15584 - protein, 315 aa, Homo sapiens
MVDLSVSPDSLKPVSLTSSLVFLMHLLLLQPGEPSSEVKVLGPEYPILALVGEEVEFPCHLWPQLDAQQMEIRWFRSQTFNVVHLYQEQQELPGRQMPAFRNRTKLVKDDIAYGSVVLQLHSIIPSDKGTYGCRFHSDNFSGEALWELEVAGLGSDPHLSLEGFKEGGIQLRLRSSGWYPKPKVQWRDHQGQCLPPEFEAIVWDAQDLFSLETSVVVRAGALSNVSVSIQNLLLSQKKELVVQIADVFVPGASAWKSAFVATLPLLLVLAALALGVLRKQRRSREKLRKQAEKRQGERGQGVLHAPAQVPKPAVI

SEQ ID NO: 15585 - protein, 344 aa, Homo sapiens
MVDLSVSPDSLKPVSLTSSLVFLMHLLLLQPGEPSSEVKVLGPEYPILALVGEEVEFPCHLWPQLDAQQMEIRWFRSQTFNVVHLYQEQQELPGRQMPAFRNRTKLVKDDIAYGSVVLQLHSIIPSDKGTYGCRFHSDNFSGEALWELEVAGLGSDPHLSLEGFKEGGIQLRLRSSGWYPKPKVQWRDHQGQCLPPEFEAIVWDAQDLFSLETSVVVRAGALSNVSVSIQNLLLSQKKELVVQIADVFVPGASAWKSAFVATLPLLLVLAALALGVLRKQRRSREKLRKQAEKRQEKLTAELEKLQTELDWRRAEGQAECFVLASHPPGEGIQAASNSTTTLNA

SEQ ID NO: 15586 - protein, 172 aa, Homo sapiens
MADGGGGGSGGAGPASTRASGGGGPINPASLPPGDPQLIAIIVGQLKSRGLFDSFRRDCKADVDTKPAYQNLSQKADNFVSTHLDKQEWNPPANDNQLHDGLRQSVVQSGRSEAGVDRISSQVVDPKLNHIFRPQIEQIIHEFLVAQKEAAVPALPPEPEGQDPPAPSQDTS

SEQ ID NO: 15587 - protein, 1755 aa, Homo sapiens
MLSATPLYGNVHSWMNSERVRMCGASEDRKILVNDGDASKARLELREENPLNHNVVDASTAHRIDGLAALSMDRTGLIREGLRVPGNIVYSSLCGLGSEKGREAATSTLGGLGFSSERNPEMQFKPNTPETVEASAVSGKPPNGFSAIYKTPPGIQKSAVATAEALGLDRPASDKQSPLNINGASYLRLPWVNPYMEGATPAIYPFLDSPNKYSLNMYKALLPQQSYSLAQPLYSPVCTNGERFLYLPPPHYVGPHIPSSLASPMRLSTPSASPAIPPLVHCADKSLPWKMGVSPGNPVDSHAYPHIQNSKQPRVPSAKAVTSGLPGDTALLLPPSPRPSPRVHLPTQPAADTYSEFHKHYARISTSPSVALSKPYMTVSSEFPAARLSNGKYPKAPEGGEGAQPVPGHARKTAVQDRKDGSSPPLLEKQTVTKDVTDKPLDLSSKVVDVDASKADHMKKMAPTVLVHSRAGSGLVLSGSEIPKETLSPPGNGCAIYRSEIISTAPSSWVVPGPSPNEENNGKSMSLKNKALDWAIPQQRSSSCPRMGGTDAVITNVSGSVSSAGRPASASPAPNANADGTKTSRSSVETTPSVIQHVGQPPATPAKHSSSTSSKGAKASNPEPSFKANENGLPPSSIFLSPNEAFRSPPIPYPRSYLPYPAPEGIAVSPLSLHGKGPVYPHPVLLPNGSLFPGHLAPKPGLPYGLPTGRPEFVTYQDALGLGMVHPMLIPHTPIEITKEEKPERRSRSHERARYEDPTLRNRFSEILETSSTKLHPDVPTDKNLKPNPNWNQGKTVVKSDKLVYVDLLREEPDAKTDTNVSKPSFAAESVGQSAEPPKPSVEPALQQHRDFIALREELGRISDFHETYTFKQPVFTVSKDSVLAGTNKENLGLPVSTPFLEPPLGSDGPAVTFGKTQEDPKPFCVGSAPPSVDVTPTYTKDGADEAESNDGKVLKPKPSKLAKRIANSAGYVGDRFKCVTTELYADSSQLSREQRALQMEGLQEDSILCLPAAYCERAMMRFSELEMKEREGGHPATKDSEMCKFSPADWERLKGNQDKKPKSVTLEEAIAEQNESERCEYSVGNKHRDPFEAPEDKDLPVEKYFVERQPVSEPPADQVASDMPHSPTLRVDRKRKVSGDSSHTETTAEEVPEDPLLKAKRRRVSKDDWPEREMTNSSSNHLEDPHYSELTNLKVCIELTGLHPKKQRHLLHLRERWEQQVSAADGKPGRQSRKEVTQATQPEAIPQGTNITEEKPGRKRAEAKGNRSWSEESLKPSDNEQGLPVFSGSPPMKSLSSTSAGGKKQAQPSCAPASRPPAKQQKIKENQKTDVLCADEEEDCQAASLLQKYTDNSEKPSGKRLCKTKHLIPQESRRGLPLTGEYYVENADGKVTVRRFRKRPEPSSDYDLSPAKQEPKPFDRLQQLLPASQSTQLPCSSSPQETTQSRPMPPEARRLIVNKNAGETLLQRAARLGYEEVVLYCLENKICDVNHRDNAGYCALHEACARGWLNIVRHLLEYGADVNCSAQDGTRPLHDAVENDHLEIVRLLLSYGADPTLATYSGRTIMKMTHSELMEKFLTDYLNDLQGRNDDDASGTWDFYGSSVCEPDDESGYDVLANPPGPEDQDDDDDAYSDVFEFEFSETPLLPCYNIQVSVAQGPRNWLLLSDVLKKLKMSSRIFRCNFPNVEIVTIAEAEFYRQVSASLLFSCSKDLEAFNPESKELLDLVEFTNEIQTLLGSSVEWLHPSDLASDNYW

SEQ ID NO: 15588 - protein, 1721 aa, Homo sapiens
MLSATPLYGNVHSWMNSERVRMCGASEDRKILVNDGDASKARLELREENPLNHNVVDASTAHRIDGLAALSMDRTGLIREGLRVPGNIVYSSLCGLGSEKGREAATSTLGGLGFSSERNPEMQFKPNTPETVEASAVSGKPPNGFSAIYKTPPGIQKSAVATAEALGLDRPASDKQSPLNINGASYLRLPWVNPYMEGATPAIYPFLDSPNKYSLNMYKALLPQQSYSLAQPLYSPVCTNGERFLYLPPPHYVGPHIPSSLASPMRLSTPSASPAIPPLVHCADKSLPWKMGVSPGNPVDSHAYPHIQNSKQPRVPSAKAVTSGLPGDTALLLPPSPRPSPRVHLPTQPAADTYSEFHKHYARISTSPSVALSKPYMTVSSEFPAARLSNGKYPKAPEGGEGAQPVPGHARKTAVQDRKDGSSPPLLEKQTVTKDVTDKPLDLSSKVVDVDASKADHMKKMAPTVLVHSRAGSGLVLSGSEIPKETLSPPGNGCAIYRSEIISTAPSSWVVPGPSPNEENNGKSMSLKNKALDWAIPQQRSSSCPRMGGTDAVITNVSGSVSSAGRPASASPAPNANADGTKTSRSSVETTPSVIQHVGQPPATPAKHSSSTSSKGAKASNPEPSFKANENGLPPSSIFLSPNEAFRSPPIPYPRSYLPYPAPEGIAVSPLSLHGKGPVYPHPVLLPNGSLFPGHLAPKPGLPYGLPTGRPEFVTYQDALGLGMVHPMLIPHTPIEITKEEKPERRSRSHERARYEDPTLRNRFSEILETSSTKLHPDVPTDKNLKPNPNWNQGKTVVKSDKLVYVDLLREEPDAKTDTNVSKPSFAAESVGQSAEPPKPSVEPALQQHRDFIALREELGRISDFHETYTFKQPVFTVSKDSVLAGTNKENLGLPVSTPFLEPPLGSDGPAVTFGKTQEDPKPFCVGSAPPSVDVTPTYTKDGADEAESNDGKVLKPKPSKLAKRIANSAGYVGDRFKCVTTELYADSSQLSREQRALQMEGLQEDSILCLPAAYCERAMMRFSELEMKEREGGHPATKDSEMCKFSPADWERLKGNQDKKPKSVTLEEAIAEQNESERCEYSVGNKHRDPFEAPEDKDLPVEKYFVERQPVSEPPADQVASDMPHSPTLRVDRKRKVSGDSSHTETTAEEVPEDPLLKAKRRRVSKGLHPKKQRHLLHLRERWEQQVSAADGKPGRQSRKEVTQATQPEAIPQGTNITEEKPGRKRAEAKGNRSWSEESLKPSDNEQGLPVFSGSPPMKSLSSTSAGGKKQAQPSCAPASRPPAKQQKIKENQKTDVLCADEEEDCQAASLLQKYTDNSEKPSGKRLCKTKHLIPQESRRGLPLTGEYYVENADGKVTVRRFRKRPEPSSDYDLSPAKQEPKPFDRLQQLLPASQSTQLPCSSSPQETTQSRPMPPEARRLIVNKNAGETLLQRAARLGYEEVVLYCLENKICDVNHRDNAGYCALHEACARGWLNIVRHLLEYGADVNCSAQDGTRPLHDAVENDHLEIVRLLLSYGADPTLATYSGRTIMKMTHSELMEKFLTDYLNDLQGRNDDDASGTWDFYGSSVCEPDDESGYDVLANPPGPEDQDDDDDAYSDVFEFEFSETPLLPCYNIQVSVAQGPRNWLLLSDVLKKLKMSSRIFRCNFPNVEIVTIAEAEFYRQVSASLLFSCSKDLEAFNPESKELLDLVEFTNEIQTLLGSSVEWLHPSDLASDNYW

SEQ ID NO: 15589 - protein, 1004 aa, Homo sapiens
MLSATPLYGNVHSWMNSERVRMCGASEDRKILVNDGDASKARLELREENPLNHNVVDASTAHRIDGLAALSMDRTGLIREGLRVPGNIVYSSLCGLGSEKGREAATSTLGGLGFSSERNPEMQFKPNTPETVEASAVSGKPPNGFSAIYKTPPGIQKSAVATAEALGLDRPASDKQSPLNINGASYLRLPWVNPYMEGATPAIYPFLDSPNKYSLNMYKALLPQQSYSLAQPLYSPVCTNGERFLYLPPPHYVGPHIPSSLASPMRLSTPSASPAIPPLVHCADKSLPWKMGVSPGNPVDSHAYPHIQNSKQPRVPSAKAVTSGLPGDTALLLPPSPRPSPRVHLPTQPAADTYSEFHKHYARISTSPSVALSKPYMTVSSEFPAARLSNGKYPKAPEGGEGAQPVPGHARKTAVQDRKDGSSPPLLEKQTVTKDVTDKPLDLSSKVVDVDASKADHMKKMAPTVLVHSRAGSGLVLSGSEIPKETLSPPGNGCAIYRSEIISTAPSSWVVPGPSPNEENNGKSMSLKNKALDWAIPQQRSSSCPRMGGTDAVITNVSGSVSSAGRPASASPAPNANADGTKTSRSSVETTPSVIQHVGQPPATPAKHSSSTSSKGAKASNPEPSFKANENGLPPSSIFLSPNEAFRSPPIPYPRSYLPYPAPEGIAVSPLSLHGKGPVYPHPVLLPNGSLFPGHLAPKPGLPYGLPTGRPEFVTYQDALGLGMVHPMLIPHTPIEITKEEKPERRSRSHERARYEDPTLRNRFSEILETSSTKLHPDVPTDKNLKPNPNWNQGKTVVKSDKLVYVDLLREEPDAKTDTNVSKPSFAAESVGQSAEPPKPSVEPALQQHRDFIALREELGRISDFHETYTFKQPVFTVSKDSVLAGTNKENLGLPVSTPFLEPPLGSDGPAVTFGKTQEDPKPFCVGSAPPSVDVTPTYTKDGADEAESNDGKVLKPKPSKLAKRIANSAGYVGDRFKCVTTELYADSSQLSREQRALQVSPPT

SEQ ID NO: 15590 - protein, 1703 aa, Homo sapiens
MLSATPLYGNVHSWMNSERVRMCGASEDRKILVNDGDASKARLELREENPLNHNVVDASTAHRIDGLAALSMDRTGLIREGLRVPGNIVYSSLCGLGSEKGREAATSTLGGLGFSSERNPEMQFKPNTPETVEASAVSGKPPNGFSAIYKTPPGIQKSAVATAEALGLDRPASDKQSPLNINGASYLRLPWVNPYMEGATPAIYPFLDSPNKYSLNMYKALLPQQSYSLAQPLYSPVCTNGERFLYLPPPHYVGPHIPSSLASPMRLSTPSASPAIPPLVHCADKSLPWKMGVSPGNPVDSHAYPHIQNSKQPRVPSAKAVTSGLPGDTALLLPPSPRPSPRVHLPTQPAADTYSEFHKHYARISTSPSVALSKPYMTVSSEFPAARLSNGKYPKAPEGGEGAQPVPGHARKTAVQDRKDGSSPPLLEKQTVTKDVTDKPLDLSSKVVDVDASKADHMKKMAPTVLVHSRAGSGLVLSGSEIPKETLSPPGNGCAIYRSEIISTAPSSWVVPGPSPNEENNGKSMSLKNKALDWAIPQQRSSSCPRMGGTDAVITNVSGSVSSAGRPASASPAPNANADGTKTSRSSVETTPSVIQHVGQPPATPAKHSSSTSSKGAKASNPEPSFKANENGLPPSSIFLSPNEAFRSPPIPYPRSYLPYPAPEGIAVSPLSLHGKGPVYPHPVLLPNGSLFPGHLAPKPGLPYGLPTGRPEFVTYQDALGLGMVHPMLIPHTPIEITKEEKPERRSRSHERARYEDPTLRNRFSEILETSSTKLHPDVPTDKNLKPNPNWNQGKTVVKSDKLVYVDLLREEPDAKTDTNVSKPSFAAESVGQSAEPPKPSVEPALQQHRDFIALREELGRISDFHETYTFKQPVFTVSKDSVLAGTNKENLGLPVSTPFLEPPLGSDGPAVTFGKTQEDPKPFCVGSAPPSVDVTPTYTKDGADEAESNDGKVLKPKPSKLAKRIANSAGYVGDRFKCVTTELYADSSQLSREQRALQRAMMRFSELEMKEREGGHPATKDSEMCKFSPADWERLKGNQDKKPKSVTLEEAIAEQNESERCEYSVGNKHRDPFEAPEDKDLPVEKYFVERQPVSEPPADQVASDMPHSPTLRVDRKRKVSGDSSHTETTAEEVPEDPLLKAKRRRVSKGLHPKKQRHLLHLRERWEQQVSAADGKPGRQSRKEVTQATQPEAIPQGTNITEEKPGRKRAEAKGNRSWSEESLKPSDNEQGLPVFSGSPPMKSLSSTSAGGKKQAQPSCAPASRPPAKQQKIKENQKTDVLCADEEEDCQAASLLQKYTDNSEKPSGKRLCKTKHLIPQESRRGLPLTGEYYVENADGKVTVRRFRKRPEPSSDYDLSPAKQEPKPFDRLQQLLPASQSTQLPCSSSPQETTQSRPMPPEARRLIVNKNAGETLLQRAARLGYEEVVLYCLENKICDVNHRDNAGYCALHEACARGWLNIVRHLLEYGADVNCSAQDGTRPLHDAVENDHLEIVRLLLSYGADPTLATYSGRTIMKMTHSELMEKFLTDYLNDLQGRNDDDASGTWDFYGSSVCEPDDESGYDVLANPPGPEDQDDDDDAYSDVFEFEFSETPLLPCYNIQVSVAQGPRNWLLLSDVLKKLKMSSRIFRCNFPNVEIVTIAEAEFYRQVSASLLFSCSKDLEAFNPESKELLDLVEFTNEIQTLLGSSVEWLHPSDLASDNYW

SEQ ID NO: 15591 - protein, 412 aa, Homo sapiens
MERIPSAQPPPACLPKAPGLEHGDLPGMYPAHMYQVYKSRRGIKRSEDSKETYKLPHRLIEKKRRDRINECIAQLKDLLPEHLKLTTLGHLEKAVVLELTLKHVKALTNLIDQQQQKIIALQSGLQAGELSGRNVETGQEMFCSGFQTCAREVLQYLAKHENTRDLKSSQLVTHLHRVVSELLQGGTSRKPSDPAPKVMDFKEKPSSPAKGSEGPGKNCVPVIQRTFAHSSGEQSGSDTDTDSGYGGESEKGDLRSEQPCFKSDHGRRFTMGERIGAIKQESEEPPTKKNRMQLSDDEGHFTSSDLISSPFLGPHPHQPPFCLPFYLIPPSATAYLPMLEKCWYPTSVPVLYPGLNASAAALSSFMNPDKISAPLLMPQRLPSPLPAHPSVDSSVLLQALKPIPPLNLETKD

SEQ ID NO: 15592 - protein, 476 aa, Homo sapiens
MQPVMLALWSLLLLWGLATPCQELLETVGTLARIDKDELGKAIQNSLVGEPILQNVLGSVTAVNRGLLGSGGLLGGGGLLGHGGVFGVVEELSGLKIEELTLPKVLLKLLPGFGVQLSLHTKVGMHCSGPLGGLLQLAAEVNVTSRVALAVSSRGTPILILKRCSTLLGHISLFSGLLPTPLFGVVEQMLFKVLPGLLCPVVDSVLGVVNELLGAVLGLVSLGALGSVEFSLATLPLISNQYIELDINPIVKSVAGDIIDFPKSRAPAKVPPKKDHTSQVMVPLYLFNTTFGLLQTNGALDMDITPELVPSDVPLTTTDLAALLPEALGKLPLHQQLLLFLRVREAPTVTLHNKKALVSLPANIHVLFYVPKGTPESLFELNSVMTVRAQLAPSATKLHISLSLERLSVKVASSFTHAFDGSRLEEWLSHVVGAVYAPKLNVALDVGIPLPKVLNINFSNSVLEIVENAVVLTVAS

SEQ ID NO: 15593 - protein, 547 aa, Homo sapiens
MDIIFGRNRKEQLEPVRAKVTGKIPAWLQGTLLRNGPGMHTVGESRYNHWFDGLALLHSFTIRDGEVYYRSKYLRSDTYNTNIEANRIVVSEFGTMAYPDPCKNIFSKAFSYLSHTIPDFTDNCLINIMKCGEDFYATSETNYIRKINPQTLETLEKVDYRKYVAVNLATSHPHYDEAGNVLNMGTSIVEKGKTKYVIFKIPATVPEGKKQGKSPWKHTEVFCSIPSRSLLSPSYYHSFGVTENYVIFLEQPFRLDILKMATAYIRRMSWASCLAFHREEKTYIHIIDQRTRQPVQTKFYTDAMVVFHHVNAYEEDGCIVFDVIAYEDNSLYQLFYLANLNQDFKENSRLTSVPTLRRFAVPLHVDKNAEVGTNLIKVASTTATALKEEDGQVYCQPEFLYEGLELPRVNYAHNGKQYRYVFATGVQWSPIPTKIIKYDILTKSSLKWREDDCWPAEPLFVPAPGAKDEDDGVILSAIVSTDPQKLPFLLILDAKSFTELARASVDVDMHMDLHGLFITDMDWDTKKQAASEEQRDRASDCHGAPLT

SEQ ID NO: 15594 - protein, 229 aa, Homo sapiens
MFAIQPGLAEGGQFLGDPPPGLCQPELQPDSNSNFMASAKDANENWHGMPGRVEPILRRSSSESPSDNQAFQAPGSPEEGVRSPPEGAEIPGAEPEKMGGAGTVCSPLEDNGYASSSLSIDSRSSSPEPACGTPRGPGPPDPLLPSVAQAVQHLQVQERYKEQEKEKHHVHLVMYRRLALLQWIRGLQHQLIDQQARLQESFDTILDNRKELIRCLQQRAAPSRPQDQA

SEQ ID NO: 15595 - protein, 534 aa, Homo sapiens
MRRHSETDVEEQTQELKTITQLQEQCRALQIQGVKENMDQNKATLALLRSNIRRGAQDWALAKKYDQWTISKACGKNLPLRLAHCRSTMEVVREKLRKYVFDRVNMHNLLIHLVRRRGQKLESMQLELDSLRSQPDASKEELRLLQIIRQLENNIEKTMIKIITSQNIHLLYLDLLDYLKTVLAGYPIELDKLQNLVVNYCSELSDMKIMSQDAMMITDEVKRNMRQREASFIEERRARENRLNQQKKLIDKIHTKETSEKYRRGQMDLDFPSNLMSTETLKLRRKETSTAEMEYQSGVTAVVEKVKSAVRCSHVWDITSRFLAQRNTEENLELQMEDCEEWRVQLKALVKQLELEEAVLKFRQKPSSISFKSVEKKMTDMLKEEEERLQLAHSNMTKGQELLLTIQMGIDNLYVRLMGINLPATQREVVLSNTLDLNSKLAYCEGKLTYLADRVQMVSRTEEGDTKVRDTLESSTLMEKYNTRISFENREEDMIDTFQFPDMDHSYVPSRAEIKRQAQRLIEGKLKAAKKKKK

SEQ ID NO: 15596 - protein, 464 aa, Homo sapiens
MRRHSETDVEEQTQELKTITQLQEQCRALQIQGVKENMDQNKATLALLRSNIRRGAQDWALAKKYDQWTISKACGKNLPLRLAHCRSTMEVVREKLRKYVFDRVNMHNLLIHLVRRRGQKLESMQLELDSLRSQPDASKEELRLLQIIRQLENNIEKTMIKIITSQNIHLLYLDLLDYLKTVLAGYPIELDKLQNLVVNYCSELSDMKIMSQDAMMITDEVKRNMRQREASFIEERRARENRLNQQKKLIDKIHTKETSEKYRRGQMDLDFPSNLMSTETLKLRRKETSTAEMEYQSGVTAVVEKVKSAVRCSHVWDITSRFLAQRNTEENLELQMEDCEEWRVQLKALVKQLELEEAVLKFRQKPSSISFKSVEKKMTDMLKEEEERLQLAHSNMTKGQELLLTIQMGIDNLYVRLMGINLPATQVPGVRLSCHTPGPWAGPEGRQAQRLIEGKLKAAKKKKK

SEQ ID NO: 15597 - protein, 194 aa, Homo sapiens
MEVVREKLRKYVFDRVNMHNLLIHLVRRRGQKLESMQLELDSLRSQPDASKEELRLLQIIRQLENNIEKTMIKIITSQNIHLLYLDLLDYLKTVLAGYPIELDKLQNLVVNYCSELSDMKIMSQDAMMITDEVKRNMRQREASFIEERRARENRLNQQKKLIDKIHTKETSEKYRRGQMDLDFPSNLMSTETLK

SEQ ID NO: 15598 - protein, 383 aa, Homo sapiens
MLRSRRGTEQVPSPRFPVGLPRASTRPPAGGLHGGPLRNHEWAVPFPTQVVREKLRKYVFDRVNMHNLLIHLVRRRGQKLESMQLELDSLRSQPDASKEELRLLQIIRQLENNIEKTMIKIITSQNIHLLYLDLLDYLKTVLAGYPIELDKLQNLVVNYCSELSDMKIMSQDAMMITDEVKRNMRQREASFIEERRARENRLNQQKKLIDKIHTKETSEKYRRGQMDLDFPSNLMSTETLKLRRKETSTAEMEYQSGVTAVVEKVKSAVRCSHVWDITSRFLAQRNTEENLELQMEDCEEWRVQLKALVKQLELEEAVLKFRQKPSSIRCPGLPGLRATHPSLTKAPGCSQAGSWEYTHCQQACVSHRGARGLHLHTPELLSP

SEQ ID NO: 15599 - protein, 262 aa, Homo sapiens
MSRLSWGYREHNGPIHWKEFFPIADGDQQSPIEIKTKEVKYDSSLRPLSIKYDPSSAKIISNSGHSFNVDFDDTENKSVLRGGPLTGSYRLRQVHLHWGSADDHGSEHIVDGVSYAAELHVVHWNSDKYPSFVEAAHEPDGLAVLGVFLQIGEPNSQLQKITDTLDSIKEKGKQTRFTNFDLLSLLPPSWDYWTYPGSLTVPPLLESVTWIVLKQPINISSQQLAKFRSLLCTAEGEAAAFLVSNHRPPQPLKGRKVRASFH

SEQ ID NO: 15600 - protein, 1701 aa, Homo sapiens
MRGGENRPPARVQSSSEELELRHQSLDAFPGRRLPGRGIQPAAKMSSVGKVTQVPNGKAYQQIFQAEVQLVHSLAATRKRAAERSVTLKSGRIPMMKKVETPEGEVMSPRQQKWMHSLPNDWIMENPVLHREKERAKREKARESENTIAAREVRGLMDTIVPEKISTSTFQRQAEHKRKSYESALASFQEEIAQVGKEMEPLIVDTGGLFLKKLTESDEEMNRLFLKVENDTNLEDYTIQALLELWDKVAGRLLLRKQEIKELDEALHSLEFSRTDKLKSVLKKYAEVIEKTSYLMRPEVYRLINEEAMVMNYALLGNRKALAQLFVNLMESTLQQELDSRHRWQGLVDTWKALKKEALLQSFSEFMASESIHTPPAVTKELEVMLKTQNVLQQRRLKHLCTICDLLPPSYSKTQLTEWHSSLNSLNKELDTYHVDCMMRIRLLYEKTWQECLMHVQNCKKQLLDWKAFTEEEAETLVNQFFFQMVGALQGKVEEDLELLDKSFETLADQTEWQSSHLFKYFQEVVQLWEAHQSELLVQELELEKRMEQHRQKHSLESQVQEAHLDRLLDQLRQQSDKETLAFHLEKVKDYLKNMKSRYECFHTLLTKEVMEYPAIMLKELNSYSSALSQYFFVREIFEQNLAGEVIFKFRQPEAHEKPSQKRVKKLRKKQGSKEDMTRSEESISSGTSTARSVEEVEEENDQEMESFITEEVLGQQKKSPLHAKMDESKEGSIQGLEEMQVEREGSLNPSLNEENVKGQGEKKEESEEEDEKEEEEEEEKLEEEKEEKEAQEEQESLSVGEEEDKEEGLEEIYYEDMESFTISSGNTYFVFVPLEEEHCRKSHSTFSAMFINDTSSAKFIEQVTIPSRLILEIKKQLRAGFFEHLEKWFDQCSLNTRVTVATKINELDSELELHLHLHQPRAQQIEKDIHNVRAAELLLHQEQLDSHCAGVTETLKKKRLMFCQFQEEQNVRSKNFRLKIYDMEHIFLNATRSQKLVTLSNTLHQELLSYVDVTQVSLRSFRQYLEESLGKLRYSNIEFIKHCRLFSEGGNFSPKEINSLCSRLEKEAARIELVESVIMLNMEKLENEYLDQANDVINKFESKFHNLSVDLIFIEKIQRLLTNLQVKIKCQVAKSNSQTNGLNFSLQQLQNKIKTCQESRGEKTTVTTEELLSFVQTWKEKLSQRIQYLNCSLDRVSMTELVFTNTILKDQEEDSDILTSSEALEEEAKLDVVTPESFTQLSRVGKPLIEDPAVDVIRKLLQLPNTKWPTHHCDKDPSQTGRGAWACGSRGSSEAGAGGAVCSPPVLCSCPGPSSPKGFKRHRCQPENSGKKAVPSASATSAGSFTPHPKPNKMERKYRVLGDKPPPAAEDFKGIILTLLWESSENLLTVAEEFYRKEKRPVTRPDCMCDTFDQCAENISKKILEYQSQANKYHNSCLIELRIQIRRFEELLPQVCWLVMENFKEHHWKKFFTSVKEIRGQFEEQQKRLEKRKDKNAQKLHLNLGHPVHFQEMESLHLSEEERQEELDSMIRMNKEKLEECTRRNGQVFITNLATFTEKFLLQLDEVVTIDDVQVARMEPPKQKLSMLIRRKLAGLSLKEESEKPLIERGSRKWPGIKPTEVTIQNKILLQPTSSISTTKTTLGHLAAVEARDAVYLKYLASFEEELKRIQDDCTSQIKEAQRWKDSWKQSLHTIQGLYV

SEQ ID NO: 15601 - protein, 123 aa, Homo sapiens
MEPPKQKLSMLIRRKLAGLSLKEESEKPLIERGSRKWPGIKPTEVTIQNKILLQPTSSISTTKTTLGHLAAVEARDAVYLKYLASFEEELKRIQDDCTSQIKEAQRWKDSWKQSLHTIQGLYV

SEQ ID NO: 15602 - protein, 789 aa, Homo sapiens
MRTYHYIPLFIWTYMFHTVDTILLQEKPNSYLSSKKIAGLTKDDGKMLRRTKRGWMWNQFFLLEEYTGTDTQYVGKLHTDQDKGDGNLKYILTGDGAGSLFVIDENTGDIHAAKKLDREEKSLYILRAKAIDRKTGRQVEPESEFIIKIHDINDNEPKFTKDLYTASVPEMSGVGTSVIQVTATDADDANYGNSAKVVYSILQGQPYFSVDPESGIIKTALPDMSRENREQYQVVIQAKDMGGQMGGLSGTTTVNITLTDVNNNPPRFPQSTYQFNSPESVPLGTHLGRIKANDPDVGENAEMEYSIAEGDGADMFDVITDKDTQEGIITVKQNLDFENQMLYTLRVDASNTHPDPRFLHLGPFKDTAVVKISVEDIDEPPVFTKVSYLIEVDEDVKEGSIIGQVTAYDPDARNNLIKYSVDRHTDMDRIFGIHSENGSIFTLKALDRESSPWHNITVTATEINNPKQSSHIPVFIRILDINDHAPEFAMYYETFVCENAKPGQLIQTVSVMDKDDPPRGHKFFFEPVPEFTLNPNFTIVDNKDNTAGIMTRKDGYSRNKMSTYLLPILIFDNDYPIQSSTGTLTIRVCACDNQGNMQSCTAEALILSAGLSTGALVAILLCVLILLILVVLFAALKRQRKKEPLIISKDDVRDNIVTYNDEGGGEEDTQAFDIGTLRNPEAREDSKLRRDVMPETIFQIRRTVPLWENIDVQDFIHRRLKENDADPSAPPYDSLATYAYEGNDSIADSLSSLESLTADCNQDYDYLSDWGPRFKKLADMYGGDDSDRD

SEQ ID NO: 15603 - protein, 799 aa, Homo sapiens
MPERLAEMLLDLWTPLIILWITLPPCIYMAPMNQSQVLMSGSPLELNSLGEEQRILNRSKRGWVWNQMFVLEEFSGPEPILVGRLHTDLDPGSKKIKYILSGDGAGTIFQINDVTGDIHAIKRLDREEKAEYTLTAQAVDWETSKPLEPPSEFIIKVQDINDNAPEFLNGPYHATVPEMSILGTSVTNVTATDADDPVYGNSAKLVYSILEGQPYFSIEPETAIIKTALPNMDREAKEEYLVVIQAKDMGGHSGGLSGTTTLTVTLTDVNDNPPKFAQSLYHFSVPEDVVLGTAIGRVKANDQDIGENAQSSYDIIDGDGTALFEITSDAQAQDGIIRLRKPLDFETKKSYTLKVEAANVHIDPRFSGRGPFKDTATVKIVVEDADEPPVFSSPTYLLEVHENAALNSVIGQVTARDPDITSSPIRFSIDRHTDLERQFNINADDGKITLATPLDRELSVWHNITIIATEIRNHSQISRVPVAIKVLDVNDNAPEFASEYEAFLCENGKPGQVIQTVSAMDKDDPKNGHYFLYSLLPEMVNNPNFTIKKNEDNSLSILAKHNGFNRQKQEVYLLPIIISDSGNPPLSSTSTLTIRVCGCSNDGVVQSCNVEAYVLPIGLSMGALIAILACIILLLVIVVLFVTLRRHKNEPLIIKDDEDVRENIIRYDDEGGGEEDTEAFDIATLQNPDGINGFLPRKDIKPDLQFMPRQGLAPVPNGVDVDEFINVRLHEADNDPTAPPYDSIQIYGYEGRGSVAGSLSSLESTTSDSDQNFDYLSDWGPRFKRLGELYSVGESDKET

SEQ ID NO: 15604 - protein, 1032 aa, Homo sapiens
MPGRAEAGEAEEEAGAGSGSEAEEDALWERIEGVRHRLARALNPAKLTPYLRQCRVIDEQDEEEVLSTYRFPCRVNRTGRLMDILRCRGKRGYEAFLEALEFYYPEHFTLLTGQEPAQRCSMILDEEGPEGLTQFLMTEVRRLREARKSQLQREQQLQARGRVLEEERAGLEQRLRDQQQAQERCQRLREDWEAGSLELLRLKDENYMIAMRLAQLSEEKNSAVLRSRDLQLAVDQLKLKVSRLEEECALLRRARGPPPGAEEKEKEKEKEKEPDNVDLVSELRAENQRLTASLRELQEGLQQEASRPGAPGSERILLDILEHDWREAQDSRQELCQKLHAVQGELQWAEELRDQYLQEMEDLRLKHRTLQKDCDLYKHRMATVLAQLEEIEKERDQAIQSRDRIQLQYSQSLIEKDQYRKQVRGLEAERDELLTTLTSLEGTKALLEVQLQRAQGGTCLKACASSHSLCSNLSSTWSLSEFPSPLGGPEATGEAAVMGGPEPHNSEEATDSEKEINRLSILPFPPSAGSILRRQREEDPAPPKRSFSSMSDITGSVTLKPWSPGLSSSSSSDSVWPLGKPEGLLARGCGLDFLNRSLAIRVSGRSPPGGPEPQDKGPDGLSFYGDRWSGAVVRRVLSGPGSARMEPREQRVEAAGLEGACLEAEAQQRTLLWNQGSTLPSLMDSKACQSFHEALEAWAKGPGAEPFYIRANLTLPERADPHALCVKAQEILRLVDSAYKRRQEWFCTRVDPLTLRDLDRGTVPNYQRAQQLLEVQEKCLPSSRHRGPRSNLKKRALDQLRLVRPKPVGAPAGDSPDQLLLEPCAEPERSLRPYSLVRPLLVSALRPVVLLPECLAPRLIRNLLDLPSSRLDFQVCPAESLSGEELCPSSAPGAPKAQPATPGLGSRIRAIQESVGKKHCLLELGARGVRELVQNEIYPIVIHVEVTEKNVREVRGLLGRPGWRDSELLRQCRGSEQVLWGLPCSWVQVPAHEWGHAEELAKVVRGRILQEQARLVWVECGSSRGCPSSSEA

SEQ ID NO: 15605 - protein, 746 aa, Homo sapiens
MGVGVGLGNGLRLLPWMEASRPGAPGSERILLDILEHDWREAQDSRQELCQKLHAVQGELQWAEELRDQYLQEMEDLRLKHRTLQKDCDLYKHRMATVLAQLEEIEKERDQAIQSRDRIQLQYSQSLIEKDQYRKQVRGLEAERDELLTTLTSLEGTKALLEVQLQRAQGGTCLKACASSHSLCSNLSSTWSLSEFPSPLGGPEATGEAAVMGGPEPHNSEEATDSEKEINRLSILPFPPSAGSILRRQREEDPAPPKRSFSSMSDITGSVTLKPWSPGLSSSSSSDSVWPLGKPEGLLARGCGLDFLNRSLAIRVSGRSPPGGPEPQDKGPDGLSFYGDRWSGAVVRRVLSGPGSARMEPREQRVEAAGLEGACLEAEAQQRTLLWNQGSTLPSLMDSKACQSFHEALEAWAKGPGAEPFYIRANLTLPERADPHALCVKAQEILRLVDSAYKRRQEWFCTRVDPLTLRDLDRGTVPNYQRAQQLLEVQEKCLPSSRHRGPRSNLKKRALDQLRLVRPKPVGAPAGDSPDQLLLEPCAEPERSLRPYSLVRPLLVSALRPVVLLPECLAPRLIRNLLDLPSSRLDFQVCPAESLSGEELCPSSAPGAPKAQPATPGLGSRIRAIQESVGKKHCLLELGARGVRELVQNEIYPIVIHVEVTEKNVREVRGLLGRPGWRDSELLRQCRGSEQVLWGLPCSWVQVPAHEWGHAEELAKVVRGRILQEQARLVWVECGSSRGCPSSSEA

SEQ ID NO: 15606 - protein, 1004 aa, Homo sapiens
MGELCRRDSALTALDEETLWEMMESHRHRIVRCICPSRLTPYLRQAKVLCQLDEEEVLHSPRLTNSAMRAGHLLDLLKTRGKNGAIAFLESLKFHNPDVYTLVTGLQPDVDFSNFSGLMETSKLTECLAGAIGSLQEELNQEKGQKEVLLRRCQQLQEHLGLAETRAEGLHQLEADHSRMKREVSAHFHEVLRLKDEMLSLSLHYSNALQEKELAASRCRSLQEELYLLKQELQRANMVSSCELELQEQSLRTASDQESGDEELNRLKEENEKLRSLTFSLAEKDILEQSLDEARGSRQELVERIHSLRERAVAAERQREQYWEEKEQTLLQFQKSKMACQLYREKVNALQAQVCELQKERDQAYSARDSAQREISQSLVEKDSLRRQVFELTDQVCELRTQLRQLQAEPPGVLKQEARTREPCPREKQRLVRMHAICPRDDSDCSLVSSTESQLLSDLSATSSRELVDSFRSSSPAPPSQQSLYKRVAEDFGEEPWSFSSCLEIPEGDPGALPGAKAGDPHLDYELLDTADLPQLESSLQPVSPGRLDVSESGVLMRRRPARRILSQVTMLAFQGDALLEQISVIGGNLTGIFIHRVTPGSAADQMALRPGTQIVMVDYEASEPLFKAVLEDTTLEEAVGLLRRVDGFCCLSVKVNTDGYKRLLQDLEAKVATSGDSFYIRVNLAMEGRAKGELQVHCNEVLHVTDTMFQGCGCWHAHRVNSYTMKDTAAHGTIPNYSRAQQQLIALIQDMTQQCTVTRKPSSGGPQKLVRIVSMDKAKASPLRLSFDRGQLDPSRMEGSSTCFWAESCLTLVPYTLVRPHRPARPRPVLLVPRAVGKILSEKLCLLQGFKKCLAEYLSQEEYEAWSQRGDIIQEGEVSGGRCWVTRHAVESLMEKNTHALLDVQLDSVCTLHRMDIFPIVIHVSVNEKMAKKLKKGLQRLGTSEEQLLEAARQEEGDLDRAPCLYSSLAPDGWSDLDGLLSCVRQAIADEQKKVVWTEQSPR

SEQ ID NO: 15607 - protein, 740 aa, Homo sapiens
MGELCRRDSALTALDEETLWEMMESHRHRIVRCICPSRLTPYLRQAKVLCQLDEEEVLHSPRLTNSAMRAGHLLDLLKTRGKNGAIAFLESLKFHNPDVYTLVTGLQPDVDFSNFSGLMETSKLTECLAGAIGSLQEELNQEKGQKEVLLRRCQQLQEHLGLAETRAEGLHQLEADHSRMKREVSAHFHEVLRLKDEMLSLSLHYSNALQEKELAASRCRSLQEELYLLKQELQRANMVSSCELELQEQSLRTASDQESGDEELNRLKEENEKLRSLTFSLAEKDILEQSLDEARGSRQELVERIHSLRERAVAAERQREQYWEEKEQTLLQFQKSKMACQLYREKVNALQAQVCELQKERDQAYSARDSAQREISQSLVEKDSLRRQVFELTDQVCELRTQLRQLQAEPPGVLKQEARTREPCPREKQRLVRMHAICPRDDSDCSLVSSTESQLLSDLSATSSRELVDSFRSSSPAPPSQQSLYKRVAEDFGEEPWSFSSCLEIPEGDPGALPGAKAGDPHLDYELLDTADLPQLESSLQPVSPGRLDVSESGVLMRRRPARRILSQVTMLAFQGDALLEQISVIGGNLTGIFIHRVTPGSAADQMALRPGTQIVMVDYEASEPLFKAVLEDTTLEEAVGLLRRVDGFCCLSVKVNTDGYKRLLQDLEAKVATSGDSFYIRVNLAMEGRAKGELQVHCNEVLHVTDTMFQGCGCWHAHRVNSYTMKDTAAHGTIPNYSR

SEQ ID NO: 15608 - protein, 434 aa, Homo sapiens
MVSSCELELQEQSLRTASDQESGDEELNRLKEENEKLRSLTFSLAEKDILEQSLDEARGSRQELVERIHSLRERAVAAERQREQYWEEKEQTLLQFQKSKMACQLYREKVNALQAQVCELQKERDQAYSARDSAQREISQSLVEKDSLRRQVFELTDQVCELRTQLRQLQAEPPGVLKQEARTREPCPREKQRLVRMHAICPRDDSDCSLVSSTESQLLSDLSATSSRELVDSFRSSSPAPPSQQSLYKRVAEDFGEEPWSFSSCLEIPEGDPGALPGAKAGDPHLDYELLDTADLPQLESSLQPVSPGRLDVSESGVLMRRRPARRILSQVTMLAFQGDALLEQISVIGGNLTGIFIHRVTPGSAADQMALRPGTQIVMVSRARPLLSPGLLMGTVAAGGVTQADFTSPRRCRSTLGWASALSWADVKRSAHL

SEQ ID NO: 15609 - protein, 475 aa, Homo sapiens
MADMQNLVERLERAVGRLEAVSHTSDMHRGYADSPSKAGAAPYVQAFDSLLAGPVAEYLKISKEIGGDVQKHAEMVHTGLKLERALLVTASQCQQPAENKLSDLLAPISEQIKEVITFREKNRGSKLFNHLSAVSESIQALGWVAMAPKPGPYVKEMNDAAMFYTNRVLKEYKDVDKKHVDWVKAYLSIWTELQAYIKEFHTTGLAWSKTGPVAKELSGLPSGPSAGSCPPPPPPCPPPPPVSTISCSYESASRSSLFAQINQGESITHALKHVSDDMKTHKNPALKAQSGPVRSGPKPFSAPKPQTSPSPKRATKKEPAVLELEGKKWRVENQENVSNLVIEDTELKQVAYIYKCVNTTLQIKGKINSITVDNCKKLGLVFDDVVGIVEIINSKDVKVQVMGKVPTISINKTDGCHAYLSKNSLDCEIVSAKSSEMNVLIPTEGGDFNEFPVPEQFKTLWNGQKLVTTVTEIAG

SEQ ID NO: 15610 - protein, 474 aa, Homo sapiens
MADMQNLVERLERAVGRLEAVSHTSDMHRGYADSPSKGAAPYVQAFDSLLAGPVAEYLKISKEIGGDVQKHAEMVHTGLKLERALLVTASQCQQPAENKLSDLLAPISEQIKEVITFREKNRGSKLFNHLSAVSESIQALGWVAMAPKPGPYVKEMNDAAMFYTNRVLKEYKDVDKKHVDWVKAYLSIWTELQAYIKEFHTTGLAWSKTGPVAKELSGLPSGPSAGSCPPPPPPCPPPPPVSTISCSYESASRSSLFAQINQGESITHALKHVSDDMKTHKNPALKAQSGPVRSGPKPFSAPKPQTSPSPKRATKKEPAVLELEGKKWRVENQENVSNLVIEDTELKQVAYIYKCVNTTLQIKGKINSITVDNCKKLGLVFDDVVGIVEIINSKDVKVQVMGKVPTISINKTDGCHAYLSKNSLDCEIVSAKSSEMNVLIPTEGGDFNEFPVPEQFKTLWNGQKLVTTVTEIAG

SEQ ID NO: 15611 - protein, 398 aa, Homo sapiens
MGAPAASLLLLLLLFACCWAPGGANLSQDDSQPWTSDETVVAGGTVVLKCQVKDHEDSSLQWSNPAQQTLYFGEKRALRDNRIQLVTSTPHELSISISNVALADEGEYTCSIFTMPVRTAKSLVTVLGIPQKPIITGYKSSLREKDTATLNCQSSGSKPAARLTWRKGDQELHGEPTRIQEDPNGKTFTVSSSVTFQVTREDDGASIVCSVNHESLKGADRSTSQRIEVLYTPTAMIRPDPPHPREGQKLLLHCEGRGNPVPQQYLWEKEGSVPPLKMTQESALIFPFLNKSDSGTYGCTATSNMGSYKAYYTLNVNDPSPVPSSSSTYHAIIGGIVAFIVFLLLIMLIFLGHYLIRHKGTYLTHEAKGSDDAPDADTAIINAEGGQSGGDDKKEYFI

SEQ ID NO: 15612 - protein, 432 aa, Homo sapiens
MGAPAASLLLLLLLFACCWAPGGANLSQDGYWQEQDLELGTLAPLDEAISSTVWSSPDMLASQDSQPWTSDETVVAGGTVVLKCQVKDHEDSSLQWSNPAQQTLYFGEKRALRDNRIQLVTSTPHELSISISNVALADEGEYTCSIFTMPVRTAKSLVTVLGIPQKPIITGYKSSLREKDTATLNCQSSGSKPAARLTWRKGDQELHGEPTRIQEDPNGKTFTVSSSVTFQVTREDDGASIVCSVNHESLKGADRSTSQRIEVLYTPTAMIRPDPPHPREGQKLLLHCEGRGNPVPQQYLWEKEGSVPPLKMTQESALIFPFLNKSDSGTYGCTATSNMGSYKAYYTLNVNDPSPVPSSSSTYHAIIGGIVAFIVFLLLIMLIFLGHYLIRHKGTYLTHEAKGSDDAPDADTAIINAEGGQSGGDDKKEYFI

SEQ ID NO: 15613 - protein, 352 aa, Homo sapiens
MGAPAASLLLLLLLFACCWAPGGANLSQDDSQPWTSDETVVAGGTVVLKCQVKDHEDSSLQWSNPAQQTLYFGEKRALRDNRIQLVTSTPHELSISISNVALADEGEYTCSIFTMPVRTAKSLVTVLGIPQKPIITGYKSSLREKDTATLNCQSSGSKPAARLTWRKGDQELHGEPTRIQEDPNDTPTAMIRPDPPHPREGQKLLLHCEGRGNPVPQQYLWEKEGSVPPLKMTQESALIFPFLNKSDSGTYGCTATSNMGSYKAYYTLNVNDPSPVPSSSSTYHAIIGGIVAFIVFLLLIMLIFLGHYLIRHKGTYLTHEAKGSDDAPDADTAIINAEGGQSGGDDKKEYFI

SEQ ID NO: 15614 - protein, 532 aa, Homo sapiens
MNGVLIPHTPIAVDFWSLRRAGTARLFFLSHMHSDHTVGLSSTWARPLYCSPITAHLLHRHLQVSKQWIQALEVGESHVLPLDEIGQETMTVTLLDANHCPGSVMFLFEGYFGTILYTGDFRYTPSMLKEPALTLGKQIHTLYLDNTNCNPALVLPSRQEAAHQIVQLIRKHPQHNIKIGLYSLGKESLLEQLALEFQTWVVLSPRRLELVQLLGLADVFTVEEKAGRIHAVDHMEICHSNMLRWNQTHPTIAILPTSRKIHSSHPDIHVIPYSDHSSYSELRAFVAALKPCQVVPIVSRRPCGGFQDSLSPRISVPLIPDSVQQYMSSSSRKPSLLWLLERRLKRPRTQGVVFESPEESADQSQADRDSKKAKKEKLSPWPADLEKQPSHHPLRIKKQLFPDLYSKEWNKAVPFCESQKRVTMLTAPLGFSVHLRSTDEEFISQKTREEIGLGSPLVPMGDDDGGPEATGNQSAWMGHGSPLSHSSKGTPLLATEFRGLALKYLLTPVNFFQAGYSSRRFDQQVEKYHKPC

SEQ ID NO: 15615 - protein, 648 aa, Homo sapiens
MGKEPLTLKSIQVAVEELYPNKARALTLAQHSRAPSPRLRSRLFSKALKGDHRCGETETPKSCSEVAGCKAAMRHQGKIPEELSLDDRARTQKKWGRGKWEPEPSSKPPREATLEERHARGEKHLGVEIEKTSGEIIRCEKCKRERELQQSLERERLSLGTSELDMGKGPMYDVEKLVRTRSCRRSPEANPASGEEGWKGDSHRSSPRNPTQELRRPSKSMDKKEDRGPEDQESHAQGAAKAKKDLVEVLPVTEEGLREVKKDTRPMSRSKHGGWLLREHQAGFEKLRRTRGEEKEAEKEKKPCMSGGRRMTLRDDQPAKLEKEPKTRPEENKPERPSGRKPRPMGIIAANVEKHYETGRVIGDGNFAVVKECRHRETRQAYAMKIIDKSRLKGKEDMVDSEILIIQSLSHPNIVKLHEVYETDMEIYLILEYVQGGDLFDAIIESVKFPEPDAALMIMDLCKALVHMHDKSIVHRDLKPENLLVQRNEDKSTTLKLADFGLAKHVVRPIFTVCGTPTYVAPEILSEKGYGLEVDMWAAGVILYILLCGFPPFRSPERDQDELFNIIQLGHFEFLPPYWDNISDAAKDLVSRLLVVDPKKRYTAHQVLQHPWIETAGKTNTVKRQKQVSPSSEGHFRSQHKRVVEQVS

SEQ ID NO: 15616 - protein, 704 aa, Homo sapiens
MANENHGSPREEASLLSHSPGTSNQSQPCSPKPIRLVQDLPEELVHAGWEKCWSRRENRPYYFNRFTNQSLWEMPVLGQHDVISDPLGLNATPLPQDSSLVETPPAENKPRKRQLSEEQPSGNGVKKPKIEIPVTPTGQSVPSSPSIPGTPTLKMWGTSPEDKQQAALLRPTEVYWDLDIQTNAVIKHRGPSEVLPPHPEVELLRSQLILKLRQHYRELCQQREGIEPPRESFNRWMLERKVVDKGSDPLLPSNCEPVVSPSMFREIMNDIPIRLSRIKFREEAKRLLFKYAEAARRLIESRSASPDSRKVVKWNVEDTFSWLRKDHSASKEDYMDRLEHLRRQCGPHVSAAAKDSVEGICSKIYHISLEYVKRIREKHLAILKENNISEEVEAPEVEPRLVYCYPVRLAVSAPPMPSVEMHMENNVVCIRYKGEMVKVSRNYFSKLWLLYRYSCIDDSAFERFLPRVWCLLRRYQMMFGVGLYEGTGLQGSLPVHVFEALHRLFGVSFECFASPLNCYFRQYCSAFPDTDGYFGSRGPCLDFAPLSGSFEANPPFCEELMDAMVSHFERLLESSPEPLSFIVFIPEWREPPTPALTRMEQSRFKRHQLILPAFEHEYRSGSQHICKKEEMHYKAVHNTAVLFLQNDPGFAKWAPTPERLQELSAAYRQSGRSHSSGSSSSSSSEAKDRDSGREQGPSREPHPT

SEQ ID NO: 15617 - protein, 239 aa, Homo sapiens
MAALKSWLSRSVTSFFRYRQCLCVPVVANFKKRCFSELIRPWHKTVTIGFGVTLCAVPIAQKSEPHSLSSEALMRRAVSLVTDSTSTFLSQTTYALIEAITEYTKAVYTLTSLYRQYTSLLGKMNSEEEDEVWQVIIGARAEMTSKHQEYLKLETTWMTAVGLSEMAAEAAYQTGADQASITARNHIQLVKLQVEEVHQLSRKAETKLAEAQIEELRQKTQEEGEERAESEQEAYLRED

SEQ ID NO: 15618 - protein, 186 aa, Homo sapiens
MKSDFYFQKSEPHSLSSEALMRRAVSLVTDSTSTFLSQTTYALIEAITEYTKAVYTLTSLYRQYTSLLGKMNSEEEDEVWQVIIGARAEMTSKHQEYLKLETTWMTAVGLSEMAAEAAYQTGADQASITARNHIQLVKLQVEEVHQLSRKAETKLAEAQIEELRQKTQEEGEERAESEQEAYLRED

SEQ ID NO: 15619 - protein, 195 aa, Homo sapiens
MAALKSWLSRSVTSFFRYRQCLCVPVVANFKKRCFSELIRPWHKTVTIGFGVTLCAVPIAQAVYTLTSLYRQYTSLLGKMNSEEEDEVWQVIIGARAEMTSKHQEYLKLETTWMTAVGLSEMAAEAAYQTGADQASITARNHIQLVKLQVEEVHQLSRKAETKLAEAQIEELRQKTQEEGEERAESEQEAYLRED

SEQ ID NO: 15620 - protein, 388 aa, Homo sapiens
MGRARRFQWPLLLLWAAAAGPGAGQEVQTENVTVAEGGVAEITCRLHQYDGSIVVIQNPARQTLFFNGTRALKDERFQLEEFSPRRVRIRLSDARLEDEGGYFCQLYTEDTHHQIATLTVLVAPENPVVEVREQAVEGGEVELSCLVPRSRPAATLRWYRDRKELKGVSSSQENGKVWSVASTVRFRVDRKDDGGIIICEAQNQALPSGHSKQTQYVLDVQYSPTARIHASQAVVREGDTLVLTCAVTGNPRPNQIRWNRGNESLPERAEAVGETLTLPGLVSADNGTYTCEASNKHGHARALYVLVVYDPGAVVEAQTSVPYAIVGGILALLVFLIICVLVGMVWCSVRQKGSYLTHEASGLDEQGEAREAFLNGSDGHKRKEEFFI

SEQ ID NO: 15621 - protein, 1137 aa, Homo sapiens
MVCGCSALLPLPNPRPTMPATPNFLANPSSSSRWIPLQPMPVAWAFVQKTSALLWLLLLGTSLSPAWGQAKIPLETVKLWADTFGGDLYNTVTKYSGSLLLQKKYKDVESSLKIEEVDGLELVRKFSEDMENMLRRKVEAVQNLVEAAEEADLNHEFNESLVFDYYNSVLINERDEKGNFVELGAEFLLESNAHFSNLPVNTSISSVQLPTNVYNKDPDILNGVYMSEALNAVFVENFQRDPTLTWQYFGSATGFFRIYPGIKWTPDENGVITFDCRNRGWYIQAATSPKDIVILVDVSGSMKGLRMTIAKHTITTILDTLGENDFINIIAYNDYVHYIEPCFKGILVQADRDNREHFKLLVEELMVKGVGVVDQALREAFQILKQFQEAKQGSLCNQAIMLISDGAVEDYEPVFEKYNWPDCKVRVFTYLIGREVSFADRMKWIACNNKGYYTQISTLADTQENVMEYLHVLSRPMVINHDHDIIWTEAYMDSKLLSSQAQSLTLLTTVAMPVFSKKNETRSHGILLGVVGSDVALRELMKLAPRYKLGVHGYAFLNTNNGYILSHPDLRPLYREGKKLKPKPNYNSVDLSEVEWEDQAESLRTAMINRETGTLSMDVKVPMDKGKRVLFLTNDYFFTDISDTPFSLGVVLSRGHGEYILLGNTSVEEGLHDLLHPDLALAGDWIYCITDIDPDHRKLSQLEAMIRFLTRKDPDLECDEELVREVLFDAVVTAPMEAYWTALALNMSEESEHVVDMAFLGTRAGLLRSSLFVGSEKVSDRKFLTPEDEASVFTLDRFPLWYRQASEHPAGSFVFNLRWAEGPESAGEPMVVTASTAVAVTVDKRTAIAAAAGVQMKLEFLQRKFWAATRQCSTVDGPCTQSCEDSDLDCFVIDNNGFILISKRSRETGRFLGEVDGAVLTQLLSMGVFSQVTMYDYQAMCKPSSHHHSAAQPLVSPISAFLTATRWLLQELVLFLLEWSVWGSWYDRGAEAKSVFHHSHKHKKQDPLQPCDTEYPVFVYQPAIREANGIVECGPCQKVFVVQQIPNSNLLLLVTDPTCDCSIFPPVLQEATEVKYNASVKCDRMRSQKLRRRPDSCHAFHPEENAQDCGGASDTSASPPLLLLPVCAWGLLPQLLR

SEQ ID NO: 15622 - protein, 974 aa, Homo sapiens
MVCGCSALLPLPNPRPTMPATPNFLANPSSSSRWIPLQPMPVAWAFVQKTSALLWLLLLGTSLSPAWGQAKIPLETVKLWADTFGGDLYNTVTKYSGSLLLQKKYKDVESSLKIEEVDGLELVRKFSEDMENMLRRKVEAVQNLVEAAEEADLNHEFNESLVFDYYNSVLINERDEKGNFVELGAEFLLESNAHFSNLPVNTSISSVQLPTNVYNKDPDILNGVYMSEALNAVFVENFQRDPTLTWQYFGSATGFFRIYPGIKWTPDENGVITFDCRNRGWYIQAATSPKDIVILVDVSGSMKGLRMTIAKHTITTILDTLGENDFINIIAYNDYVHYIEPCFKGILVQADRDNREHFKLLVEELMVKGVGVVDQALREAFQILKQFQEAKQGSLCNQAIMLISDGAVEDYEPVFEKYNWPDCKVRVFTYLIGREVSFADRMKWIACNNKGYYTQISTLADTQENVMEYLHVLSRPMVINHDHDIIWTEAYMDSKLLSSQAQSLTLLTTVAMPVFSKKNETRSHGILLGVVGSDVALRELMKLAPRYKLGVHGYAFLNTNNGYILSHPDLRPLYREGKKLKPKPNYNSVDLSEVEWEDQAESLRTAMINRETGTLSMDVKVPMDKGKRVLFLTNDYFFTDISDTPFSLGVVLSRGHGEYILLGNTSVEEGLHDLLHPDLALAGDWIYCITDIDPDHRKLSQLEAMIRFLTRKDPDLECDEELVREVLFDAVVTAPMEAYWTALALNMSEESEHVVDMAFLGTRAGLLRSSLFVGSEKVSDRKFLTPEDEASVFTLDRFPLWYRQASEHPAGSFVFNLRWAEGPESAGEPMVVTASTAVAVTVDKRTAIAAAAGVQMKLEFLQRKFWAATRQCSTVDGPCTQSCEDSDLDCFVIDNNGFILISKRSRETGRFLGEVDGAVLTQLLSMGVFSQVTMYDYQAMCKPSSHHHSAAQPLVSPISAFLTATRWLLQELVL

SEQ ID NO: 15623 - protein, 1073 aa, Homo sapiens
MAVALGTRRRDRVKLWADTFGGDLYNTVTKYSGSLLLQKKYKDVESSLKIEEVDGLELVRKFSEDMENMLRRKVEAVQNLVEAAEEADLNHEFNESLVFDYYNSVLINERDEKGNFVELGAEFLLESNAHFSNLPVNTSISSVQLPTNVYNKDPDILNGVYMSEALNAVFVENFQRDPTLTWQYFGSATGFFRIYPGIKWTPDENGVITFDCRNRGWYIQAATSPKDIVILVDVSGSMKGLRMTIAKHTITTILDTLGENDFINIIAYNDYVHYIEPCFKGILVQADRDNREHFKLLVEELMVKGVGVVDQALREAFQILKQFQEAKQGSLCNQAIMLISDGAVEDYEPVFEKYNWPDCKVRVFTYLIGREVSFADRMKWIACNNKGYYTQISTLADTQENVMEYLHVLSRPMVINHDHDIIWTEAYMDSKLLSSQAQSLTLLTTVAMPVFSKKNETRSHGILLGVVGSDVALRELMKLAPRYKLGVHGYAFLNTNNGYILSHPDLRPLYREGKKLKPKPNYNSVDLSEVEWEDQAESLRTAMINRETGTLSMDVKVPMDKGKRVLFLTNDYFFTDISDTPFSLGVVLSRGHGEYILLGNTSVEEGLHDLLHPDLALAGDWIYCITDIDPDHRKLSQLEAMIRFLTRKDPDLECDEELVREVLFDAVVTAPMEAYWTALALNMSEESEHVVDMAFLGTRAGLLRSSLFVGSEKVSDRKFLTPEDEASVFTLDRFPLWYRQASEHPAGSFVFNLRWAEGPESAGEPMVVTASTAVAVTVDKRTAIAAAAGVQMKLEFLQRKFWAATRQCSTVDGPCTQSCEDSDLDCFVIDNNGFILISKRSRETGRFLGEVDGAVLTQLLSMGVFSQVTMYDYQAMCKPSSHHHSAAQPLVSPISAFLTATRWLLQELVLFLLEWSVWGSWYDRGAEAKSVFHHSHKHKKQDPLQPCDTEYPVFVYQPAIREANGIVECGPCQKVFVVQQIPNSNLLLLVTDPTCDCSIFPPVLQEATEVKYNASVKCDRMRSQKLRRRPDSCHAFHPEENAQDCGGASDTSASPPLLLLPVCAWGLLPQLLR

SEQ ID NO: 15624 - protein, 1154 aa, Homo sapiens
MVCGCSALLPLPNPRPTMPATPNFLANPSSSSRWIPLQPMPVAWAFVQKTSALLWLLLLGTSLSPAWGQAKIPLETVKLWADTFGGDLYNTVTKYSGSLLLQKKYKDVESSLKIEEVDGLELVRKFSEDMENMLRRKVEAVQNLVEAAEEADLNHEFNESLVFDYYNSVLINERDEKGNFVELGAEFLLESNAHFSNLPVNTSISSVQLPTNVYNKDPDILNGVYMSEALNAVFVENFQRDPTLTWQYFGSATGFFRIYPGIKWTPDENGVITFDCRNRGWYIQAATSPKDIVILVDVSGSMKGLRMTIAKHTITTILDTLGENDFINIIAYNDYVHYIEPCFKGILVQADRDNREHFKLLVEELMVKGVGVVDQALREAFQILKQFQEAKQGSLCNQAIMLISDGAVEDYEPVFEKYNWPDCKVRVFTYLIGREVSFADRMKWIACNNKGYYTQISTLADTQENVMEYLHVLSRPMVINHDHDIIWTEAYMDSKLLSSQAQSLTLLTTVAMPVFSKKNETRSHGILLGVVGSDVALRELMKLAPRYKLGVHGYAFLNTNNGYILSHPDLRPLYREGKKLKPKPNYNSVDLSEVEWEDQAESLRTAMINRETGTLSMDVKVPMDKGKRVLFLTNDYFFTDISDTPFSLGVVLSRGHGEYILLGNTSVEEGLHDLLHPDLALAGDWIYCITDIDPDHRKLSQLEAMIRFLTRKDPDLECDEELVREVLFDAVVTAPMEAYWTALALNMSEESEHVVDMAFLGTRAGLLRSSLFVGSEKVSDRKFLTPEDEASVFTLDRFPLWYRQASEHPAGSFVFNLRWAEGPESAGEPMVVTASTAVAVTVDKRTAIAAAAGVQMKLEFLQRKFWAATRQCSTVDGPCTQSCEDSDLDCFVIDNNGFILISKRSRETGRFLGEVDGAVLTQLLSMGVFSQVTMYDYQAMCKPSSHHHSAAQPLVSPISAFLTATRWLLQELVLFLLEWSVWGSWYDRGAEAKSVFHHSHKHKKQDPLQPCDTEYPVFVYQPAIREANGIVECGPCQKVFVVQQIPNSNLLLLVTDPTCDCSIFPPVLQEATEVKYNASVKCDRMRSQKLRRRPDSCHAFHPEVRVEADRGWAGFSSPNPLCLGLCPCRQEHIGMPMNTPVPVLLGGNIRVYAL

SEQ ID NO: 15625 - protein, 1090 aa, Homo sapiens
MAVALGTRRRDRVKLWADTFGGDLYNTVTKYSGSLLLQKKYKDVESSLKIEEVDGLELVRKFSEDMENMLRRKVEAVQNLVEAAEEADLNHEFNESLVFDYYNSVLINERDEKGNFVELGAEFLLESNAHFSNLPVNTSISSVQLPTNVYNKDPDILNGVYMSEALNAVFVENFQRDPTLTWQYFGSATGFFRIYPGIKWTPDENGVITFDCRNRGWYIQAATSPKDIVILVDVSGSMKGLRMTIAKHTITTILDTLGENDFINIIAYNDYVHYIEPCFKGILVQADRDNREHFKLLVEELMVKGVGVVDQALREAFQILKQFQEAKQGSLCNQAIMLISDGAVEDYEPVFEKYNWPDCKVRVFTYLIGREVSFADRMKWIACNNKGYYTQISTLADTQENVMEYLHVLSRPMVINHDHDIIWTEAYMDSKLLSSQAQSLTLLTTVAMPVFSKKNETRSHGILLGVVGSDVALRELMKLAPRYKLGVHGYAFLNTNNGYILSHPDLRPLYREGKKLKPKPNYNSVDLSEVEWEDQAESLRTAMINRETGTLSMDVKVPMDKGKRVLFLTNDYFFTDISDTPFSLGVVLSRGHGEYILLGNTSVEEGLHDLLHPDLALAGDWIYCITDIDPDHRKLSQLEAMIRFLTRKDPDLECDEELVREVLFDAVVTAPMEAYWTALALNMSEESEHVVDMAFLGTRAGLLRSSLFVGSEKVSDRKFLTPEDEASVFTLDRFPLWYRQASEHPAGSFVFNLRWAEGPESAGEPMVVTASTAVAVTVDKRTAIAAAAGVQMKLEFLQRKFWAATRQCSTVDGPCTQSCEDSDLDCFVIDNNGFILISKRSRETGRFLGEVDGAVLTQLLSMGVFSQVTMYDYQAMCKPSSHHHSAAQPLVSPISAFLTATRWLLQELVLFLLEWSVWGSWYDRGAEAKSVFHHSHKHKKQDPLQPCDTEYPVFVYQPAIREANGIVECGPCQKVFVVQQIPNSNLLLLVTDPTCDCSIFPPVLQEATEVKYNASVKCDRMRSQKLRRRPDSCHAFHPEVRVEADRGWAGFSSPNPLCLGLCPCRQEHIGMPMNTPVPVLLGGNIRVYAL

SEQ ID NO: 15626 - protein, 41 aa, Homo sapiens
MKLEFLQRKFWAATRQDLDCFVIDNNGFILISKRSRESDYV

SEQ ID NO: 15627 - protein, 224 aa, Homo sapiens
MQAPGRGPLGLRLMMPGRRGALREPGGCGSCLGVALALLLLLLPACCPVRAQNDTEPIVLEGKCLVVCDSSPSADGAVTSSLGISVRSGSAKVAFSATRSTNHEPSEMSNRTMTIYFDQVLVNIGNHFDLASSIFVAPRKGIYSFSFHVVKVYNRQTIQVSLMQNGYPVISAFAGDQDVTREAASNGVLLLMEREDKVHLKLERGNLMGGWKYSTFSGFLVFPL

SEQ ID NO: 15628 - protein, 205 aa, Homo sapiens
MLGAKPHWLPGPLHSPGLPLVLVLLALGAGWAQEGSEPVLLEGECLVVCEPGRAAAGGPGGAALGEAPPGRVAFAAVRSHHHEPAGETGNGTSGAIYFDQVLVNEGGGFDRASGSFVAPVRGVYSFRFHVVKVYNRQTVQVSLMLNTWPVISAFANDPDVTREAATSSVLLPLDPGDRVSLRLRRGNLLGGWKYSSFSGFLIFPL

SEQ ID NO: 15629 - protein, 563 aa, Homo sapiens
MSSNLLPTLNSGGKVKDGSTKEDRPYKIFFRDLFLVKENEMAAKETEKFMNRNMKVYQKTTFSSRMKSHSYLSQLAFYPKRSGRSFEKFGPGPAPIPRLIEGSDTKRTVHEFINDQRDRFLLEYALSTKRNTIKKFEKDIAMRERQLKKAEKKLQDDALAFEEFLRENDQRSVDALKMAAQETINKLQMTAELKKASMEVQAVKSEIAKTEFLLREYMKYGFFLLQMSPKHWQIQQALKRAQASKSKANIILPKILAKLSLHSSNKEGILEESGRTAVLSEDASQGRDSQGKPSRSLTRTPEKKKSNLAESFGSEDSLEFLLDDEMDVDLEPALYFKEPEELLQVLRELEEQNLTLFQYSQDVDENLEEVNKREKVIQDKTNSNIEFLLEQEKMLKANCVREEEKAAELQLKSKLFSFGEFNSDAQEILIDSLSKKITQVYKVCIGDAEDDGLNPIQKLVKVESRLVELCDLIESIPKENVEAIERMKQKEWRQKFRDEKMKEKQRHQQERLKAALEKAVAQPKKKLGRRLVFHSKPPSGNKQQLPLVNETKTKSQEEEYFFT

SEQ ID NO: 15630 - protein, 307 aa, Homo sapiens
MLRHSPSLWELVEEHVPLRERREVKRILGEAAVDLSLELRAEVAMLRALLQEARSSQAPSSRPISDPSSLLAPPPLLKDLLRQELRQLLQGLRHKAICEGRDQAQAWVQYSPRVLHFALEEPRCDLPEQEIFQMRGGGPSSGHRDLSIIKDQLNVSNIDQVARHLRGLLEEECHTLEREILILQRCLEEEYLRPCHPSEAALEPTLAELKEQKKAMEQELQASVGPSCVSPNHRQRPLGSSTQGLRPPLPLCGVAPLQCCLPAPPLEPYLRPRGQSATHRWGRQLQCSPREGPASTPMSSAAPQAPA

SEQ ID NO: 15631 - protein, 271 aa, Homo sapiens
MLRHSPSLWELVEEHVPLRERREVKRILGEAAVDLSLELRAEDLLRQELRQLLQGLRHKAICEGRDQAQAWVQYSPRVLHFALEEPRCDLPEQEIFQMRGGGPSSGHRDLSIIKDQLNVSNIDQVARHLRGLLEEECHTLEREILILQRCLEEEYLRPCHPSEAALEPTLAELKEQKKAMEQELQASVGPSCVSPNHRQRPLGSSTQGLRPPLPLCGVAPLQCCLPAPPLEPYLRPRGQSATHRWGRQLQCSPREGPASTPMSSAAPQAPA

SEQ ID NO: 15632 - protein, 550 aa, Homo sapiens
MTKVPATKKLQSSPNSGAVRPFYASENLRQVPDKPMKSIKYMDKEIINLKKDLIRSRFLIQSVKIGRGYFAILREETAKKKKQQQLQKLKEEERNKFQPAEKISEIHYGDTLLSTYDDEKLKTLGARVTRRPFTPIHSCIISPSLTEAHVEPLFRQLCALHWLLEALTIDHTHHTMKPVITCWNPKDPGGSKSTIKKINKDKSMGQKWEHFITAPKTKKFKIPTMRVTNRKPSRRGSTLSLSRASGGSSPQSSMISVNPGSDEPPSVNTQVTSSKDIEDNESSSTKPDEEPLYMNLQKLLEMVREDARRTVTIENGMQRKAPSILSVLKQNKSNSAYKEMQTTLKSSERSSSTSAESHIQPVQKKSKNRTNCDINIHYKSGVCNTMRAKFYSVAQEAGFCLQDKMEILMKRQEERGIQKFRAFVLVSNFQKDIAKMRHHISVVKGDAEEIADHWYFDLLSKLPEDLKNFRPAKKILVKLQKFGENLDLRIRPHVLLKVLQDLRIWELCSPDIAVAIEFVREHIIHMPQEDYISWLQSRINIPIGPYSALR

SEQ ID NO: 15633 - protein, 165 aa, Homo sapiens
MQAETILEGLEAGLPQAVSSGLSLVPAPGLVLTCLSAPSGPGGMALEPPPTTLRKAFLAQSTLLESTLEGAPEWAAPHPEEQRRSPPACSQHTPPLPSTPTGPPPCSPGGNHPLCALSGRGGGRCSIPSLSSSSTFSLFSSGCWNPRVKLRVRKSQSQGRAGQLI

SEQ ID NO: 15634 - protein, 1589 aa, Homo sapiens
MSATSWFLVSSSGARHRLPRELIFVGREECELMLQSRSVDKQHAVINYDQDRDEHWVKDLGSLNGTFVNDMRIPDQKYVTLKLNDVIRFGYDSNMYVLERVQHRVPEEALKHEKYTSQLQVSVKGLAPKRSEALPEHTPYCEASNPRPEKGDRRPGTEAASYRTPLYGQPSWWGEDDGSTLPDAQRQGEPYPERPKGPVQQDGELHGFRAPAEPQGCSFRREPSYFEIPTKETPQPSQPPEVPAHEMPTKDAEAGGGGAAPVVQSHASFTIEFDDCSPGKMKIKDHITKFSLRQRRPPGKEATPGEMVSAETKVADWLVQNDPSLLHRVGPGDDRHSTKSDLPVHTRTLKGHKHEDGTQSDSEDPLAKAASAAGVPLEASGEQVRLQRQIKRDPQELLHNQQAFVIEFFDEDTPRKKRSQSFTHSPSGDPKADKRRGPTPADRDRPSVPAPVQAGGRSSGPQRAGSLKREKTEERLGSPSPASRTPARPFGSVGRRSRLAQDFMAQCLRESSPAARPSPEKVPPVLPAPLTPHGTSPVGPPTPPPAPTDPQLTKARKQEEDDSLSDAGTYTIETEAQDTEVEEARKMIDQVFGVLESPELSRASSATFRPVIRGDRDESDDGGVAQRMALLQEFASRPLGAAPQAEHQGLPVPGSPGGQKWVSRWASLADSYSDPGLTEDGLGRRGGEPEGSLPVRMRRRLPQLPSERADSPAGPESSRRSGPGPPELDSEQPSRLFGQEELDPDSLSDASGSDGGRGPEPGVEPQDSRRRSPQEGPTWSRGRRSPRAPGEPTPASFFIGDQNGDAVLSRKPLAAPGDGEGLGQTAQPSPPARDGVYVSANGRMVIQLRPGRSPEPDGPAPAFLRQESFTKEPASGPPAPGKPPHISSHPLLQDLAATRAARMDFHSQDTHLILKETETALAALEARLLSNSVDAECEGGSTPRPPEDALSGDSDVDTASTVSLRSGKSGPSPTTPQPLRAQKEMSPSPPAAQDPGGTALVSAREQSSERQHHPLGPTDMGRGEPVRRSAIRRGHRPRGSLDWPSEERGPVLAHLPSSDVMASNHETPEATGAGRLGSRRKPAAPPPSPAAREEQSRSSASSQKGPQALTRSNSLSTPRPTRASRLRRARLGDASDTEAADGERGSLGNPEPVGRPAAEQAKKLSRLDILAMPRKRAGSFTGTSDPEAAPARTSFSGRSVELCCASRKPTMAEARAVSRKAANTATTTGPRQPFSRARSGSARYTSNTRRRQQGSDYTSTSEEEYGSRHGSPKHTRSHTSTATQTPRAGSSSRARSRAPGPRDTDDDEEEPDPYGFIVQTAEIAEIARLSQTLVKDVAILAQEIHDVAGDGDTLGSSEPAHSASLSNMPSTPASTISAREELVQRIPEASLNFQKVPPGSLNSRDFDQNMNDSCEDALANKTRPRNREEVIFDNLMLNPVSQLSQAIRENTEHLAEKMKILFQNTGRAWEDLEARINAENEVPILKTSNKEISSILKELRRVQKQLEVINAIVDPSGSLDLLTGNRSLASSAQPGLGKGRVAAQSPPSPASAEALLPALPLRNFPQRASCGPPSLPDPTFLPDAERFLI

SEQ ID NO: 15635 - protein, 1554 aa, Homo sapiens
MSATSWFLVSSSGARHRLPRELIFVGREECELMLQSRSVDKQHAVINYDQDRDEHWVKDLGSLNGTFVNDMRIPDQKYVTLKLNDVIRFGYDSNMYVLERVQHRVPEEALKHEKYTSQLQVSVKGLAPKRSEALPEHTPYCEASNPRPEKGDRRPGTEAASYRTPLYGQPSWWGEDDGSTLPDAQRQGEPYPERPKGPVQQDGELHGFRAPAEPQGCSFRREPSYFEIPTKETPQPSQPPEVPAHEMPTKDAEAGGGGAAPVVQSHASFTIEFDDCSPGKMKIKDHITKFSLRQRRPPGKEATPGEMVSAETKVADWLVQNDPSLLHRVGPGDDRHSTKSDLPVHTRTLKGHKHEDGTQSDSEDPLAKAASAAGVPLEASGEQVRLQRQIKRDPQELLHNQQAFVIEFFDEDTPRKKRSQSFTHSPSGDPKADKRRGPTPADRDRPSVPAPVQAGGRSSGPQRAGSLKREKTEERLGSPSPASRTPARPFGSVGRRSRLAQDFMAQCLRESSPAARPSPEKVPPVLPAPLTPHGTSPVGPPTPPPAPTDPQLTKARKQEEDDSLSDAGTYTIETEAQDTEVEEARKMIDQVFGVLESPELSRASSATFRPVIRGDRDESDDGGVAQRMALLQEFASRPLGAAPQAEHQGLPVPGSPGGQKWVSRWASLADSYSDPGLTEDGLGRRGGEPEGSLPVRMRRRLPQLPSERADSPAGPESSRRSGPGPPELDSEQPSRLFGQEELDPDSLSDASGSDGGRGPEPGVEPQDSRRRSPQEGPTWSRGRRSPRAPGEPTPASFFIGDQNGDAVLSRKPLAAPGDGEGLGQTAQPSPPARDGVYVSANGRMVIQLRPGRSPEPDGPAPAFLRQESFTKEPASGPPAPGKPPHISSHPLLQDLAATRAARMDFHSQDTHLILKETETALAALEARLLSNSVDAECEGGSTPRPPEDALSGDSDVDTASTVSLRSGKSGPSPTTPQPLRAQKEMSPSPPAAQDPGGTALVSAREQSSERQHHPLGPTDMGRGEPVRRSAIRRGHRPRGSLDWPSEERGPVLAHLPSSDVMASNHETPEATGAGRLGSRRKPAAPPPSPAAREEQSRSSASSQKGPQALTRSNSLSTPRPTRASRLRRARLGDASDTEAADGERGSLGNPEPVGRPAAEQAKKLSRLDILAMPRKRAGSFTGTSDPEAAPARTSFSGRSVELCCASRKPTMAEARAVSRKAANTATTTGPRQPFSRARSGSARYTSTTQTPRAGSSSRARSRAPGPRDTDDDEEEPDPYGFIVQTAEIAEIARLSQTLVKDVAILAQEIHDVAGDGDTLGSSEPAHSASLSNMPSTPASTISAREELVQRIPEASLNFQKVPPGSLNSRDFDQNMNDSCEDALANKTRPRNREEVIFDNLMLNPVSQLSQAIRENTEHLAEKMKILFQNTGRAWEDLEARINAENEVPILKTSNKEISSILKELRRVQKQLEVINAIVDPSGSLDLLTGNRSLASSAQPGLGKGRVAAQSPPSPASAEALLPALPLRNFPQRASCGPPSLPDPTFLPDAERFLI

SEQ ID NO: 15636 - protein, 1519 aa, Homo sapiens
MRIPDQKYVTLKLNDVIRFGYDSNMYVLERVQHRVPEEALKHEKYTSQLQVSVKGLAPKRSEALPEHTPYCEASNPRPEKGDRRPGTEAASYRTPLYGQPSWWGEDDGSTLPDAQRQGEPYPERPKGPVQQDGELHGFRAPAEPQGCSFRREPSYFEIPTKETPQPSQPPEVPAHEMPTKDAEAGGGGAAPVVQSHASFTIEFDDCSPGKMKIKDHITKFSLRQRRPPGKEATPGEMVSAETKVADWLVQNDPSLLHRVGPGDDRHSTKSDLPVHTRTLKGHKHEDGTQSDSEDPLAKAASAAGVPLEASGEQVRLQRQIKRDPQELLHNQQAFVIEFFDEDTPRKKRSQSFTHSPSGDPKADKRRGPTPADRDRPSVPAPVQAGGRSSGPQRAGSLKREKTEERLGSPSPASRTPARPFGSVGRRSRLAQDFMAQCLRESSPAARPSPEKVPPVLPAPLTPHGTSPVGPPTPPPAPTDPQLTKARKQEEDDSLSDAGTYTIETEAQDTEVEEARKMIDQVFGVLESPELSRASSATFRPVIRGDRDESDDGGVAQRMALLQEFASRPLGAAPQAEHQGLPVPGSPGGQKWVSRWASLADSYSDPGLTEDGLGRRGGEPEGSLPVRMRRRLPQLPSERADSPAGPESSRRSGPGPPELDSEQPSRLFGQEELDPDSLSDASGSDGGRGPEPGVEPQDSRRRSPQEGPTWSRGRRSPRAPGEPTPASFFIGDQNGDAVLSRKPLAAPGDGEGLGQTAQPSPPARDGVYVSANGRMVIQLRPGRSPEPDGPAPAFLRQESFTKEPASGPPAPGKPPHISSHPLLQDLAATRAARMDFHSQDTHLILKETETALAALEARLLSNSVDAECEGGSTPRPPEDALSGDSDVDTASTVSLRSGKSGPSPTTPQPLRAQKEMSPSPPAAQDPGGTALVSAREQSSERQHHPLGPTDMGRGEPVRRSAIRRGHRPRGSLDWPSEERGPVLAHLPSSDVMASNHETPEATGAGRLGSRRKPAAPPPSPAAREEQSRSSASSQKGPQALTRSNSLSTPRPTRASRLRRARLGDASDTEAADGERGSLGNPEPVGRPAAEQAKKLSRLDILAMPRKRAGSFTGTSDPEAAPARTSFSGRSVELCCASRKPTMAEARAVSRKAANTATTTGPRQPFSRARSGSARYTSNTRRRQQGSDYTSTSEEEYGSRHGSPKHTRSHTSTATQTPRAGSSSRARSRAPGPRDTDDDEEEPDPYGFIVQTAEIAEIARLSQTLVKDVAILAQEIHDVAGDGDTLGSSEPAHSASLSNMPSTPASTISAREELVQRIPEASLNFQKVPPGSLNSRDFDQNMNDSCEDALANKTRPRNREEVIFDNLMLNPVSQLSQAIRENTEHLAEKMKILFQNTGRAWEDLEARINAENEVPILKTSNKEISSILKELRRVQKQLEVINAIVDPSGSLDLLTGNRSLASSAQPGLGKGRVAAQSPPSPASAEALLPALPLRNFPQRASCGPPSLPDPTFLPDAERFLI

SEQ ID NO: 15637 - protein, 904 aa, Homo sapiens
MSYIKSNLELYQQYTAMAPKLLARISKLLMICQNAGISVPKGIRNIFEFTWEELISDPSVPTPSDILGLEVSFGAPLVVLMEPTFVQVPTLKKPLPPPPPAPPRPVLLATTGAAKRSTLSPTMARQVRTHQETLNRFQQQSIHLLTELLRLKMKAMVESMSVGANPLDITRRFVEASQLLHLNAKEMAFNCLISTAGRSGYSSGQLWKESLANMSAIGVNSPYQLIYHSSTACLSFSLSAGKEAKKKIGKSRTTEDVSMPPLHRGVGTPANSLEFSDPCPEAREKLQELCRHIEAERATWKGRNISYPMILRNYKAKMPSHLMLARKGDSQTPGLHYPPTAGAQTLSPTSHPSSANHHFSQHCQEGKAPKKAFKFHYTFYDGSSFVYYPSGNVAVCQIPTCCRGRTITCLFNDIPGFSLLALFNTEGQGCVHYNLKTSCPYVLILDEEGGTTNDQQGYVVHKWSWTSRTETLLSLEYKVNEEMKLKVLGQDSITVTFTSLNETVTLTVSANNCPHGMAYDKRLNRRISNMDDKVYKMSRALAEIKKRFQKTVTQFINSILLAAGLFTIEYPTKKEEEEFVRFKMRSRTHPERLPKLSLYSGESLLRSQSGHLESSIAETLKDEPESAPVSPVRKTTKIHTKAKVTSRGKAREGRSPTRWAALPSDCPLVLRKLMLKEDTRAGCKCLVKAPLVSDVELERFLLAPRDPSQVLVFGIISSQNYTSTGQLQWLLNTLYNHQQRGRGSPCIQCRYDSYRLLQYDLDSPLQEDPPLMVKKNSVVQGMILMFAGGKLIFGGRVLNGYGLSKQNLLKQIFRSQQDYKMGYFLPDDYKFSVPNSVLSLEDSESVKKAESEDIQGSSSSLALEDYVEKELSLEAEKTREPEVELHPLSRDSKITSWKKQASKK

SEQ ID NO: 15638 - protein, 782 aa, Homo sapiens
MARQVRTHQETLNRFQQQSIHLLTELLRLKMKAMVESMSVGANPLDITRRFVEASQLLHLNAKEMAFNCLISTAGRSGYSSGQLWKESLANMSAIGVNSPYQLIYHSSTACLSFSLSAGKEAKKKIGKSRTTEDVSMPPLHRGVGTPANSLEFSDPCPEAREKLQELCRHIEAERATWKGRNISYPMILRNYKAKMPSHLMLARKGDSQTPGLHYPPTAGAQTLSPTSHPSSANHHFSQHCQEGKAPKKAFKFHYTFYDGSSFVYYPSGNVAVCQIPTCCRGRTITCLFNDIPGFSLLALFNTEGQGCVHYNLKTSCPYVLILDEEGGTTNDQQGYVVHKWSWTSRTETLLSLEYKVNEEMKLKVLGQDSITVTFTSLNETVTLTVSANNCPHGMAYDKRLNRRISNMDDKVYKMSRALAEIKKRFQKTVTQFINSILLAAGLFTIEYPTKKEEEEFVRFKMRSRTHPERLPKLSLYSGESLLRSQSGHLESSIAETLKDEPESAPVSPVRKTTKIHTKAKVTSRGKAREGRSPTRWAALPSDCPLVLRKLMLKEDTRAGCKCLVKAPLVSDVELERFLLAPRDPSQVLVFGIISSQNYTSTGQLQWLLNTLYNHQQRGRGSPCIQCRYDSYRLLQYDLDSPLQEDPPLMVKKNSVVQGMILMFAGGKLIFGGRVLNGYGLSKQNLLKQIFRSQQDYKMGYFLPDDYKFSVPNSVLSLEDSESVKKAESEDIQGSSSSLALEDYVEKELSLEAEKTREPEVELHPLSRDSKITSWKKQASKK

SEQ ID NO: 15639 - protein, 1156 aa, Homo sapiens
MSKLRMVLLEDSGSADFRRHFVNLSPFTITVVLLLSACFVTSSLGGTDKELRLVDGENKCSGRVEVKVQEEWGTVCNNGWSMEAVSVICNQLGCPTAIKAPGWANSSAGSGRIWMDHVSCRGNESALWDCKHDGWGKHSNCTHQQDAGVTCSDGSNLEMRLTRGGNMCSGRIEIKFQGRWGTVCDDNFNIDHASVICRQLECGSAVSFSGSSNFGEGSGPIWFDDLICNGNESALWNCKHQGWGKHNCDHAEDAGVICSKGADLSLRLVDGVTECSGRLEVRFQGEWGTICDDGWDSYDAAVACKQLGCPTAVTAIGRVNASKGFGHIWLDSVSCQGHEPAIWQCKHHEWGKHYCNHNEDAGVTCSDGSDLELRLRGGGSRCAGTVEVEIQRLLGKVCDRGWGLKEADVVCRQLGCGSALKTSYQVYSKIQATNTWLFLSSCNGNETSLWDCKNWQWGGLTCDHYEEAKITCSAHREPRLVGGDIPCSGRVEVKHGDTWGSICDSDFSLEAASVLCRELQCGTVVSILGGAHFGEGNGQIWAEEFQCEGHESHLSLCPVAPRPEGTCSHSRDVGVVCSRYTEIRLVNGKTPCEGRVELKTLGAWGSLCNSHWDIEDAHVLCQQLKCGVALSTPGGARFGKGNGQIWRHMFHCTGTEQHMGDCPVTALGASLCPSEQVASVICSGNQSQTLSSCNSSSLGPTRPTIPEESAVACIESGQLRLVNGGGRCAGRVEIYHEGSWGTICDDSWDLSDAHVVCRQLGCGEAINATGSAHFGEGTGPIWLDEMKCNGKESRIWQCHSHGWGQQNCRHKEDAGVICSEFMSLRLTSEASREACAGRLEVFYNGAWGTVGKSSMSETTVGVVCRQLGCADKGKINPASLDKAMSIPMWVDNVQCPKGPDTLWQCPSSPWEKRLASPSEETWITCDNKIRLQEGPTSCSGRVEIWHGGSWGTVCDDSWDLDDAQVVCQQLGCGPALKAFKEAEFGQGTGPIWLNEVKCKGNESSLWDCPARRWGHSECGHKEDAAVNCTDISVQKTPQKATTGRSSRQSSFIAVGILGVVLLAIFVALFFLTKKRRQRQRLAVSSRGENLVHQIQYREMNSCLNADDLDLMNSSENSHESADFSAAELISVSKFLPISGMEKEAILSHTEKENGNL

SEQ ID NO: 15640 - protein, 1161 aa, Homo sapiens
MSKLRMVLLEDSGSADFRRHFVNLSPFTITVVLLLSACFVTSSLGGTDKELRLVDGENKCSGRVEVKVQEEWGTVCNNGWSMEAVSVICNQLGCPTAIKAPGWANSSAGSGRIWMDHVSCRGNESALWDCKHDGWGKHSNCTHQQDAGVTCSDGSNLEMRLTRGGNMCSGRIEIKFQGRWGTVCDDNFNIDHASVICRQLECGSAVSFSGSSNFGEGSGPIWFDDLICNGNESALWNCKHQGWGKHNCDHAEDAGVICSKGADLSLRLVDGVTECSGRLEVRFQGEWGTICDDGWDSYDAAVACKQLGCPTAVTAIGRVNASKGFGHIWLDSVSCQGHEPAIWQCKHHEWGKHYCNHNEDAGVTCSDGSDLELRLRGGGSRCAGTVEVEIQRLLGKVCDRGWGLKEADVVCRQLGCGSALKTSYQVYSKIQATNTWLFLSSCNGNETSLWDCKNWQWGGLTCDHYEEAKITCSAHREPRLVGGDIPCSGRVEVKHGDTWGSICDSDFSLEAASVLCRELQCGTVVSILGGAHFGEGNGQIWAEEFQCEGHESHLSLCPVAPRPEGTCSHSRDVGVVCSRYTEIRLVNGKTPCEGRVELKTLGAWGSLCNSHWDIEDAHVLCQQLKCGVALSTPGGARFGKGNGQIWRHMFHCTGTEQHMGDCPVTALGASLCPSEQVASVICSGNQSQTLSSCNSSSLGPTRPTIPEESAVACIESGQLRLVNGGGRCAGRVEIYHEGSWGTICDDSWDLSDAHVVCRQLGCGEAINATGSAHFGEGTGPIWLDEMKCNGKESRIWQCHSHGWGQQNCRHKEDAGVICSEFMSLRLTSEASREACAGRLEVFYNGAWGTVGKSSMSETTVGVVCRQLGCADKGKINPASLDKAMSIPMWVDNVQCPKGPDTLWQCPSSPWEKRLASPSEETWITCDNKIRLQEGPTSCSGRVEIWHGGSWGTVCDDSWDLDDAQVVCQQLGCGPALKAFKEAEFGQGTGPIWLNEVKCKGNESSLWDCPARRWGHSECGHKEDAAVNCTDISVQKTPQKATTGRSSRQSSFIAVGILGVVLLAIFVALFFLTKKRRQRQRLAVSSRGENLVHQIQYREMNSCLNADDLDLMNSSGLWVLGGSIAQGFRSVAAVEAQTFYFDKQLKKSKNVIGSLDAYNGQE

SEQ ID NO: 15641 - protein, 1121 aa, Homo sapiens
MSKLRMVLLEDSGSADFRRHFVNLSPFTITVVLLLSACFVTSSLGGTDKELRLVDGENKCSGRVEVKVQEEWGTVCNNGWSMEAVSVICNQLGCPTAIKAPGWANSSAGSGRIWMDHVSCRGNESALWDCKHDGWGKHSNCTHQQDAGVTCSDGSNLEMRLTRGGNMCSGRIEIKFQGRWGTVCDDNFNIDHASVICRQLECGSAVSFSGSSNFGEGSGPIWFDDLICNGNESALWNCKHQGWGKHNCDHAEDAGVICSKGADLSLRLVDGVTECSGRLEVRFQGEWGTICDDGWDSYDAAVACKQLGCPTAVTAIGRVNASKGFGHIWLDSVSCQGHEPAIWQCKHHEWGKHYCNHNEDAGVTCSDGSDLELRLRGGGSRCAGTVEVEIQRLLGKVCDRGWGLKEADVVCRQLGCGSALKTSYQVYSKIQATNTWLFLSSCNGNETSLWDCKNWQWGGLTCDHYEEAKITCSAHREPRLVGGDIPCSGRVEVKHGDTWGSICDSDFSLEAASVLCRELQCGTVVSILGGAHFGEGNGQIWAEEFQCEGHESHLSLCPVAPRPEGTCSHSRDVGVVCSRYTEIRLVNGKTPCEGRVELKTLGAWGSLCNSHWDIEDAHVLCQQLKCGVALSTPGGARFGKGNGQIWRHMFHCTGTEQHMGDCPVTALGASLCPSEQVASVICSGNQSQTLSSCNSSSLGPTRPTIPEESAVACIESGQLRLVNGGGRCAGRVEIYHEGSWGTICDDSWDLSDAHVVCRQLGCGEAINATGSAHFGEGTGPIWLDEMKCNGKESRIWQCHSHGWGQQNCRHKEDAGVICSEFMSLRLTSEASREACAGRLEVFYNGAWGTVGKSSMSETTVGVVCRQLGCADKGKINPASLDKAMSIPMWVDNVQCPKGPDTLWQCPSSPWEKRLASPSEETWITCDNKIRLQEGPTSCSGRVEIWHGGSWGTVCDDSWDLDDAQVVCQQLGCGPALKAFKEAEFGQGTGPIWLNEVKCKGNESSLWDCPARRWGHSECGHKEDAAVNCTDISVQKTPQKATTGRSSRQSSFIAVGILGVVLLAIFVALFFLTKKRRQRQRLAVSSRGENLVHQIQYREMNSCLNADDLDLMNSSGGHSEPH

SEQ ID NO: 15642 - protein, 1154 aa, Homo sapiens
MSKLRMVLLEDSGSADFRRHFVNLSPFTITVVLLLSACFVTSSLGGTDKELRLVDGENKCSGRVEVKVQEEWGTVCNNGWSMEAVSVICNQLGCPTAIKAPGWANSSAGSGRIWMDHVSCRGNESALWDCKHDGWGKHSNCTHQQDAGVTCSDGSNLEMRLTRGGNMCSGRIEIKFQGRWGTVCDDNFNIDHASVICRQLECGSAVSFSGSSNFGEGSGPIWFDDLICNGNESALWNCKHQGWGKHNCDHAEDAGVICSKGADLSLRLVDGVTECSGRLEVRFQGEWGTICDDGWDSYDAAVACKQLGCPTAVTAIGRVNASKGFGHIWLDSVSCQGHEPAIWQCKHHEWGKHYCNHNEDAGVTCSDGSDLELRLRGGGSRCAGTVEVEIQRLLGKVCDRGWGLKEADVVCRQLGCGSALKTSYQVYSKIQATNTWLFLSSCNGNETSLWDCKNWQWGGLTCDHYEEAKITCSAHREPRLVGGDIPCSGRVEVKHGDTWGSICDSDFSLEAASVLCRELQCGTVVSILGGAHFGEGNGQIWAEEFQCEGHESHLSLCPVAPRPEGTCSHSRDVGVVCSSKTQKTSLIGSYTVKGTGLGSHSCLFLKPCLLPGYTEIRLVNGKTPCEGRVELKTLGAWGSLCNSHWDIEDAHVLCQQLKCGVALSTPGGARFGKGNGQIWRHMFHCTGTEQHMGDCPVTALGASLCPSEQVASVICSGNQSQTLSSCNSSSLGPTRPTIPEESAVACIESGQLRLVNGGGRCAGRVEIYHEGSWGTICDDSWDLSDAHVVCRQLGCGEAINATGSAHFGEGTGPIWLDEMKCNGKESRIWQCHSHGWGQQNCRHKEDAGVICSEFMSLRLTSEASREACAGRLEVFYNGAWGTVGKSSMSETTVGVVCRQLGCADKGKINPASLDKAMSIPMWVDNVQCPKGPDTLWQCPSSPWEKRLASPSEETWITCDNKIRLQEGPTSCSGRVEIWHGGSWGTVCDDSWDLDDAQVVCQQLGCGPALKAFKEAEFGQGTGPIWLNEVKCKGNESSLWDCPARRWGHSECGHKEDAAVNCTDISVQKTPQKATTGRSSRQSSFIAVGILGVVLLAIFVALFFLTKKRRQRQRLAVSSRGENLVHQIQYREMNSCLNADDLDLMNSSGGHSEPH

SEQ ID NO: 15643 - protein, 242 aa, Homo sapiens
MWASRDHLPEPDLGDAAPPGSPSSFWTSGLPRQERSTSRQRSRGSPSSTCVPYKVHALATFECSATSHASRLWQTLQQFWADHISRPFSPRRPPLRRMPSLSTFYLLDHNTRQAELGLAYGAPCMRLSNQAFVFRGGRWTTESQLARTRSPLLSRTAWGWKAQVQRSKSQVLLEENNYLKLQQELLIDMLTETMARMHLLEKQRNPEVIPTAAARAGQRKMRKRAGASAGVLMIQPCALDSQ

SEQ ID NO: 15644 - protein, 267 aa, Homo sapiens
MHYIKTWSLLGEMSEKLRRCRKELTAAIDRAFEGVSYSQECTGQQRLELSAAPLSFSLPVHRLLCRRHPLAACSSAAPFAAVPCAPENENPAFATNHAPVNAKPHALCPERKPLTSKENVLMHSSILAPERESWRTAGEGENWRKENLRKDMERDLKADSNMPLNNSSQEVTKDLLDMIDHTSIRTIEELAGKIEFENELNHMCGHCQDSPFKEEAWALLMDKSPQKATDADPGSLKQAFDDHNIVETVLDLEEDYNVMTSFKYQIE

SEQ ID NO: 15645 - protein, 293 aa, Homo sapiens
MPTSSSFKHRIKEQEDYIRDWTAHREEIARISQDLALIAREINDVAGEIDSVTSSGTAPSTTLVDRVFDESLNFQKIPPLVHSKTPEGNNGRSGDPRPQAAEPPDHLTITRRRTWSRDEVMGDNLLLSSVFQFSKKIRQSIDKTAGKIRILFKDKDRNWDDIESKLRAESEVPIVKTSSMEISSILQELKRVEKQLQAINAMIDPDGTLEALNNMGFPSAMLPSPPKQKSSPVNNHHSPGQTPTLGQPEARALHPAAVSAAAEFENAESEADFSIHFNRVNPDGEEEDVTVHK

SEQ ID NO: 15646 - protein, 2313 aa, Homo sapiens
MARFGEAVVARPGSGDGDSDQSRNRQGTPVPASGQAAAYKQTKAQRARTMALYNPIPVRQNCFTVNRSLFIFGEDNIVRKYAKKLIDWPPFEYMILATIIANCIVLALEQHLPEDDKTPMSRRLEKTEPYFIGIFCFEAGIKIVALGFIFHKGSYLRNGWNVMDFIVVLSGILATAGTHFNTHVDLRTLRAVRVLRPLKLVSGIPSLQIVLKSIMKAMVPLLQIGLLLFFAILMFAIIGLEFYSGKLHRACFMNNSGILEGFDPPHPCGVQGCPAGYECKDWIGPNDGITQFDNILFAVLTVFQCITMEGWTTVLYNTNDALGATWNWLYFIPLIIIGSFFVLNLVLGVLSGEFAKERERVENRRAFMKLRRQQQIERELNGYRAWIDKAEEVMLAEENKNAGTSALEVLRRATIKRSRTEAMTRDSSDEHCVDISSVGTPLARASIKSAKVDGVSYFRHKERLLRISIRHMVKSQVFYWIVLSLVALNTACVAIVHHNQPQWLTHLLYYAEFLFLGLFLLEMSLKMYGMGPRLYFHSSFNCFDFGVTVGSIFEVVWAIFRPGTSFGISVLRALRLLRIFKITKYWASLRNLVVSLMSSMKSIISLLFLLFLFIVVFALLGMQLFGGRFNFNDGTPSANFDTFPAAIMTVFQILTGEDWNEVMYNGIRSQGGVSSGMWSAIYFIVLTLFGNYTLLNVFLAIAVDNLANAQELTKDEQEEEEAFNQKHALQKAKEVSPMSAPNMPSIERDRRRRHHMSMWEPRSSHLRERRRRHHMSVWEQRTSQLRKHMQMSSQEALNREEAPTMNPLNPLNPLSSLNPLNAHPSLYRRPRAIEGLALGLALEKFEEERISRGGSLKGDGGDRSSALDNQRTPLSLGQREPPWLARPCHGNCDPTQQEAGGGEAVVTFEDRARHRQSQRRSRHRRVRTEGKESSSASRSRSASQERSLDEAMPTEGEKDHELRGNHGAKEPTIQEERAQDLRRTNSLMVSRGSGLAGGLDEADTPLVLPHPELEVGKHVVLTEQEPEGSSEQALLGNVQLDMGRVISQSEPDLSCITANTDKATTESTSVTVAIPDVDPLVDSTVVHISNKTDGEASPLKEAEIREDEEEVEKKKQKKEKRETGKAMVPHSSMFIFSTTNPIRRACHYIVNLRYFEMCILLVIAASSIALAAEDPVLTNSERNKVLRYFDYVFTGVFTFEMVIKMIDQGLILQDGSYFRDLWNILDFVVVVGALVAFALANALGTNKGRDIKTIKSLRVLRVLRPLKTIKRLPKLKAVFDCVVTSLKNVFNILIVYKLFMFIFAVIAVQLFKGKFFYCTDSSKDTEKECIGNYVDHEKNKMEVKGREWKRHEFHYDNIIWALLTLFTVSTGEGWPQVLQHSVDVTEEDRGPSRSNRMEMSIFYVVYFVVFPFFFVNIFVALIIITFQEQGDKMMEECSLEKNERACIDFAISAKPLTRYMPQNRHTFQYRVWHFVVSPSFEYTIMAMIALNTVVLMMKYYSAPCTYELALKYLNIAFTMVFSLECVLKVIAFGFLNYFRDTWNIFDFITVIGSITEIILTDSKLVNTSGFNMSFLKLFRAARLIKLLRQGYTIRILLWTFVQSFKALPYVCLLIAMLFFIYAIIGMQVFGNIKLDEESHINRHNNFRSFFGSLMLLFRSATGEAWQEIMLSCLGEKGCEPDTTAPSGQNENERCGTDLAYVYFVSFIFFCSFLMLNLFVAVIMDNFEYLTRDSSILGPHHLDEFVRVWAEYDRAACGRIHYTEMYEMLTLMSPPLGLGKRCPSKVAYKRLVLMNMPVAEDMTVHFTSTLMALIRTALDIKIAKGGADRQQLDSELQKETLAIWPHLSQKMLDLLVPMPKASDLTVGKIYAAMMIMDYYKQSKVKKQRQQLEEQKNAPMFQRMEPSSLPQEIIANAKALPYLQQDPVSGLSGRSGYPSMSPLSPQDIFQLACMDPADDGQFQERQSLEPEVSELKSVQPSNHGIYLPSDTQEHAGSGRASSMPRLTVDPQVVTDPSSMRRSFSTIRDKRSNSSWLEEFSMERSSENTYKSRRRSYHSSLRLSAHRLNSDSGHKSDTHRSGGRERGRSKERKHLLSPDVSRCNSEERGTQADWESPERRQSRSPSEGRSQTPNRQGTGSLSESSIPSVSDTSTPRRSRRQLPPVPPKPRPLLSYSSLIRHAGSISPPADGSEEGSPLTSQALESNNACLTESSNSPHPQQSQHASPQRYISEPYLALHEDSHASDCGEEETLTFEAAVATSLGRSNTIGSAPPLRHSWQMPNGHYRRRRRGGPGPGMMCGAVNNLLSDTEEDDKC

SEQ ID NO: 15647 - protein, 2251 aa, Homo sapiens
MARFGEAVVARPGSGDGDSDQSRNRQGTPVPASGQAAAYKQTKAQRARTMALYNPIPVRQNCFTVNRSLFIFGEDNIVRKYAKKLIDWPPFEYMILATIIANCIVLALEQHLPEDDKTPMSRRLEKTEPYFIGIFCFEAGIKIVALGFIFHKGSYLRNGWNVMDFIVVLSGILATAGTHFNTHVDLRTLRAVRVLRPLKLVSGIPSLQIVLKSIMKAMVPLLQIGLLLFFAILMFAIIGLEFYSGKLHRACFMNNSGILEGFDPPHPCGVQGCPAGYECKDWIGPNDGITQFDNILFAVLTVFQCITMEGWTTVLYNTNDALGATWNWLYFIPLIIIGSFFVLNLVLGVLSGEFAKERERVENRRAFMKLRRQQQIERELNGYRAWIDKAEEVMLAEENKNAGTSALEVLRRATIKRSRTEAMTRDSSDEHCVDISSVGTPLARASIKSAKVDGVSYFRHKERLLRISIRHMVKSQVFYWIVLSLVALNTACVAIVHHNQPQWLTHLLYYAEFLFLGLFLLEMSLKMYGMGPRLYFHSSFNCFDFGVTVGSIFEVVWAIFRPGTSFGISVLRALRLLRIFKITKYWASLRNLVVSLMSSMKSIISLLFLLFLFIVVFALLGMQLFGGRFNFNDGTPSANFDTFPAAIMTVFQILTGEDWNEVMYNGIRSQGGVSSGMWSAIYFIVLTLFGNYTLLNVFLAIAVDNLANAQELTKDEQEEEEAFNQKHALQKAKEVSPMSAPNMPSIERERRRRHHMSVWEQRTSQLRKHMQMSSQEALNREEAPTMNPLNPLNPLSSLNPLNAHPSLYRRPRAIEGLALGLALEKFEEERISRGGSLKGDGGDRSSALDNQRTPLSLGQREPPWLARPCHGNCDPTQQEAGGGEAVVTFEDRARHRQSQRRSRHRRVRTEGKESSSASRSRSASQERSLDEAMPTEGEKDHELRGNHGAKEPTIQEERAQDLRRTNSLMVSRGSGLAGGLDEADTPLVLPHPELEVGKHVVLTEQEPEGSSEQALLGNVQLDMGRVISQSEPDLSCITANTDKATTESTSVTVAIPDVDPLVDSTVVHISNKTDGEASPLKEAEIREDEEEVEKKKQKKEKRETGKAMVPHSSMFIFSTTNPIRRACHYIVNLRYFEMCILLVIAASSIALAAEDPVLTNSERNKVLRYFDYVFTGVFTFEMVIKMIDQGLILQDGSYFRDLWNILDFVVVVGALVAFALANALGTNKGRDIKTIKSLRVLRVLRPLKTIKRLPKLKAVFDCVVTSLKNVFNILIVYKLFMFIFAVIAVQLFKGKFFYCTDSSKDTEKECIGNYVDHEKNKMEVKGREWKRHEFHYDNIIWALLTLFTVSTGEGWPQVLQHSVDVTEEDRGPSRSNRMEMSIFYVVYFVVFPFFFVNIFVALIIITFQEQGDKMMEECSLEKNERACIDFAISAKPLTRYMPQNRHTFQYRVWHFVVSPSFEYTIMAMIALNTVVLMMKYYSAPCTYELALKYLNIAFTMVFSLECVLKVIAFGFLNYFRDTWNIFDFITVIGSITEIILTDSKLVNTSGFNMSFLKLFRAARLIKLLRQGYTIRILLWTFVQSFKALPYVCLLIAMLFFIYAIIGMQVFGNIKLDEESHINRHNNFRSFFGSLMLLFRSATGEAWQEIMLSCLGEKGCEPDTTAPSGQNENERCGTDLAYVYFVSFIFFCSFLMLNLFVAVIMDNFEYLTRDSSILGPHHLDEFVRVWAEYDRAACGRIHYTEMYEMLTLMSPPLGLGKRCPSKVAYKRLVLMNMPVAEDMTVHFTSTLMALIRTALDIKIAKGGADRQQLDSELQKETLAIWPHLSQKMLDLLVPMPKASDLTVGKIYAAMMIMDYYKQSKVKKQRQQLEEQKNAPMFQRMEPSSLPQEIIANAKALPYLQQDPVSGLSGRSGYPSMSPLSPQDIFQLACMDPADDGQFQERQSLVVTDPSSMRRSFSTIRDKRSNSSWLEEFSMERSSENTYKSRRRSYHSSLRLSAHRLNSDSGHKSDTHRSGGRERGRSKERKHLLSPDVSRCNSEERGTQADWESPERRQSRSPSEGRSQTPNRQGTGSLSESSIPSVSDTSTPRRSRRQLPPVPPKPRPLLSYSSLIRHAGSISPPADGSEEGSPLTSQALESNNACLTESSNSPHPQQSQHASPQRYISEPYLALHEDSHASDCGEEETLTFEAAVATSLGRSNTIGSAPPLRHSWQMPNGHYRRRRRGGPGPGMMCGAVNNLLSDTEEDDKC

SEQ ID NO: 15648 - protein, 2270 aa, Homo sapiens
MARFGEAVVARPGSGDGDSDQSRNRQGTPVPASGQAAAYKQTKAQRARTMALYNPIPVRQNCFTVNRSLFIFGEDNIVRKYAKKLIDWPPFEYMILATIIANCIVLALEQHLPEDDKTPMSRRLEKTEPYFIGIFCFEAGIKIVALGFIFHKGSYLRNGWNVMDFIVVLSGILATAGTHFNTHVDLRTLRAVRVLRPLKLVSGIPSLQIVLKSIMKAMVPLLQIGLLLFFAILMFAIIGLEFYSGKLHRACFMNNSGILEGFDPPHPCGVQGCPAGYECKDWIGPNDGITQFDNILFAVLTVFQCITMEGWTTVLYNTNDALGATWNWLYFIPLIIIGSFFVLNLVLGVLSGEFAKERERVENRRAFMKLRRQQQIERELNGYRAWIDKAEEVMLAEENKNAGTSALEVLRRATIKRSRTEAMTRDSSDEHCVDISSVGTPLARASIKSAKVDGVSYFRHKERLLRISIRHMVKSQVFYWIVLSLVALNTACVAIVHHNQPQWLTHLLYYAEFLFLGLFLLEMSLKMYGMGPRLYFHSSFNCFDFGVTVGSIFEVVWAIFRPGTSFGISVLRALRLLRIFKITKYWASLRNLVVSLMSSMKSIISLLFLLFLFIVVFALLGMQLFGGRFNFNDGTPSANFDTFPAAIMTVFQILTGEDWNEVMYNGIRSQGGVSSGMWSAIYFIVLTLFGNYTLLNVFLAIAVDNLANAQELTKDEQEEEEAFNQKHALQKAKEVSPMSAPNMPSIERDRRRRHHMSMWEPRSSHLRERRRRHHMSVWEQRTSQLRKHMQMSSQEALNREEAPTMNPLNPLNPLSSLNPLNAHPSLYRRPRAIEGLALGLALEKFEEERISRGGSLKGDGGDRSSALDNQRTPLSLGQREPPWLARPCHGNCDPTQQEAGGGEAVVTFEDRARHRQSQRRSRHRRVRTEGKESSSASRSRSASQERSLDEAMPTEGEKDHELRGNHGAKEPTIQEERAQDLRRTNSLMVSRGSGLAGGLDEADTPLVLPHPELEVGKHVVLTEQEPEGSSEQALLGNVQLDMGRVISQSEPDLSCITANTDKATTESTSVTVAIPDVDPLVDSTVVHISNKTDGEASPLKEAEIREDEEEVEKKKQKKEKRETGKAMVPHSSMFIFSTTNPIRRACHYIVNLRYFEMCILLVIAASSIALAAEDPVLTNSERNKVLRYFDYVFTGVFTFEMVIKMIDQGLILQDGSYFRDLWNILDFVVVVGALVAFALANALGTNKGRDIKTIKSLRVLRVLRPLKTIKRLPKLKAVFDCVVTSLKNVFNILIVYKLFMFIFAVIAVQLFKGKFFYCTDSSKDTEKECIGNYVDHEKNKMEVKGREWKRHEFHYDNIIWALLTLFTVSTGEGWPQVLQHSVDVTEEDRGPSRSNRMEMSIFYVVYFVVFPFFFVNIFVALIIITFQEQGDKMMEECSLEKNERACIDFAISAKPLTRYMPQNRHTFQYRVWHFVVSPSFEYTIMAMIALNTVVLMMKYYSAPCTYELALKYLNIAFTMVFSLECVLKVIAFGFLNYFRDTWNIFDFITVIGSITEIILTDSKLVNTSGFNMSFLKLFRAARLIKLLRQGYTIRILLWTFVQSFKALPYVCLLIAMLFFIYAIIGMQVFGNIKLDEESHINRHNNFRSFFGSLMLLFRSATGEAWQEIMLSCLGEKGCEPDTTAPSGQNENERCGTDLAYVYFVSFIFFCSFLMLNLFVAVIMDNFEYLTRDSSILGPHHLDEFVRVWAEYDRAACGRIHYTEMYEMLTLMSPPLGLGKRCPSKVAYKRLVLMNMPVAEDMTVHFTSTLMALIRTALDIKIAKGGADRQQLDSELQKETLAIWPHLSQKMLDLLVPMPKASDLTVGKIYAAMMIMDYYKQSKVKKQRQQLEEQKNAPMFQRMEPSSLPQEIIANAKALPYLQQDPVSGLSGRSGYPSMSPLSPQDIFQLACMDPADDGQFQERQSLVVTDPSSMRRSFSTIRDKRSNSSWLEEFSMERSSENTYKSRRRSYHSSLRLSAHRLNSDSGHKSDTHRSGGRERGRSKERKHLLSPDVSRCNSEERGTQADWESPERRQSRSPSEGRSQTPNRQGTGSLSESSIPSVSDTSTPRRSRRQLPPVPPKPRPLLSYSSLIRHAGSISPPADGSEEGSPLTSQALESNNACLTESSNSPHPQQSQHASPQRYISEPYLALHEDSHASDCGEEETLTFEAAVATSLGRSNTIGSAPPLRHSWQMPNGHYRRRRRGGPGPGMMCGAVNNLLSDTEEDDKC

SEQ ID NO: 15649 - protein, 308 aa, Homo sapiens
MRALVLLLSLFLLGGQAQHVSDWTYSEGALDEAHWPQHYPACGGQRQSPINLQRTKVRYNPSLKGLNMTGYETQAGEFPMVNNGHTVQISLPSTMRMTVADGTVYIAQQMHFHWGGASSEISGSEHTVDGIRHVIEIHIVHYNSKYKSYDIAQDAPDGLAVLAAFVEVKNYPENTYYSNFISHLANIKYPGQRTTLTGLDVQDMLPRNLQHYYTYHGSLTTPPCTENVHWFVLADFVKLSRTQVWKLENSLLDHRNKTIHNDYRRTQPLNHRVVESNFPNQEYTLGSEFQFYLHKIEEILDYLRRALN

SEQ ID NO: 15650 - protein, 313 aa, Homo sapiens
MRALVLLLSLFLLGGQAQHVSDWTYSEGALDEAHWPQHYPACGGQRQSPINLQRTKVRYNPSLKGLNMTGYETQAGEFPMVNNGHTVQISLPSTMRMTVADGTVYIAQQMHFHWGGASSEISGSEHTVDGIRHVIEIHIVHYNSKYKSYDIAQDAPDGLAVLAAFVEVKNYPENTYYSNFISHLANIKYPGQRTTLTGLDVQDMLPRNLQHYYTYHGSLTTPPCTENVHWFVLADFVKLSRTQVWKLENSLLDHRNKTIHNDYRRTQPLNHRVVESNFPNQGKGHGGHRGRSQNPRVQPTSTRHPLALGSLEA

SEQ ID NO: 15651 - protein, 248 aa, Homo sapiens
MRALVLLLSLFLLGGQAQHVSDWTYSVQISLPSTMRMTVADGTVYIAQQMHFHWGGASSEISGSEHTVDGIRHVIEIHIVHYNSKYKSYDIAQDAPDGLAVLAAFVEVKNYPENTYYSNFISHLANIKYPGQRTTLTGLDVQDMLPRNLQHYYTYHGSLTTPPCTENVHWFVLADFVKLSRTQVWKLENSLLDHRNKTIHNDYRRTQPLNHRVVESNFPNQEYTLGSEFQFYLHKIEEILDYLRRALN

SEQ ID NO: 15652 - protein, 309 aa, Homo sapiens
MDAFQGILKFFLNQKTVIGYSFMALLTVGSERLFSVVAFKCPCSTENMTYGLVFLFAPAWVLLILGFFLNNRSWRLFTGCCVNPRKIFPRGHSCRFFYVLGQITLSSLVAPVMWLSVALLNGTFYECAMSGTRSSGLLELICKGKPKECWEELHKVSCGKTSMLPTVNEELKLSLQAQSQILGWCLICSASFFSLLTTCYARCRSKVSYLQLSFWKTYAQKEKEQLENTFLDYANKLSERNLKCFFENKRPDPFPMPTFAAWEAASELHSFHQSQQHYSTLHRVVDNGLQLSPEDDETTMVLVGTAHNM

SEQ ID NO: 15653 - protein, 630 aa, Homo sapiens
MEVKGQLISSPTFNAPAALFGEAAPQVKSERLRGLLDRQRTLQEALSLKLQELRKVCLQEAELTGQLPPECPLEPGERPQLVRRRPPTARAYPPPHPNQAHHSLCPAEELALEALEREVSVQQQIAAAARRLALAPDLSTEQRRRRRQVQADALRRLHELEEQLRDVRARLGLPVLPLPQPLPLSTGSVITTQGVCLGMRLAQLSQEDVVLHSESSSLSESGASHDNEEPHGCFSLAERPSPPKAWDQLRAVSGGSPERRTPWKPPPSDLYGDLKSRRNSVASPTSPTRSLPRSASSFEGRSVPATPVLTRGAGPQLCKPEGLHSRQWSGSQDSQMGFPRADPASDRASLFVARTRRSNSSEALLVDRAAGGGAGSPPAPLAPSASGPPVCKSSEVLYERPQPTPAFSSRTAGPPDPPRAARPSSAAPASRGAPRLPPVCGDFLLDYSLDRGLPRSGGGTGWGELPPAAEVPGPLSRRDGLLTMLPGPPPVYAADSNSPLLRTKDPHTRATRTKPCGLPPEAAEGPEVHPNPLLWMPPPTRIPSAGERSGHKNLALEGLRDWYIRNSGLAAGPQRRPVLPSVGPPHPPFLHARCYEVGQALYGAPSQAPLPHSRSFTAPPVSGRYGGCFY

SEQ ID NO: 15654 - protein, 618 aa, Homo sapiens
MEVKAALFGEAAPQVKSERLRGLLDRQRTLQEALSLKLQELRKVCLQEAELTGQLPPECPLEPGERPQLVRRRPPTARAYPPPHPNQAHHSLCPAEELALEALEREVSVQQQIAAAARRLALAPDLSTEQRRRRRQVQADALRRLHELEEQLRDVRARLGLPVLPLPQPLPLSTGSVITTQGVCLGMRLAQLSQEDVVLHSESSSLSESGASHDNEEPHGCFSLAERPSPPKAWDQLRAVSGGSPERRTPWKPPPSDLYGDLKSRRNSVASPTSPTRSLPRSASSFEGRSVPATPVLTRGAGPQLCKPEGLHSRQWSGSQDSQMGFPRADPASDRASLFVARTRRSNSSEALLVDRAAGGGAGSPPAPLAPSASGPPVCKSSEVLYERPQPTPAFSSRTAGPPDPPRAARPSSAAPASRGAPRLPPVCGDFLLDYSLDRGLPRSGGGTGWGELPPAAEVPGPLSRRDGLLTMLPGPPPVYAADSNSPLLRTKDPHTRATRTKPCGLPPEAAEGPEVHPNPLLWMPPPTRIPSAGERSGHKNLALEGLRDWYIRNSGLAAGPQRRPVLPSVGPPHPPFLHARCYEVGQALYGAPSQAPLPHSRSFTAPPVSGRYGGCFY

SEQ ID NO: 15655 - protein, 661 aa, Homo sapiens
MEVKGQLISSPTFNAPAALFGEAAPQVKSERLRGLLDRQRTLQEALSLKLQELRKVCLQEAELTGQLPPECPLEPGERPQLVRRRPPTARAYPPPHPNQAHHSLCPAEELALEALEREVSVQQQIAAAARRLALAPDLSTEQRRRRRQVQADALRRLHELEEQLRDVRARLGLPVLPLPQPLPLSTGSVITTQGVCLGMRLAQLSQEDVVLHSESSSLSESGASHDNEEPHGCFSLAERPSPPKAWDQLRAVSGGSPERRTPWKPPPSDLYGDLKSRRNSVASPTSPTRSLPRSASSFEGRSVPATPVLTRGAGPQLCKPEGLHSRQWSGSQDSQMGFPRADPASDRASLFVARTRRSNSSEALLVDRAAGGGAGSPPAPLAPSASGPPVCKSSEVLYERPQPTPAFSSRTAGPPDPPRAARPSSAAPASRGAPRLPPVCGDFLLDYSLDRGLPRSGGGTGWGELPPAAEVPGPLSRRDGLLTMLPGPPPVYAADSNSPLLRTKDPHTRATRTKPCGLPPEAAEGPEVHPNPLLWMPPPTRIPSAGERSGHKNLALEGLRDWYIRNSGLAAGPQRRPVLPSVGPPHPPFLHARCYEVGQALYGAPSQAPLPHSRSFTAPPVSGRYYADFLYPPELSARLSDLTLEGEQSSSSDTQTPGTLV

SEQ ID NO: 15656 - protein, 696 aa, Homo sapiens
MRREPRYQGQVGPDIHTDSERTLSSHQPRPLDSTKMEVKGQLISSPTFNAPAALFGEAAPQVKSERLRGLLDRQRTLQEALSLKLQELRKVCLQEAELTGQLPPECPLEPGERPQLVRRRPPTARAYPPPHPNQAHHSLCPAEELALEALEREVSVQQQIAAAARRLALAPDLSTEQRRRRRQVQADALRRLHELEEQLRDVRARLGLPVLPLPQPLPLSTGSVITTQGVCLGMRLAQLSQEDVVLHSESSSLSESGASHDNEEPHGCFSLAERPSPPKAWDQLRAVSGGSPERRTPWKPPPSDLYGDLKSRRNSVASPTSPTRSLPRSASSFEGRSVPATPVLTRGAGPQLCKPEGLHSRQWSGSQDSQMGFPRADPASDRASLFVARTRRSNSSEALLVDRAAGGGAGSPPAPLAPSASGPPVCKSSEVLYERPQPTPAFSSRTAGPPDPPRAARPSSAAPASRGAPRLPPVCGDFLLDYSLDRGLPRSGGGTGWGELPPAAEVPGPLSRRDGLLTMLPGPPPVYAADSNSPLLRTKDPHTRATRTKPCGLPPEAAEGPEVHPNPLLWMPPPTRIPSAGERSGHKNLALEGLRDWYIRNSGLAAGPQRRPVLPSVGPPHPPFLHARCYEVGQALYGAPSQAPLPHSRSFTAPPVSGRYYADFLYPPELSARLSDLTLEGEQSSSSDTQTPGTLV

SEQ ID NO: 15657 - protein, 649 aa, Homo sapiens
MEVKAALFGEAAPQVKSERLRGLLDRQRTLQEALSLKLQELRKVCLQEAELTGQLPPECPLEPGERPQLVRRRPPTARAYPPPHPNQAHHSLCPAEELALEALEREVSVQQQIAAAARRLALAPDLSTEQRRRRRQVQADALRRLHELEEQLRDVRARLGLPVLPLPQPLPLSTGSVITTQGVCLGMRLAQLSQEDVVLHSESSSLSESGASHDNEEPHGCFSLAERPSPPKAWDQLRAVSGGSPERRTPWKPPPSDLYGDLKSRRNSVASPTSPTRSLPRSASSFEGRSVPATPVLTRGAGPQLCKPEGLHSRQWSGSQDSQMGFPRADPASDRASLFVARTRRSNSSEALLVDRAAGGGAGSPPAPLAPSASGPPVCKSSEVLYERPQPTPAFSSRTAGPPDPPRAARPSSAAPASRGAPRLPPVCGDFLLDYSLDRGLPRSGGGTGWGELPPAAEVPGPLSRRDGLLTMLPGPPPVYAADSNSPLLRTKDPHTRATRTKPCGLPPEAAEGPEVHPNPLLWMPPPTRIPSAGERSGHKNLALEGLRDWYIRNSGLAAGPQRRPVLPSVGPPHPPFLHARCYEVGQALYGAPSQAPLPHSRSFTAPPVSGRYYADFLYPPELSARLSDLTLEGEQSSSSDTQTPGTLV

SEQ ID NO: 15658 - protein, 915 aa, Homo sapiens
MLPLGSEPALNELLLRKEEEWRALQAHRTQLQEAALQDTRSQLEEAQGKLRCLQEDFVYNLQVLEERDLELERYDAAFAQAREWEEARRAEVSELKIEAAKLRQALAREARKVEELQQQQQLAFQEHRLELERVHSDKNGEIDHHREQYENLKWTLERKLEELDGELALQRQELLLEFESKMRKREHEFRLQADNMSNTALSRELKVKLLHKELEALKEAGAKAAESLQRAEATNAELERKLQSRAGELQDLEAMSRARVKDLEDKLHSVQLTRKKEEETFKRKHEELDRLAREKDAVLVAVKGAHVEQLQELQTRVLELQAHCETLEAQLRRAEWRQADTAKEKDAAIDQLREDASTVKSAWDAQIAQLSKEMVSRDLQIQTLQEEEVKLKAQVARSQQDIERYKQQLSLAVERERSLERDQVQLGLDWQRRCDDIERDQIQKSEALIQGLSMAKSQVAAKLQETEQALQEQEVVLKAVTLERDQAVQALRMHGLPRPGAQMLLRQHEEEISKDFPSSEIQRLREQNTSLRNAIAQMRKEMEALSHQIPPPIQTAAESTDANQPDPEAGGDAATPDYVLALEAEIRTLKHKFKTLEKHLEDVLDPLKMSSPHAESQPSVRTSTETTGGSAQAGQAGGSVQAGQAGGSVQAGPVSSGLALRKLGDRVQLLNLLVTRLRQKVLREPLEPAALQRELPREVDQVHLEVLELRKQVAELGKHLRIAQHGGAEPSGRKQPPASDAVALGREDAKSAEDEAPSRHLGKHQPRSAQVGSRLDALQGPKTQHSIHTVTCKSPRQKEDRSPKPPQAPQHPEEHGRQSHSSSSFASGTLQDMWRLLDLGSSPSGVTSQGDSTPELPAPPAADRRPVKMQAGIATPGMKTAAQAKAKTTGASRSHPAKAKGCQRPPKIRNYNIMD

SEQ ID NO: 15659 - protein, 751 aa, Homo sapiens
MLPLGSEPALNELLLRKEEEWRALQAHRTQLQEAALQDTRSQLEEAQGKLRCLQEDFVYNLQVLEERDLELERYDAAFAQAREWEEARRAEVSELKIEAAKLRQALAREARKVEELQQQQQLAFQEHRLELERVHSDKNGEIDHHREQYENLKWTLERKLEELDGELALQRQELLLEFESKMRKREHEFRLQADNMSNTALSRELKVKLLHKELEALKEAGAKAAESLQRAEATNAELERKLQSRAGELQDLEAMSRARVKDLEDKLHSVQLTRKKEEETFKRKHEELDRLAREKDAVLVAVKGAHVEQLQELQTRVLELQAHCETLEAQLRRAEWRQADTAKEKDAAIDQLREDASTVKSAWDAQIAQLSKEMVSRDLQIQTLQEEEVKLKAQVARSQQDIERYKQQLSLAVERERSLERDQVQLGLDWQRRCDDIERDQIQKSEALIQGLSMAKSQVAAKLQETEQALQEQEVVLKAVTLERDQAVQALRMHGLPRPGAQMLLRQHEEEISKDFPSSEIQRLREQNTSLRNAIAQMRKEMEALSHQIPPPIQTAAESTDANQPDPEAGGDAATPDYVLALEAEIRTLKHKFKTLEKHLEDVLDPLKMSSPHAESQPSVRTSTETTGGSAQAGQAGGSVQAGQAGGSVQAGPVSSGLALRKLGDRVQLLNLLVTRLRQKVLREPLEPAALQRELPREVDQVHLEVLELRKQVAELGKHLRIAQHGGAEPSGRKQPPASDAVALGREVGAR

SEQ ID NO: 15660 - protein, 538 aa, Homo sapiens
MAQKPLRLLACGDVEGKFDILFNRVQAIQKKSGNFDLLLCVGNFFGSTQDAEWEEYKTGIKKAPIQTYVLGANNQETVKYFQDADGCELAENITYLGRKGIFTGSSGLQIVYLSGTESLNEPVPGYSFSPKDVSSLRMMLCTTSQFKGVDILLTSPWPKCVGNFGNSSGEVDTKKCGSALVSSLATGLKPRYHFAALEKTYYERLPYRNHIILQENAQHATRFIALANVGNPEKKKYLYAFSIVPMKLMDAAELVKQPPDVTENPYRKSGQEASIGKQILAPVEESACQFFFDLNEKQGRKRSSTGRDSKSSPHPKQPRKPPQPPGPCWFCLASPEVEKHLVVNIGTHCYLALAKGGLSDDHVLILPIGHYQSVVELSAEVVEEVEKYKATLRRFFKSRGKWCVVFERNYKSHHLQLQVIPVPISCSTTDDIKDAFITQAQEQQIELLEIPEHSDIKQIAQPGAAYFYVELDTGEKLFHRIKKNFPLQFGREVLASEAILNVPDKSDWRQCQISKEDEETLARRFRKDFEPYDFTLDD

SEQ ID NO: 15661 - protein, 242 aa, Homo sapiens
MKSREGSVHPQVEIANLLLIQSSLANLPPGPCWFCLASPEVEKHLVVNIGTHCYLALAKGGLSDDHVLILPIGHYQSVVELSAEVVEEVEKYKATLRRFFKSRGKWCVVFERNYKSHHLQLQVIPVPISCSTTDDIKDAFITQAQEQQIELLEIPEHSDIKQIAQPGAAYFYVELDTGEKLFHRIKKNFPLQFGREVLASEAILNVPDKSDWRQCQISKEDEETLARRFRKDFEPYDFTLDD

SEQ ID NO: 15662 - protein, 401 aa, Homo sapiens
MMLCTTSQFKGVDILLTSPWPKCVGNFGNSSGEVDTKKCGSALVSSLATGLKPRYHFAALEKTYYERLPYRNHIILQENAQHATRFIALANVGNPEKKKYLYAFSIVPMKLMDAAELVKQPPDVTENPYRKSGQEASIGKQILAPVEESACQFFFDLNEKQGRKRSSTGRDSKSSPHPKQPRKPPQPPGPCWFCLASPEVEKHLVVNIGTHCYLALAKGGLSDDHVLILPIGHYQSVVELSAEVVEEVEKYKATLRRFFKSRGKWCVVFERNYKSHHLQLQVIPVPISCSTTDDIKDAFITQAQEQQIELLEIPEHSDIKQIAQPGAAYFYVELDTGEKLFHRIKKNFPLQFGREVLASEAILNVPDKSDWRQCQISKEDEETLARRFRKDFEPYDFTLDD

SEQ ID NO: 15663 - protein, 315 aa, Homo sapiens
MEKFRAVLDLHVKHHSALGYGLVTLLTAGGERIFSAVAFQCPCSAAWNLPYGLVFLLVPALALFLLGYVLSARTWRLLTGCCSSARASCGSALRGSLVCTQISAAAALAPLTWVAVALLGGAFYECAATGSAAFAQRLCLGRNRSCAAELPLVPCNQAKASDVQDLLKDLKAQSQVLGWILIAVVIIILLIFTSVTRCLSPVSFLQLKFWKIYLEQEQQILKSKATEHATELAKENIKCFFEGSHPKEYNTPSMKEWQQISSLYTFNPKGQYYSMLHKYVNRKEKTHSIRSTEGDTVIPVLGFVDSSGINSTPEL

SEQ ID NO: 15664 - protein, 143 aa, Homo sapiens
MFPVLGWILIAVVIIILLIFTSVTRCLSPVSFLQLKFWKIYLEQEQQILKSKATEHATELAKENIKCFFEGSHPKEYNTPSMKEWQQISSLYTFNPKGQYYSMLHKYVNRKEKTHSIRSTEGDTVIPVLGFVDSSGINSTPEL

SEQ ID NO: 15665 - protein, 84 aa, Homo sapiens
MSEFWLCFNCCIAEQPQPKRRRRIDRSMIGEPTNFVHTAHVGSGDLFSGMNSVSSIQNQMQSKGGYGGGMPANVQMQLVDTKAG

SEQ ID NO: 15666 - protein, 563 aa, Homo sapiens
MSVLKKNRRKDSDTPQEPSEKAKEQQAEAELRKLRQQFRKMVESRKSFKFRNQQKIASQYKEIKTLKTEQDEITLLLSLMKSSRNMNRSEKNYMELRLLLQTKEDYEALIKSLKVLLAELDEKILQMEKKIANQKQIFAKMQEANNPRKLQKQIHILETRLNLVTVHFDKMLTTNAKLRKEIEDLRFEKAAYDNVYQQLQHCLLMEKKTMNLAIEQSSQAYEQRVEAMARMAAMKDRQKKDTSQYNLEIRELERLYAHESKLKSFLLVKLNDRNEFEEQAKREEALKAKKHVKKNRGESFESYEVAHLRLLKLAESGNLNQLIEDFLAKEEKNFARFTYVTELNNDMEMMHKRTQRIQDEIILLRSQQKLSHDDNHSVLRQLEDKLRKTTEEADMYESKYGEVSKTLDLLKNSVEKLFKKINCDATKILVQLGETGKVTDINLPQYFAIIEKKTNDLLLLETYRRILEVEGAEAEIPPPFINPFWGGSALLKPPEPIKVIPPVLGADPFSDRLDDVEQPLDHSSLRQLVLDNYILKENRSKEVRGDSLPEKVDDFRSRKKVTM

SEQ ID NO: 15667 - protein, 523 aa, Homo sapiens
MVESRKSFKFRNQQKIASQYKEIKTLKTEQDEITLLLSLMKSSRNMNRSEKNYMELRLLLQTKEDYEALIKSLKVLLAELDEKILQMEKKIANQKQIFAKMQEANNPRKLQKQIHILETRLNLVTVHFDKMLTTNAKLRKEIEDLRFEKAAYDNVYQQLQHCLLMEKKTMNLAIEQSSQAYEQRVEAMARMAAMKDRQKKDTSQYNLEIRELERLYAHESKLKSFLLVKLNDRNEFEEQAKREEALKAKKHVKKNRGESFESYEVAHLRLLKLAESGNLNQLIEDFLAKEEKNFARFTYVTELNNDMEMMHKRTQRIQDEIILLRSQQKLSHDDNHSVLRQLEDKLRKTTEEADMYESKYGEVSKTLDLLKNSVEKLFKKINCDATKILVQLGETGKVTDINLPQYFAIIEKKTNDLLLLETYRRILEVEGAEAEIPPPFINPFWGGSALLKPPEPIKVIPPVLGADPFSDRLDDVEQPLDHSSLRQLVLDNYILKENRSKEVRGDSLPEKVDDFRSRKKVTM

SEQ ID NO: 15668 - protein, 2223 aa, Homo sapiens
MAESASPPSSSAAAPAAEPGVTTEQPGPRSPPSSPPGLEEPLDGADPHVPHPDLAPIAFFCLRQTTSPRNWCIKMVCNPWFECVSMLVILLNCVTLGMYQPCDDMDCLSDRCKILQVFDDFIFIFFAMEMVLKMVALGIFGKKCYLGDTWNRLDFFIVMAGMVEYSLDLQNINLSAIRTVRVLRPLKAINRVPSMRILVNLLLDTLPMLGNVLLLCFFVFFIFGIIGVQLWAGLLRNRCFLEENFTIQGDVALPPYYQPEEDDEMPFICSLSGDNGIMGCHEIPPLKEQGRECCLSKDDVYDFGAGRQDLNASGLCVNWNRYYNVCRTGSANPHKGAINFDNIGYAWIVIFQVITLEGWVEIMYYVMDAHSFYNFIYFILLIIVGSFFMINLCLVVIATQFSETKQREHRLMLEQRQRYLSSSTVASYAEPGDCYEEIFQYVCHILRKAKRRALGLYQALQSRRQALGPEAPAPAKPGPHAKEPRHYHGKTKGQGDEGRHLGSRHCQTLHGPASPGNDHSGRELCPQHSPLDATPHTLVQPIPATLASDPASCPCCQHEDGRRPSGLGSTDSGQEGSGSGSSAGGEDEADGDGARSSEDGASSELGKEEEEEEQADGAVWLCGDVWRETRAKLRGIVDSKYFNRGIMMAILVNTVSMGIEHHEQPEELTNILEICNVVFTSMFALEMILKLAAFGLFDYLRNPYNIFDSIIVIISIWEIVGQADGGLSVLRTFRLLRVLKLVRFMPALRRQLVVLMKTMDNVATFCMLLMLFIFIFSILGMHIFGCKFSLRTDTGDTVPDRKNFDSLLWAIVTVFQILTQEDWNVVLYNGMASTSPWASLYFVALMTFGNYVLFNLLVAILVEGFQAEGDANRSYSDEDQSSSNIEEFDKLQEGLDSSGDPKLCPIPMTPNGHLDPSLPLGGHLGPAGAAGPAPRLSLQPDPMLVALGSRKSSVMSLGRMSYDQRSLSSSRSSYYGPWGRSAAWASRRSSWNSLKHKPPSAEHESLLSAERGGGARVCEVAADEGPPRAAPLHTPHAHHIHHGPHLAHRHRHHRRTLSLDNRDSVDLAELVPAVGAHPRAAWRAAGPAPGHEDCNGRMPSIAKDVFTKMGDRGDRGEDEEEIDYTLCFRVRKMIDVYKPDWCEVREDWSVYLFSPENRFRVLCQTIIAHKLFDYVVLAFIFLNCITIALERPQIEAGSTERIFLTVSNYIFTAIFVGEMTLKVVSLGLYFGEQAYLRSSWNVLDGFLVFVSIIDIVVSLASAGGAKILGVLRVLRLLRTLRPLRVISRAPGLKLVVETLISSLKPIGNIVLICCAFFIIFGILGVQLFKGKFYHCLGVDTRNITNRSDCMAANYRWVHHKYNFDNLGQALMSLFVLASKDGWVNIMYNGLDAVAVDQQPVTNHNPWMLLYFISFLLIVSFFVLNMFVGVVVENFHKCRQHQEAEEARRREEKRLRRLEKKRRKAQRLPYYATYCHTRLLIHSMCTSHYLDIFITFIICLNVVTMSLEHYNQPTSLETALKYCNYMFTTVFVLEAVLKLVAFGLRRFFKDRWNQLDLAIVLLSVMGITLEEIEINAALPINPTIIRIMRVLRIARVLKLLKMATGMRALLDTVVQALPQVGNLGLLFMLLFFIYAALGVELFGKLVCNDENPCEGMSRHATFENFGMAFLTLFQVSTGDNWNGIMKDTLRDCTHDERSCLSSLQFVSPLYFVSFVLTAQFVLINVVVAVLMKHLDDSNKEAQEDAEMDAELELEMAHGLGPGPRLPTGSPGAPGRGPGGAGGGGDTEGGLCRRCYSPAQENLWLDSVSLIIKDSLEGELTIIDNLSGSIFHHYSSPAGCKKCHHDKQEVQLAETEAFSLNSDRSSSILLGDDLSLEDPTACPPGRKDSKGELDPPEPMRVGDLGECFFPLSSTAVSPDPENFLCEMEEIPFNPVRSWLKHDSSQAPPSPFSPDASSPLLPMPAEFFHPAVSASQKGPEKGTGTGTLPKIALQGSWASLRSPRVNCTLLRQATGSDTSLDASPSSSAGSLQTTLEDSLTLSDSPRRALGPPAPAPGPRAGLSPAARRRLSLRGRGLFSLRGLRAHQRSHSSGGSTSPGCTHHDSMDPSDEEGRGGAGGGGAGSEHSETLSSLSLTSLFCPPPPPPAPGLTPARKFSSTSSLAAPGRPHAAALAHGLARSPSWAADRSKDPPGRAPLPMGLGPLAPPPQPLPGELEPGDAASKRKR

SEQ ID NO: 15669 - protein, 2016 aa, Homo sapiens
MAESASPPSSSAAAPAAEPGVTTEQPGPRSPPSSPPGLEEPLDGADPHVPHPDLAPIAFFCLRQTTSPRNWCIKMVCNPWFECVSMLVILLNCVTLGMYQPCDDMDCLSDRCKILQVFDDFIFIFFAMEMVLKMVALGIFGKKCYLGDTWNRLDFFIVMAGMVEYSLDLQNINLSAIRTVRVLRPLKAINRVPSMRILVNLLLDTLPMLGNVLLLCFFVFFIFGIIGVQLWAGLLRNRCFLEENFTIQGDVALPPYYQPEEDDEMPFICSLSGDNGIMGCHEIPPLKEQGRECCLSKDDVYDFGAGRQDLNASGLCVNWNRYYNVCRTGSANPHKGAINFDNIGYAWIVIFQVITLEGWVEIMYYVMDAHSFYNFIYFILLIIVGSFFMINLCLVVIATQFSETKQREHRLMLEQRQRYLSSSTVASYAEPGDCYEEIFQYVCHILRKAKRRALGLYQALQSRRQALGPEAPAPAKPGPHAKEPRHYHGKTKGQGDEGRHLGSRHCQTLHGPASPGNDHSGRELCPQHSPLDATPHTLVQPIPATLASDPASCPCCQHEDGRRPSGLGSTDSGQEGSGSGSSAGGEDEADGDGARSSEDGASSELGKEEEEEEQADGAVWLCGDVWRETRAKLRGIVDSKYFNRGIMMAILVNTVSMGIEHHEQPEELTNILEICNVVFTSMFALEMILKLAAFGLFDYLRNPYNIFDSIIVIISIWEIVGQADGGLSVLRTFRLLRVLKLVRFMPALRRQLVVLMKTMDNVATFCMLLMLFIFIFSILGMHIFGCKFSLRTDTGDTVPDRKNFDSLLWAIVTVFQILTQEDWNVVLYNGMASTSPWASLYFVALMTFGNYVLFNLLVAILVEGFQAEGDANRSYSDEDQSSSNIEEFDKLQEGLDSSGDPKLCPIPMTPNGHLDPSLPLGGHLGPAGAAGPAPRLSLQPDPMLVALGSRKSSVMSLGRMSYDQRSLSSSRSSYYGPWGRSAAWASRRSSWNSLKHKPPSAEHESLLSAERGGGARVCEVAADEGPPRAAPLHTPHAHHIHHGPHLAHRHRHHRRTLSLDNRDSVDLAELVPAVGAHPRAAWRAAGPAPGHEDCNGRMPSIAKDVFTKMGDRGDRGEDEEEIDYTLCFRVRKMIDVYKPDWCEVREDWSVYLFSPENRFRVLCQTIIAHKLFDYVVLAFIFLNCITIALERPQIEAGSTERIFLTVSNYIFTAIFVGEMTLKVVSLGLYFGEQAYLRSSWNVLDGFLVFVSIIDIVVSLASAGGAKILGVLRVLRLLRTLRPLRVISRAPGLKLVVETLISSLKPIGNIVLICCAFFIIFGILGVQLFKGKFYHCLGVDTRNITNRSDCMAANYRWVHHKYNFDNLGQALMSLFVLASKDGWVNIMYNGLDAVAVDQQPVTNHNPWMLLYFISFLLIVSFFVLNMFVGVVVENFHKCRQHQEAEEARRREEKRLRRLEKKRRKAQRLPYYATYCHTRLLIHSMCTSHYLDIFITFIICLNVVTMSLEHYNQPTSLETALKYCNYMFTTVFVLEAVLKLVAFGLRRFFKDRWNQLDLAIVLLSVMGITLEEIEINAALPINPTIIRIMRVLRIARVLKLLKMATGMRALLDTVVQALPQVGNLGLLFMLLFFIYAALGVELFGKLVCNDENPCEGMSRHATFENFGMAFLTLFQVSTGDNWNGIMKDTLRDCTHDERSCLSSLQFVSPLYFVSFVLTAQFVLINVVVAVLMKHLDDSNKEAQEDAEMDAELELEMAHGLGPGPRLPTGSPGAPGRGPGGAGGGGDTEGGLCRRCYSPAQENLWLDSVSLIIKDSLEGELTIIDNLSGSIFHHYSSPAGCKKCHHDKQEVQLAETEAFSLNSDRSSSILLGDDLSLEDPTACPPGRKDSKGELDPPEPMRVGDLGECFFPLSSTAVSPDPENFLCEMEEIPFNPVRSWLKHDSSQAPPSPFSPDASSPLLPMPAEFFHPAVSASQKGPEKGTGTGTLPKIALQGSWASLRSPRVNCTLLRQVPTPPRP

SEQ ID NO: 15670 - protein, 1981 aa, Homo sapiens
MAESASPPSSSAAAPAAEPGVTTEQPGPRSPPSSPPGLEEPLDGADPHVPHPDLAPIAFFCLRQTTSPRNWCIKMVCNPWFECVSMLVILLNCVTLGMYQPCDDMDCLSDRCKILQVFDDFIFIFFAMEMVLKMVALGIFGKKCYLGDTWNRLDFFIVMAGMVEYSLDLQNINLSAIRTVRVLRPLKAINRVPSMRILVNLLLDTLPMLGNVLLLCFFVFFIFGIIGVQLWAGLLRNRCFLEENFTIQGDVALPPYYQPEEDDEMPFICSLSGDNGIMGCHEIPPLKEQGRECCLSKDDVYDFGAGRQDLNASGLCVNWNRYYNVCRTGSANPHKGAINFDNIGYAWIVIFQVITLEGWVEIMYYVMDAHSFYNFIYFILLIIVGSFFMINLCLVVIATQFSETKQREHRLMLEQRQRYLSSSTVASYAEPGDCYEEIFQYVCHILRKAKRRALGLYQALQSRRQALGPEAPAPAKPGPHAKEPRHYQLCPQHSPLDATPHTLVQPIPATLASDPASCPCCQHEDGRRPSGLGSTDSGQEGSGSGSSAGGEDEADGDGARSSEDGASSELGKEEEEEEQADGAVWLCGDVWRETRAKLRGIVDSKYFNRGIMMAILVNTVSMGIEHHEQPEELTNILEICNVVFTSMFALEMILKLAAFGLFDYLRNPYNIFDSIIVIISIWEIVGQADGGLSVLRTFRLLRVLKLVRFMPALRRQLVVLMKTMDNVATFCMLLMLFIFIFSILGMHIFGCKFSLRTDTGDTVPDRKNFDSLLWAIVTVFQILTQEDWNVVLYNGMASTSPWASLYFVALMTFGNYVLFNLLVAILVEGFQAEGDANRSYSDEDQSSSNIEEFDKLQEGLDSSGDPKLCPIPMTPNGHLDPSLPLGGHLGPAGAAGPAPRLSLQPDPMLVALGSRKSSVMSLGRMSYDQRSLSSSRSSYYGPWGRSAAWASRRSSWNSLKHKPPSAEHESLLSAERGGGARVCEVAADEGPPRAAPLHTPHAHHIHHGPHLAHRHRHHRRTLSLDNRDSVDLAELVPAVGAHPRAAWRAAGPAPGHEDCNGRMPSIAKDVFTKMGDRGDRGEDEEEIDYTLCFRVRKMIDVYKPDWCEVREDWSVYLFSPENRFRVLCQTIIAHKLFDYVVLAFIFLNCITIALERPQIEAGSTERIFLTVSNYIFTAIFVGEMTLKVVSLGLYFGEQAYLRSSWNVLDGFLVFVSIIDIVVSLASAGGAKILGVLRVLRLLRTLRPLRVISRAPGLKLVVETLISSLKPIGNIVLICCAFFIIFGILGVQLFKGKFYHCLGVDTRNITNRSDCMAANYRWVHHKYNFDNLGQALMSLFVLASKDGWVNIMYNGLDAVAVDQQPVTNHNPWMLLYFISFLLIVSFFVLNMFVGVVVENFHKCRQHQEAEEARRREEKRLRRLEKKRRKAQRLPYYATYCHTRLLIHSMCTSHYLDIFITFIICLNVVTMSLEHYNQPTSLETALKYCNYMFTTVFVLEAVLKLVAFGLRRFFKDRWNQLDLAIVLLSVMGITLEEIEINAALPINPTIIRIMRVLRIARVLKLLKMATGMRALLDTVVQALPQVGNLGLLFMLLFFIYAALGVELFGKLVCNDENPCEGMSRHATFENFGMAFLTLFQVSTGDNWNGIMKDTLRDCTHDERSCLSSLQFVSPLYFVSFVLTAQFVLINVVVAVLMKHLDDSNKEAQEDAEMDAELELEMAHGLGPGPRLPTGSPGAPGRGPGGAGGGGDTEGGLCRRCYSPAQENLWLDSVSLIIKDSLEGELTIIDNLSGSIFHHYSSPAGCKKCHHDKQEVQLAETEAFSLNSDRSSSILLGDDLSLEDPTACPPGRKDSKGELDPPEPMRVGDLGECFFPLSSTAVSPDPENFLCEMEEIPFNPVRSWLKHDSSQAPPSPFSPDASSPLLPMPAEFFHPAVSASQKGPEKGTGTGTLPKIALQGSWASLRSPRVNCTLLRQVPTPPRP

SEQ ID NO: 15671 - protein, 2188 aa, Homo sapiens
MAESASPPSSSAAAPAAEPGVTTEQPGPRSPPSSPPGLEEPLDGADPHVPHPDLAPIAFFCLRQTTSPRNWCIKMVCNPWFECVSMLVILLNCVTLGMYQPCDDMDCLSDRCKILQVFDDFIFIFFAMEMVLKMVALGIFGKKCYLGDTWNRLDFFIVMAGMVEYSLDLQNINLSAIRTVRVLRPLKAINRVPSMRILVNLLLDTLPMLGNVLLLCFFVFFIFGIIGVQLWAGLLRNRCFLEENFTIQGDVALPPYYQPEEDDEMPFICSLSGDNGIMGCHEIPPLKEQGRECCLSKDDVYDFGAGRQDLNASGLCVNWNRYYNVCRTGSANPHKGAINFDNIGYAWIVIFQVITLEGWVEIMYYVMDAHSFYNFIYFILLIIVGSFFMINLCLVVIATQFSETKQREHRLMLEQRQRYLSSSTVASYAEPGDCYEEIFQYVCHILRKAKRRALGLYQALQSRRQALGPEAPAPAKPGPHAKEPRHYQLCPQHSPLDATPHTLVQPIPATLASDPASCPCCQHEDGRRPSGLGSTDSGQEGSGSGSSAGGEDEADGDGARSSEDGASSELGKEEEEEEQADGAVWLCGDVWRETRAKLRGIVDSKYFNRGIMMAILVNTVSMGIEHHEQPEELTNILEICNVVFTSMFALEMILKLAAFGLFDYLRNPYNIFDSIIVIISIWEIVGQADGGLSVLRTFRLLRVLKLVRFMPALRRQLVVLMKTMDNVATFCMLLMLFIFIFSILGMHIFGCKFSLRTDTGDTVPDRKNFDSLLWAIVTVFQILTQEDWNVVLYNGMASTSPWASLYFVALMTFGNYVLFNLLVAILVEGFQAEGDANRSYSDEDQSSSNIEEFDKLQEGLDSSGDPKLCPIPMTPNGHLDPSLPLGGHLGPAGAAGPAPRLSLQPDPMLVALGSRKSSVMSLGRMSYDQRSLSSSRSSYYGPWGRSAAWASRRSSWNSLKHKPPSAEHESLLSAERGGGARVCEVAADEGPPRAAPLHTPHAHHIHHGPHLAHRHRHHRRTLSLDNRDSVDLAELVPAVGAHPRAAWRAAGPAPGHEDCNGRMPSIAKDVFTKMGDRGDRGEDEEEIDYTLCFRVRKMIDVYKPDWCEVREDWSVYLFSPENRFRVLCQTIIAHKLFDYVVLAFIFLNCITIALERPQIEAGSTERIFLTVSNYIFTAIFVGEMTLKVVSLGLYFGEQAYLRSSWNVLDGFLVFVSIIDIVVSLASAGGAKILGVLRVLRLLRTLRPLRVISRAPGLKLVVETLISSLKPIGNIVLICCAFFIIFGILGVQLFKGKFYHCLGVDTRNITNRSDCMAANYRWVHHKYNFDNLGQALMSLFVLASKDGWVNIMYNGLDAVAVDQQPVTNHNPWMLLYFISFLLIVSFFVLNMFVGVVVENFHKCRQHQEAEEARRREEKRLRRLEKKRRKAQRLPYYATYCHTRLLIHSMCTSHYLDIFITFIICLNVVTMSLEHYNQPTSLETALKYCNYMFTTVFVLEAVLKLVAFGLRRFFKDRWNQLDLAIVLLSVMGITLEEIEINAALPINPTIIRIMRVLRIARVLKLLKMATGMRALLDTVVQALPQVGNLGLLFMLLFFIYAALGVELFGKLVCNDENPCEGMSRHATFENFGMAFLTLFQVSTGDNWNGIMKDTLRDCTHDERSCLSSLQFVSPLYFVSFVLTAQFVLINVVVAVLMKHLDDSNKEAQEDAEMDAELELEMAHGLGPGPRLPTGSPGAPGRGPGGAGGGGDTEGGLCRRCYSPAQENLWLDSVSLIIKDSLEGELTIIDNLSGSIFHHYSSPAGCKKCHHDKQEVQLAETEAFSLNSDRSSSILLGDDLSLEDPTACPPGRKDSKGELDPPEPMRVGDLGECFFPLSSTAVSPDPENFLCEMEEIPFNPVRSWLKHDSSQAPPSPFSPDASSPLLPMPAEFFHPAVSASQKGPEKGTGTGTLPKIALQGSWASLRSPRVNCTLLRQATGSDTSLDASPSSSAGSLQTTLEDSLTLSDSPRRALGPPAPAPGPRAGLSPAARRRLSLRGRGLFSLRGLRAHQRSHSSGGSTSPGCTHHDSMDPSDEEGRGGAGGGGAGSEHSETLSSLSLTSLFCPPPPPPAPGLTPARKFSSTSSLAAPGRPHAAALAHGLARSPSWAADRSKDPPGRAPLPMGLGPLAPPPQPLPGELEPGDAASKRKR

SEQ ID NO: 15672 - protein, 758 aa, Homo sapiens
MRKQGVSSKRLQSSGRSQSKGRRGASLAREPEVEEEMEKSALGGGKLPRGSWRSSPGRIQSLKERKGLELEVVAKTFLLGPFQFVRNSLAQLREKVQELQARRFSSRTTLGIAVFVAILHWLHLVTLFENDRHFSHLSSLEREMTFRTEMGLYYSYFKTIIEAPSFLEGLWMIMNDRLTEYPLIINAIKRFHLYPEVIIASWYCTFMGIMNLFGLETKTCWNVTRIEPLNEVQSCEGLGDPACFYVGVIFILNGLMMGLFFMYGAYLSGTQLGGLITVLCFFFNHGEATRVMWTPPLRESFSYPFLVLQMCILTLILRTSSNDRRPFIALCLSNVAFMLPWQFAQFILFTQIASLFPMYVVGYIEPSKFQKIIYMNMISVTLSFILMFGNSMYLSSYYSSSLLMTWAIILKRNEIQKLGVSKLNFWLIQGSAWWCGTIILKFLTSKILGVSDHIRLSDLIAARILRYTDFDTLIYTCAPEFDFMEKATPLRYTKTLLLPVVMVITCFIFKKTVRDISYVLATNIYLRKQLLEHSELAFHTLQLLVFTALAILIMRLKMFLTPHMCVMASLICSRQLFGWLFRRVRFEKVIFGILTVMSIQGYANLRNQWSIIGEFNNLPQEELLQWIKYSTTSDAVFAGAMPTMASIKLSTLHPIVNHPHYEDADLRARTKIVYSTYSRKSAKEVRDKLLELHVNYYVLEEAWCVVRTKPGCSMLEIWDVEDPSNAANPPLCSVLLEDARPYFTTVFQNSVYRVLKVN

SEQ ID NO: 15673 - protein, 205 aa, Homo sapiens
MRLKMFLTPHMCVMASLICSRQLFGWLFRRVRFEKVIFGILTVMSIQGYANLRNQWSIIGEFNNLPQEELLQWIKYSTTSDAVFAGAMPTMASIKLSTLHPIVNHPHYEDADLRARTKIVYSTYSRKSAKEVRDKLLELHVNYYVLEEAWCVVRTKPGCSMLEIWDVEDPSNAANPPLCSVLLEDARPYFTTVFQNSVYRVLKVN

SEQ ID NO: 15674 - protein, 716 aa, Homo sapiens
MMSIRQRREIRATEVSEDFPAQEENVKLENKLPSGCTSRRLWKILSLTIGGTIALCIGLLTSVYLATLHENDLWFSNIKEVEREISFRTECGLYYSYYKQMLQAPTLVQGFHGLIYDNKTESMKTINLLQRMNIYQEVFLSILYRVLPIQKYLEPVYFYIYTLFGLQAIYVTALYITSWLLSGTWLSGLLAAFWYVTNRIDTTRVEFTIPLRENWALPFFAIQIAAITYFLRPNLQPLSERLTLLAIFISTFLFSLTWQFNQFMMLMQALVLFTLDSLDMLPAVKATWLYGIQITSLLLVCILQFFNSMILGSLLISFNLSVFIARKLQKNLKTGSFLNRLGKLLLHLFMVLCLTLFLNNIIKKILNLKSDEHIFKFLKAKFGLGATRDFDANLYLCEEAFGLLPFNTFGRLSDTLLFYAYIFVLSITVIVAFVVAFHNLSDSTNQQSVGKMEKGTVDLKPETAYNLIHTILFGFLALSTMRMKYLWTSHMCVFASFGLCSPEIWELLLKSVHLYNPKRICIMRYSVPILILLYLCYKFWPGMMDELSELREFYDPDTVELMNWINSNTPRKAVFAGSMQLLAGVKLCTGRTLTNHPHYEDSSLRERTRAVYQIYAKRAPEEVHALLRSFGTDYVILEDSICYERRHRRGCRLRDLLDIANGHMMDGPGENDPDLKPADHPRFCEEIKRNLPPYVAYFTRVFQNKTFHVYKLSRNK

SEQ ID NO: 15675 - protein, 542 aa, Homo sapiens
MMSIRQRREIRATEVSEDFPAQEENVKLENKLPSGCTSRRLWKILSLTIGGTIALCIGLLTSVYLATLHENDLWFSNIKEVEREISFRTECGLYYSYYKQMLQAPTLVQGFHGLIYDNKTESMKTINLLQRMNIYQEVFLSILYRVLPIQKYLEPVYFYIYTLFGLQAIYVTALYITSWLLSGTWLSGLLAAFWYVTNRIDTTRVEFTIPLRENWALPFFAIQIAAITYFLRPNLQPLSERLTLLAIFISTFLFSLTWQFNQFMMLMQALVLFTLDSLDMLPAVKATWLYGIQITSLLLVCILQFFNSMILGSLLISFNLSVFIARKLQKNLKTGSFLNRLGKLLLHLFMVLCLTLFLNNIIKKILNLKSDEHIFKFLKAKFGLGATRDFDANLYLCEEAFGLLPFNTFGRLSDTLLFYAYIFVLSITVIVAFVVAFHNLSDSTNQQSVGKMEKGTVDLKPETAYNLIHTILFGFLALSTMRMKYLWTSHMCVFASFGLCSPEIWELLLKSVHLYNPKRICIMRYSVPILILLYLCYKNQKS

SEQ ID NO: 15676 - protein, 438 aa, Homo sapiens
MEHAATTGPRPGPPSRRVENVVLRAKDWLPGAPGGTAVWATSLEAEVPPDLALNKEQQLQISKELVDIQITTHHLHEQHEAEIFQLKSEILRLESRVLELELRGDGTSQGCAVPVESDPRHPRAAAQELRHKAQVPGHSDDHRFQVQPKNTMNPENEQHRLGSGLQGEVKWALEHQEARQQALVTRVATLGRQLQGAREEARAAGQRLATQAVVLCSCQGQLRQAEAENARLQLQLKKLKDEYVLRLQHCAWQAVEHADGAGQAPATTALRTFLEATLEDIRAAHRSREQQLARAARSYHKRLVDLSRRHEELLVAYRAPGNPQAIFDIASLDLEPLPVPLVTDFSHREDQHGGPGALLSSPKKRPGGASQGGTSEPQGLDAASWAQIHQKLRDFSRSTQSWNGSGHSCWSGPRWLKSNFLSYRSTWTSTWAGTSTKS

SEQ ID NO: 15677 - protein, 187 aa, Homo sapiens
MEHAATTGPRPGPPSRRVENVVLRAKDWLPGAPGGTAVWATSLEAEVPPDLALNKEQQLQISKELVDIQITTHHLHEQHEAEIFQLKSEILRLESRVLELELRGDGTSQGCAVPVESDPRHPRAAAQELRHKAQVPGHSDDHRFQVQPKNTMNPENEQHRLGSGLQGEVKWALEHQEARQQALVTRV

SEQ ID NO: 15678 - protein, 273 aa, Homo sapiens
MEHAATTGPRPGPPSRRVENVVLRAKDWLPGAPGGTAVWATSLEAEVPPDLALNKEQQLQISKELVDIQITTHHLHEQHEAEIFQLKSEILRLESRVLELELRGDGTSQGCAVPVESDPRHPRAAAQELRHKAQVPGHSDDHRFQVQPKNTMNPENEQHRLGSGVSVQPPSSGERAAPETPSLGSHPASPVCPTAAGGSEVGAGASGGPAAGTGDACVSGHLTWGPILEQREPLIVGLLSLTPVSSGQPWAGSCREPERRPGQPGSDWPHRLW

SEQ ID NO: 15679 - protein, 257 aa, Homo sapiens
MEHAATTGPRPGPPSRRVENVVLRAKDWLPGAPGGTAVWATSLEAEVPPDLALNKEQQLQISKELVDIQITTHHLHEQHEAEIFQLKSEILRLESRVLELELRGDGTSQGCAVPVESDPRHPRAAAQELRHKAQVPGHSDDHRFQVQPKNTMNPENEQHRLGSGVSVQPPSSGERAAPETPSLGSHPASPVCPTAAGGSEVGAGASGGPAAGTGDACGNPGPAAAGSPRGGQGSRAATGHTGCGAVQLPRPAPSGRG

SEQ ID NO: 15680 - protein, 347 aa, Homo sapiens
MEHAATTGPRPGPPSRRVENVSPLGLAAPAMGLKSARSPKGQEGAGSCTLGLISARRGTFTAQPGREAGLVTAWEWGHSPAWDPPGEWVAVPPQVVLRAKDWLPGAPGGTAVWATSLEAEVPPDLALNKEQQLQISKELVDIQITTHHLHEQHEAEIFQLKSEILRLESRVLELELRGDGTSQGCAVPVESDPRHPRAAAQELRHKAQVPGHSDDHRFQVQPKNTMNPENEQHRLGSGVSVQPPSSGERAAPETPSLGSHPASPVCPTAAGGSEVGAGASGGPAAGTGDACVSGHLTWGPILEQREPLIVGLLSLTPVSSGQPWAGSCREPERRPGQPGSDWPHRLW

SEQ ID NO: 15681 - protein, 262 aa, Homo sapiens
MEHAATTGPRPGPPSRRVENVVLRAKDWLPGAPGGTAVWATSLEAEVPPDLALNKEQQLQISKELVDIQITTHHLHEQHEAEIFQLKSEILRLESRVLELELRGDGTSQGCAVPVESDPRHPRAAAQELRHKAQVQPKNTMNPENEQHRLGSGVSVQPPSSGERAAPETPSLGSHPASPVCPTAAGGSEVGAGASGGPAAGTGDACVSGHLTWGPILEQREPLIVGLLSLTPVSSGQPWAGSCREPERRPGQPGSDWPHRLW

SEQ ID NO: 15682 - protein, 282 aa, Homo sapiens
MLPLLRCVPRVLGSSVAGLRAAAPASPFRQLLQPAPRLCTRPFGLLSVRAGSERRPGLLRPRGPCACGCGCGSLHTDGDKAFVDFLSDEIKEERKIQKHKTLPKMSGGWELELNGTEAKLVRKVAGEKITVTFNINNSIPPTFDGEEEPSQGQKVEEQEPELTSTPNFVVEVIKNDDGKKALVLDCHYPEDEVGQEDEAESDIFSIREVSFQSTGESEWKDTNYTLNTDSLDWALYDHLMDFLADRGVDNTFADELVELSTALEHQEYITFLEDLKSFVKSQ

SEQ ID NO: 15683 - protein, 660 aa, Homo sapiens
MVQRDMSKSPPTAAAAVAQEIQMELLENVAPAGALGAAAQSYGKGARRKNRFKGSDGSTSSDTTSNSFVRQGSADSYTSRPSDSDVSLEEDREAVRREAERQAQAQLEKAKTKPVAFAVRTNVSYSAAHEDDVPVPGMAISFEAKDFLHVKEKFNNDWWIGRLVKEGCEIGFIPSPVKLENMRLQHEQRAKQGKFYSSKSGGNSSSSLGDIVPSSRKSTPPSSAIDIDATGLDAEENDIPANHRSPKPSANSVTSPHSKEKRMPFFKKTEHTPPYDVVPSMRPVVLVGPSLKGYEVTDMMQKALFDFLKHRFEGRISITRVTADISLAKRSVLNNPSKHAIIERSNTRSSLAEVQSEIERIFELARTLQLVVLDADTINHPAQLSKTSLAPIIVYVKISSPKVLQRLIKSRGKSQAKHLNVQMVAADKLAQCPPELFDVILDENQLEDACEHLADYLEAYWKATHPPSSSLPNPLLSRTLATSSLPLSPTLASNSQGSQGDQRTDRSAPIRSASQAEEEPSVEPVKKSQHRSSSSAPHHNHRSGTSRGLSRQETFDSETQESRDSAYVEPKEDYSHDHVDHYASHRDHNHRDETHGSSDHRHRESRHRSRDVDREQDHNECNKQRSRHKSKDRYCEKDGEVISKKRNEAGEWNRDVYIRQ

SEQ ID NO: 15684 - protein, 605 aa, Homo sapiens
MQCCGLVHRRRVRVSYGSADSYTSRPSDSDVSLEEDREAVRREAERQAQAQLEKAKTKPVAFAVRTNVSYSAAHEDDVPVPGMAISFEAKDFLHVKEKFNNDWWIGRLVKEGCEIGFIPSPVKLENMRLQHEQRAKQGKFYSSKSGGNSSSSLGDIVPSSRKSTPPSSAIDIDATGLDAEENDIPANHRSPKPSANSVTSPHSKEKRMPFFKKTEHTPPYDVVPSMRPVVLVGPSLKGYEVTDMMQKALFDFLKHRFEGRISITRVTADISLAKRSVLNNPSKHAIIERSNTRSSLAEVQSEIERIFELARTLQLVVLDADTINHPAQLSKTSLAPIIVYVKISSPKVLQRLIKSRGKSQAKHLNVQMVAADKLAQCPPELFDVILDENQLEDACEHLADYLEAYWKATHPPSSSLPNPLLSRTLATSSLPLSPTLASNSQGSQGDQRTDRSAPIRSASQAEEEPSVEPVKKSQHRSSSSAPHHNHRSGTSRGLSRQETFDSETQESRDSAYVEPKEDYSHDHVDHYASHRDHNHRDETHGSSDHRHRESRHRSRDVDREQDHNECNKQRSRHKSKDRYCEKDGEVISKKRNEAGEWNRDVYIRQ

SEQ ID NO: 15685 - protein, 606 aa, Homo sapiens
MLDRRLIAPQTKYIIPGGSADSYTSRPSDSDVSLEEDREAVRREAERQAQAQLEKAKTKPVAFAVRTNVSYSAAHEDDVPVPGMAISFEAKDFLHVKEKFNNDWWIGRLVKEGCEIGFIPSPVKLENMRLQHEQRAKQGKFYSSKSGGNSSSSLGDIVPSSRKSTPPSSAIDIDATGLDAEENDIPANHRSPKPSANSVTSPHSKEKRMPFFKKTEHTPPYDVVPSMRPVVLVGPSLKGYEVTDMMQKALFDFLKHRFEGRISITRVTADISLAKRSVLNNPSKHAIIERSNTRSSLAEVQSEIERIFELARTLQLVVLDADTINHPAQLSKTSLAPIIVYVKISSPKVLQRLIKSRGKSQAKHLNVQMVAADKLAQCPPELFDVILDENQLEDACEHLADYLEAYWKATHPPSSSLPNPLLSRTLATSSLPLSPTLASNSQGSQGDQRTDRSAPIRSASQAEEEPSVEPVKKSQHRSSSSAPHHNHRSGTSRGLSRQETFDSETQESRDSAYVEPKEDYSHDHVDHYASHRDHNHRDETHGSSDHRHRESRHRSRDVDREQDHNECNKQRSRHKSKDRYCEKDGEVISKKRNEAGEWNRDVYIRQ

SEQ ID NO: 15686 - protein, 632 aa, Homo sapiens
MNQGSGLDLLKISYGKGARRKNRFKGSDGSTSSDTTSNSFVRQGSADSYTSRPSDSDVSLEEDREAVRREAERQAQAQLEKAKTKPVAFAVRTNVSYSAAHEDDVPVPGMAISFEAKDFLHVKEKFNNDWWIGRLVKEGCEIGFIPSPVKLENMRLQHEQRAKQGKFYSSKSGGNSSSSLGDIVPSSRKSTPPSSAIDIDATGLDAEENDIPANHRSPKPSANSVTSPHSKEKRMPFFKKTEHTPPYDVVPSMRPVVLVGPSLKGYEVTDMMQKALFDFLKHRFEGRISITRVTADISLAKRSVLNNPSKHAIIERSNTRSSLAEVQSEIERIFELARTLQLVVLDADTINHPAQLSKTSLAPIIVYVKISSPKVLQRLIKSRGKSQAKHLNVQMVAADKLAQCPPELFDVILDENQLEDACEHLADYLEAYWKATHPPSSSLPNPLLSRTLATSSLPLSPTLASNSQGSQGDQRTDRSAPIRSASQAEEEPSVEPVKKSQHRSSSSAPHHNHRSGTSRGLSRQETFDSETQESRDSAYVEPKEDYSHDHVDHYASHRDHNHRDETHGSSDHRHRESRHRSRDVDREQDHNECNKQRSRHKSKDRYCEKDGEVISKKRNEAGEWNRDVYIRQ

SEQ ID NO: 15687 - protein, 612 aa, Homo sapiens
MKATWIRLLKRAKGGRLKNSDICGSADSYTSRPSDSDVSLEEDREAVRREAERQAQAQLEKAKTKPVAFAVRTNVSYSAAHEDDVPVPGMAISFEAKDFLHVKEKFNNDWWIGRLVKEGCEIGFIPSPVKLENMRLQHEQRAKQGKFYSSKSGGNSSSSLGDIVPSSRKSTPPSSAIDIDATGLDAEENDIPANHRSPKPSANSVTSPHSKEKRMPFFKKTEHTPPYDVVPSMRPVVLVGPSLKGYEVTDMMQKALFDFLKHRFEGRISITRVTADISLAKRSVLNNPSKHAIIERSNTRSSLAEVQSEIERIFELARTLQLVVLDADTINHPAQLSKTSLAPIIVYVKISSPKVLQRLIKSRGKSQAKHLNVQMVAADKLAQCPPELFDVILDENQLEDACEHLADYLEAYWKATHPPSSSLPNPLLSRTLATSSLPLSPTLASNSQGSQGDQRTDRSAPIRSASQAEEEPSVEPVKKSQHRSSSSAPHHNHRSGTSRGLSRQETFDSETQESRDSAYVEPKEDYSHDHVDHYASHRDHNHRDETHGSSDHRHRESRHRSRDVDREQDHNECNKQRSRHKSKDRYCEKDGEVISKKRNEAGEWNRDVYIRQ

SEQ ID NO: 15688 - protein, 567 aa, Homo sapiens
MQCCGLVHRRRVRVSYGSADSYTSRPSDSDVSLEEDREAVRREAERQAQAQLEKAKTKPVAFAVRTNVSYSAAHEDDVPVPGMAISFEAKDFLHVKEKFNNDWWIGRLVKEGCEIGFIPSPVKLENMRLQHEQRAKQGKFYSSKSGGNSSSSLGDIVPSSRKSTPPSSAKQKQKSTEHTPPYDVVPSMRPVVLVGPSLKGYEVTDMMQKALFDFLKHRFEGRISITRVTADISLAKRSVLNNPSKHAIIERSNTRSSLAEVQSEIERIFELARTLQLVVLDADTINHPAQLSKTSLAPIIVYVKISSPKVLQRLIKSRGKSQAKHLNVQMVAADKLAQCPPELFDVILDENQLEDACEHLADYLEAYWKATHPPSSSLPNPLLSRTLATSSLPLSPTLASNSQGSQGDQRTDRSAPIRSASQAEEEPSVEPVKKSQHRSSSSAPHHNHRSGTSRGLSRQETFDSETQESRDSAYVEPKEDYSHDHVDHYASHRDHNHRDETHGSSDHRHRESRHRSRDVDREQDHNECNKQRSRHKSKDRYCEKDGEVISKKRNEAGEWNRDVYIRQ

SEQ ID NO: 15689 - protein, 622 aa, Homo sapiens
MVQRDMSKSPPTAAAAVAQEIQMELLENVAPAGALGAAAQSYGKGARRKNRFKGSDGSTSSDTTSNSFVRQGSADSYTSRPSDSDVSLEEDREAVRREAERQAQAQLEKAKTKPVAFAVRTNVSYSAAHEDDVPVPGMAISFEAKDFLHVKEKFNNDWWIGRLVKEGCEIGFIPSPVKLENMRLQHEQRAKQGKFYSSKSGGNSSSSLGDIVPSSRKSTPPSSAKQKQKSTEHTPPYDVVPSMRPVVLVGPSLKGYEVTDMMQKALFDFLKHRFEGRISITRVTADISLAKRSVLNNPSKHAIIERSNTRSSLAEVQSEIERIFELARTLQLVVLDADTINHPAQLSKTSLAPIIVYVKISSPKVLQRLIKSRGKSQAKHLNVQMVAADKLAQCPPELFDVILDENQLEDACEHLADYLEAYWKATHPPSSSLPNPLLSRTLATSSLPLSPTLASNSQGSQGDQRTDRSAPIRSASQAEEEPSVEPVKKSQHRSSSSAPHHNHRSGTSRGLSRQETFDSETQESRDSAYVEPKEDYSHDHVDHYASHRDHNHRDETHGSSDHRHRESRHRSRDVDREQDHNECNKQRSRHKSKDRYCEKDGEVISKKRNEAGEWNRDVYIRQ

SEQ ID NO: 15690 - protein, 636 aa, Homo sapiens
MVQRDMSKSPPTAAAAVAQEIQMELLENVAPAGALGAAAQSYGKGARRKNRFKGSDGSTSSDTTSNSFVRQGSADSYTSRPSDSDVSLEEDREAVRREAERQAQAQLEKAKTKPVAFAVRTNVSYSAAHEDDVPVPGMAISFEAKDFLHVKEKFNNDWWIGRLVKEGCEIGFIPSPVKLENMRLQHEQRAKQGKFYSSKSGGNSSSSLGDIVPSSRKSTPPSSGAKSADEQDQWKTAGLFWRFTTEHTPPYDVVPSMRPVVLVGPSLKGYEVTDMMQKALFDFLKHRFEGRISITRVTADISLAKRSVLNNPSKHAIIERSNTRSSLAEVQSEIERIFELARTLQLVVLDADTINHPAQLSKTSLAPIIVYVKISSPKVLQRLIKSRGKSQAKHLNVQMVAADKLAQCPPELFDVILDENQLEDACEHLADYLEAYWKATHPPSSSLPNPLLSRTLATSSLPLSPTLASNSQGSQGDQRTDRSAPIRSASQAEEEPSVEPVKKSQHRSSSSAPHHNHRSGTSRGLSRQETFDSETQESRDSAYVEPKEDYSHDHVDHYASHRDHNHRDETHGSSDHRHRESRHRSRDVDREQDHNECNKQRSRHKSKDRYCEKDGEVISKKRNEAGEWNRDVYIRQ

SEQ ID NO: 15691 - protein, 608 aa, Homo sapiens
MNQGSGLDLLKISYGKGARRKNRFKGSDGSTSSDTTSNSFVRQGSADSYTSRPSDSDVSLEEDREAVRREAERQAQAQLEKAKTKPVAFAVRTNVSYSAAHEDDVPVPGMAISFEAKDFLHVKEKFNNDWWIGRLVKEGCEIGFIPSPVKLENMRLQHEQRAKQGKFYSSKSGGNSSSSLGDIVPSSRKSTPPSSGAKSADEQDQWKTAGLFWRFTTEHTPPYDVVPSMRPVVLVGPSLKGYEVTDMMQKALFDFLKHRFEGRISITRVTADISLAKRSVLNNPSKHAIIERSNTRSSLAEVQSEIERIFELARTLQLVVLDADTINHPAQLSKTSLAPIIVYVKISSPKVLQRLIKSRGKSQAKHLNVQMVAADKLAQCPPELFDVILDENQLEDACEHLADYLEAYWKATHPPSSSLPNPLLSRTLATSSLPLSPTLASNSQGSQGDQRTDRSAPIRSASQAEEEPSVEPVKKSQHRSSSSAPHHNHRSGTSRGLSRQETFDSETQESRDSAYVEPKEDYSHDHVDHYASHRDHNHRDETHGSSDHRHRESRHRSRDVDREQDHNECNKQRSRHKSKDRYCEKDGEVISKKRNEAGEWNRDVYIRQ

SEQ ID NO: 15692 - protein, 582 aa, Homo sapiens
MLDRRLIAPQTKYIIPGGSADSYTSRPSDSDVSLEEDREAVRREAERQAQAQLEKAKTKPVAFAVRTNVSYSAAHEDDVPVPGMAISFEAKDFLHVKEKFNNDWWIGRLVKEGCEIGFIPSPVKLENMRLQHEQRAKQGKFYSSKSGGNSSSSLGDIVPSSRKSTPPSSGAKSADEQDQWKTAGLFWRFTTEHTPPYDVVPSMRPVVLVGPSLKGYEVTDMMQKALFDFLKHRFEGRISITRVTADISLAKRSVLNNPSKHAIIERSNTRSSLAEVQSEIERIFELARTLQLVVLDADTINHPAQLSKTSLAPIIVYVKISSPKVLQRLIKSRGKSQAKHLNVQMVAADKLAQCPPELFDVILDENQLEDACEHLADYLEAYWKATHPPSSSLPNPLLSRTLATSSLPLSPTLASNSQGSQGDQRTDRSAPIRSASQAEEEPSVEPVKKSQHRSSSSAPHHNHRSGTSRGLSRQETFDSETQESRDSAYVEPKEDYSHDHVDHYASHRDHNHRDETHGSSDHRHRESRHRSRDVDREQDHNECNKQRSRHKSKDRYCEKDGEVISKKRNEAGEWNRDVYIRQ

SEQ ID NO: 15693 - protein, 723 aa, Homo sapiens
MAEEEGPPVELRQRKKPKSSENKESAKEEKISDIPIPERAPKHVLFQRFAKIFIGCLAAVTSGMMYALYLSAYHERKFWFSNRQELEREITFQGDSAIYYSYYKDMLKAPSFERGVYELTHNNKTVSLKTINAVQQMSLYPELIASILYQATGSNEIIEPVYFYIGIVFGLQGIYVTALFVTSWLMSGTWLAGMLTVAWFVINRVDTTRIEYSIPLRENWALPYFACQIAALTGYLKSNLNTYGERFCYLLMSASTYTFMMMWEYSHYLLFLQAISLFLLDTFSVEQSDKVYEVYKIYIFSLFLGYLLQFENPALLVSPLLSLVAALMLAKCLQLNVKKGSFVAKIIKVINFYLVCTLTITLNIIMKMFVPHKENGHMLKFLEVKFGLNMTKNFTMNWLLCQESLQAPSQDFFLRLTQSSLLPFYILVLIICFLSMLQVIFRRINGKSLKETVTLEDGRIGERPEIIYHVIHTILLGSLAMVIEGLKYIWIPYVCMLAAFGVCSPELWMTLFKWLRLRTVHPILLALILSMAVPTIIGLSLWKEFFPRLMTELMELQEFYDPDTVELMTWIKRQAPVAAVFAGSPQLMGAIKLCTGWMVTSLPLYNDDDLLKRNENIYQIYSKRSAEDIYKILTSYKANYLIVEDAICNEVGPMRGCRVKDLLDIANGHMVCEEGDKLTYSKYGRFCHEVKINYSPYVNYFTRVYWNRSYFVYKINTVISFQS

SEQ ID NO: 15694 - protein, 145 aa, Homo sapiens
MNTSLSWFEQLDVLLNATDGNVVRNKQWLYPLGVSTELIGLCICFFCSSGCIFLGSPPQNSTAVTPAVLWEESEIMQKELKLLQYQLSQHQELLLKQLAEGRQAQVGSWKIPRGAPFLTWSPASFSSMPRVLSKRTYSFGAPKCS

SEQ ID NO: 15695 - protein, 97 aa, Homo sapiens
MTKKKRENLGVALEIDGLEEKLSQCRRDLEAVNSRLHSRELSPEARRSLEKEKNSLMNKASNYEKELKFLRQENRKNMLLSVAIFILLTLVYAYWTM

SEQ ID NO: 15696 - protein, 281 aa, Homo sapiens
MGSRGQGLLLAYCLLLAFASGLVLSRVPHVQGEQQEWEGTEELPSPPDHAERAEEQHEKYRPSQDQGLPASRCLRCCDPGTSMYPATAVPQINITILKGEKGDRGDRGLQGKYGKTGSAGARGHTGPKGQKGSMGAPGERCKSHYAAFSVGRKKPMHSNHYYQTVIFDTEFVNLYDHFNMFTGKFYCYVPGLYFFSLNVHTWNQKETYLHIMKNEEEVVILFAQVGDRSIMQSQSLMLELREQDQVWVRLYKGERENAIFSEELDTYITFSGYLVKHATEP

SEQ ID NO: 15697 - protein, 291 aa, Homo sapiens
MMSATGPGRKMGSRGQGLLLAYCLLLAFASGLVLSRVPHVQGEQQEWEGTEELPSPPDHAERAEEQHEKYRPSQDQGLPASRCLRCCDPGTSMYPATAVPQINITILKGEKGDRGDRGLQGKYGKTGSAGARGHTGPKGQKGSMGAPGERCKSHYAAFSVGRKKPMHSNHYYQTVIFDTEFVNLYDHFNMFTGKFYCYVPGLYFFSLNVHTWNQKETYLHIMKNEEEVVILFAQVGDRSIMQSQSLMLELREQDQVWVRLYKGERENAIFSEELDTYITFSGYLVKHATEP

SEQ ID NO: 15698 - protein, 691 aa, Homo sapiens
MEESPLSRAPSRGGVNFLNVARTYIPNTKVECHYTLPPGTMPSASDWIGIFKVEAACVRDYHTFVWSSVPESTTDGSPIHTSVQFQASYLPKPGAQLYQFRYVNRQGQVCGQSPPFQFREPRPMDELVTLEEADGGSDILLVVPKATVLQNQLDESQQERNDLMQLKLQLEGQVTELRSRVQELERALATARQEHTELMEQYKGISRSHGEITEERDILSRQQGDHVARILELEDDIQTISEKVLTKEVELDRLRDTVKALTREQEKLLGQLKEVQADKEQSEAELQVAQQENHHLNLDLKEAKSWQEEQSAQAQRLKDKVAQMKDTLGQAQQRVAELEPLKEQLRGAQELAASSQQKATLLGEELASAAAARDRTIAELHRSRLEVAEVNGRLAELGLHLKEEKCQWSKERAGLLQSVEAEKDKILKLSAEILRLEKAVQEERTQNQVFKTELAREKDSSLVQLSESKRELTELRSALRVLQKEKEQLQEEKQELLEYMRKLEARLEKVADEKWNEDATTEDEEAAVGLSCPAALTDSEDESPEDMRLPPYGLCERGDPGSSPAGPREASPLVVISQPAPISPHLSGPAEDSSSDSEAEDEKSVLMAAVQSGGEEANLLLPELGSAFYDMASGFTVGTLSETSTGGPATPTWKECPICKERFPAESDKDALEDHMDGHFFFSTQDPFTFE

SEQ ID NO: 15699 - protein, 633 aa, Homo sapiens
MEESPLSRAPSRGGVNFLNVARTYIPNTKVECHYTLPPGTMPSASDWIGIFKVEAACVRDYHTFVWSSVPESTTDGSPIHTSVQFQASYLPKPGAQLYQFRYVNRQGQVCGQSPPFQFREPRPMDELVTLEEADGGSDILLVVPKATVLQNQLDESQQERNDLMQLKLQLEGQVTELRSRVQELERALATARQEHTELMEQYKGISRSHGEITEERDILSRQQGDHVARILELEDDIQTISEKVLTKEVELDRLRDTVKALTREQEKLLGQLKEVQADKEQSEAELQVAQQENHHLNLDLKEAKSWQEEQSAQAQRLKDKVAQMKDTLGQAQQRVAELEPLKEQLRGAQELAASSQQKATLLGEELASAAAARDRTIAELHRSRLEVAEVNGRLAELGLHLKEEKCQWSKERAGLLQSVEAEKDKILKLSAEILRLEKAVQEERTQNQVFKTELAREKDSSLVQLSESKRELTELRSALRVLQKEKEQLQEEKQELLEYMRKLEARLEKVADEKWNEDATTEDEEAAVGLSCPAALTDSEDESPEDMRLPPYGLCERGDPGSSPAGPREASPLVVISQPAPISPHLSGPAEDSSSDSEAEDEKSVLMAAVQSGGEEANLLLPELGSAFYDMAR

SEQ ID NO: 15700 - protein, 690 aa, Homo sapiens
MEESPLSRAPSRGGVNFLNVARTYIPNTKVECHYTLPPGTMPSASDWIGIFKVEAACVRDYHTFVWSSVPESTTDGSPIHTSVQFQASYLPKPGAQLYQFRYVNRQGQVCGQSPPFQFREPRPMDELVTLEEADGGSDILLVVPKATVLQNQLDESQQERNDLMQLKLQLEGQVTELRSRVQELERALATARQEHTELMEQYKGISRSHGEITEERDILSRQQGDHVARILELEDDIQTISEKVLTKEVELDRLRDTVKALTREQEKLLGQLKEVQADKEQSEAELQVAQQENHHLNLDLKEAKSWQEEQSAQAQRLKDKVAQMKDTLGQAQQRVAELEPLKEQLRGAQELAASSQQKATLLGEELASAAAARDRTIAELHRSRLEVAEVNGRLAELGLHLKEEKCQWSKERAGLLQSVEAEKDKILKLSAEILRLEKAVQEERTQNQVFKTELAREKDSSLVQLSESKRELTELRSALRVLQKEKEQLQEEKQELLEYMRKLEARLEKVADEKWNEDATTEDEEAAVGLSCPAALTDSEDESPEDMRLPPYGLCERGDPGSSPAGPREASPLVVISQPAPISPHLSGPAEDSSSDSAEDEKSVLMAAVQSGGEEANLLLPELGSAFYDMASGFTVGTLSETSTGGPATPTWKECPICKERFPAESDKDALEDHMDGHFFFSTQDPFTFE

SEQ ID NO: 15701 - protein, 606 aa, Homo sapiens
MEESPLSRAPSRGGVNFLNVARTYIPNTKVECHYTLPPGTMPSASDWIGIFKVEAACVRDYHTFVWSSVPESTTDGSPIHTSVQFQEPRPMDELVTLEEADGGSDILLVVPKATVLQNQLDESQQERNDLMQLKLQLEGQVTELRSRVQELERALATARQEHTELMEQYKGISRSHGEITEERDILSRQQGDHVARILELEDDIQTISEKVLTKEVELDRLRDTVKALTREQEKLLGQLKEVQADKEQSEAELEPLKEQLRGAQELAASSQQKATLLGEELASAAAARDRTIAELHRSRLEVAEVNGRLAELGLHLKEEKCQWSKERAGLLQSVEAEKDKILKLSAEILRLEKAVQEERTQNQVFKTELAREKDSSLVQLSESKRELTELRSALRVLQKEKEQLQEEKQELLEYMRKLEARLEKVADEKWNEDATTEDEEAAVGLSCPAALTDSEDESPEDMRLPPYGLCERGDPGSSPAGPREASPLVVISQPAPISPHLSGPAEDSSSDSEAEDEKSVLMAAVQSGGEEANLLLPELGSAFYDMASGFTVGTLSETSTGGPATPTWKECPICKERFPAESDKDALEDHMDGHFFFSTQDPFTFE

SEQ ID NO: 15702 - protein, 2452 aa, Homo sapiens
MAQIQKDKANISEKSVMHPEYIAVKAEKSPLSHILKTKELQVNISQQGEKAQEGEVEIVVLLSKTCPFVTSSAFLELDSIKEEEGEPRITRSFMPHLEIQESLPSRQTAPTKPTESLVKKEKQLLPQKEDRVQTVSMHGLMHPNGAVFKAKTSAPPQVFSITEHSPLSKRKEPQWGMKERAGQKQDRTGRPHVILTKTHPFMPSLSHHRFSPSQPKLPISSGAGKSRLANSNEGISSHKVILKANQQMPYKEAKDRVKIEGREGRILPKRIHLRAEALPLALLCNGKNYSLHIEEQGEGVQESKKEPGVVPRKSASFPPPPFYLNCDTRRNEKEGTLGKTQFSFPPLKIQDSSDSGKKAYTESLHGYTLSNSKGPVQPTAQGEEKGGLRIDMEDKMLPKCTDLKAKQLLLSDILNTKKLQWKSKEQKRKIQEDKNKQVKGLPSINTSLLTPPYLKFDTTEGQENVIRIAKVSLPQSRSKESSDAGRIACPEATHGELSSDVKQLKAHLLQKEEKDREKVADMTSVLDPNKMYLKAKKSPVLHTHSFSDLQWKTREQEEEKVQKVKSGPGVMLSKSPSRSSPLHLNVNTGFQEESIPILTRPSFPLVKLQVSPDTEGGTCIRPIAGDILIYLQKGKHVSQNKEEDDVQIVSILIFPKHQEEKVQECEGEPGVVLTKSTSLPSLSQLELDKETHLGNEMLRLKRPILRRISHIGETVHRESVVGDIPKDVKNEKQHIPQKEERNQKKIIDMRGTDITLKSKKSPRSCMLHRTELHVNIGGQGRKEHEGQDKPPGMIQRKMCILFSKPLPSNLKLERATHADEERLGGKTSFVLPLMPSALPDTEKTADAEARSGDVRKGKPHRSQKENRHEVKTIDMRFRIHCQEARISPMSHILNAKELVLNINKLEKKVHKDKDEACVVLSRTFLSIPSAPPLYLDSGNKTDKDTPGITGSSCPQRTLHVPSNTQKITNRDSVEGVDKNVVKQAEQYVPRPEAEQQLTSNFMISVQQRNQPSRVRSEEDLNQLVLNSRDEDIYFTGFGTIRSGKRPEWLFTGKKAQPVKYKTETLTAFLSYPTMDATKMGGLEEDTEIMDNLNHKISPKASVSLIRKISKELYVTLGTPANSKGFSVSERYAHQQETSSKVSPELAGSCKFDKPKEDGQSNDRISKMFSPKVLAPQTKGSLKKISIVTNWNAPQNIEEQDIVMKKQVIRRCEHGHKTRTNTILSKFPLQSGKQKTPSETDVDKKTTAHLSLQMLPGIHMDMTEIDPAKGGRKQALLISEQEEGVLEFLPKSLFPPWTFQFQSGDLEEKHQTDANTNINLEQKKLEMDNDSTVNQKEGKLKIGTNRALHLQEEKTEMHKARTANLEKERGRMDTSSSAHPHLLSLKAEESQMKTQVITHRENSRLIMQKQKKELEASNAKQSIQLQKLFQRNVLDSFYSYVPLSPKRKDQKGRLTIRDLKRELSTKYLTMKIQNHPIPQMLNITGRGTPSNRKKLEYDVKLKNIASWSKDVSGIFIRSLSISIMRSPHTDPKTNLEREKRICLPKFQEKSPNTSEMSKRDTLTIVKGEQNFTNTVPQDPQPFAVDKQQMQKLPNVKSEANLRSEMNKKYLKAQTKERIVPEHDVSRIIKKPDLRIIEQEEKILKRILTPTECPSMLEDPKLPKQRDQSEPVWDMTTQKVQQQKAFPGTVPIPPQVKSSEVKIVADSTNAEHLLPICEATKAISESQVKNMIQDKVSSDKLDNIQAYKPDDLKSPPFPEGPDTISTAIYPKTQHKSLLEQFTPKEKNKLTSHLESKALEIQLNLIPEMARKSLQMFNFYPKGTISKDNSWRFYSRHKTMNFMSLEGTDTIEPNSKHKHQKDSPLASNMKTLIVDVSSDSEETITKLQSINKLENGTSAVTSASEMLLPHTLQNHSVKEKGKLLMHFSVKTLEIQMKAFPRIVRESYAMTSAHERKKPLSNCIHPGFTGPKRQNRILLLSEEKSLHQIDLDLQYKYLRFLLGLPVGSTFPKPNVLPKHSKLNTIAVCKNVNAGGQSGSLSIDTELLEQHISFKKQSPHENSSLIRKFPQPTLVCASDRDLHSPRKKDTQVLSESEFHVTPEKNKQYHVWFQERNTCESVDLRTQRNATGSAVSCETQISEDFVDIQTDIESPADLDECSCLEVSESEECVFLEANSYLSQESENILFELQTGIPLENVYKITTDLKSFYSEDSGSHCTRECRKETLIITPPSCKSHKSRKYRSSSKMKSPDWLCHSSSNTAEIQSRSSSVSFSEEKISWTTKSRTSYSSAPLTESNIKSHLAKNQGKSHRHPESQERKKARSDLFRKNSSHWDHDYSCTHSKGKRDRKKRVYDYESERLDCFQSKHKSASKPHHDDINFYSERKQNRPFFFACVPADSLEVIPKTIRWTIPPETLRKRNFRIPLVAKISSSWNIWSSSKKLLGSLSGSLTTVFHS

SEQ ID NO: 15703 - protein, 246 aa, Homo sapiens
MLWRQLIYWQLLALFFLPFCLCQDEYMESPQTGGLPPDCSKCCHGDYSFRGYQGPPGPPGPPGIPGNHGNNGNNGATGHEGAKGEKGDKGDLGPRGERGQHGPKGEKGYPGIPPELQIAFMASLATHFSNQNSGIIFSSVETNIGNFFDVMTGRFGAPVSGVYFFTFSMMKHEDVEEVYVYLMHNGNTVFSMYSYEMKGKSDTSSNHAVLKLAKGDEVWLRMGNGALHGDHQRFSTFAGFLLFETK

SEQ ID NO: 15704 - protein, 198 aa, Homo sapiens
MLWRQLIYWQLLALFFLPFCLCQDEYMESPQTGGLPPDCSKCCHGNNGNNGATGHEGEKGYPGIPPELQIAFMASLATHFSNQNSGIIFSSVETNIGNFFDVMTGRFGAPVSGVYFFTFSMMKHEDVEEVYVYLMHNGNTVFSMYSYEMKGKSDTSSNHAVLKLAKGDEVWLRMGNGALHGDHQRFSTFAGFLLFETK

SEQ ID NO: 15705 - protein, 319 aa, Homo sapiens
MLWRQLIYWQLLALFFLPFCLCQDEYMEVSGRTNKVVARIVQSHQQTGRSGSRREKVRERSHPKTGTVDNNTSTDLKSLRPDELPHPEVDDLAQITTFWGQSPQTGGLPPDCSKCCHGDYSFRGYQGPPGPPGPPGIPGNHGNNGNNGATGHEGAKGEKGDKGDLGPRGERGQHGPKGEKGYPGIPPELQIAFMASLATHFSNQNSGIIFSSVETNIGNFFDVMTGRFGAPVSGVYFFTFSMMKHEDVEEVYVYLMHNGNTVFSMYSYEMKGKSDTSSNHAVLKLAKGDEVWLRMGNGALHGDHQRFSTFAGFLLFETK

SEQ ID NO: 15706 - protein, 715 aa, Homo sapiens
MSLDCTSHIALGAASPAPEETYDHLSEVPVTREQLNHYRNVAQNARSELAATLVKFECAQSELQDLRSKMLSKEVSCQELKAEMESYKENNARKSSLLTSLRDRVQELEEESAALSTSKIRTEITAHAAIKENQELKKKVVELNEKLQKCSKENEENKKQVSKNCRKHEEFLTQLRDCLDPDERNDKASDEDLILKLRDLRKENEFVKGQIVILEETINVHEMEAKASRETIMRLASEVNREQKKAASCTEEKEKLNQDLLSAVEAKEALEREVKIFQERLLAGQQVWDASKQEVSLLKKSSSELEKSLKASQDAVTTSQSQYFSFREKIAALLRGRLSMTGSTEDTILEKIREMDSREESRDRMVSQLEAQISELVEQLGKESGFHQKALQRAQKAENMLETLQGQLTHLEAELVSGGVLRDNLNFEKQKYLKFLDQLSQKMKLDQMAAELGFDMRLDVVLARTEQLVRLESNAVIENKTIAHNLQRKLKTQKERLESKELHMSLLRQKIAQLEEEKQARTALVVERDNAHLTIRNLQKKVERLQKELNTCRDLHTELKAKLADTNELKIKTLEQTKAIEDLNKSRDQLEKMKEKAEKKLMSVKSELDTTEHEAKENKERARNMIEVVTSEMKTLKKSLEEAEKREKQLADFREVVSQMLGLNVTSLALPDYEIIKCLERLVHSHQHHFVTCACLKDVTTGQERHPQGHLQLLH

SEQ ID NO: 15707 - protein, 487 aa, Homo sapiens
MPGPRVWGKYLWRSPHSKGCPGAMWWLLLWGVLQACPTRGSVLLAQELPQQLTSPGYPEPYGKGQESSTDIKAPEGFAVRLVFQDFDLEPSQDCAGDSVTISFVGSDPSQFCGQQGSPLGRPPGQREFVSSGRSLRLTFRTQPSSENKTAHLHKGFLALYQTVAVNYSQPISEASRGSEAINAPGDNPAKVQNHCQEPYYQAAAAGALTCATPGTWKDRQDGEEVLQCMPVCGRPVTPIAQNQTTLGSSRAKLGNFPWQAFTSIHGRGGGALLGDRWILTAAHTIYPKDSVSLRKNQSVNVFLGHTAIDEMLKLGNHPVHRVVVHPDYRQNESHNFSGDIALLELQHSIPLGPNVLPVCLPDNETLYRSGLLGYVSGFGMEMGWLTTELKYSRLPVAPREACNAWLQKRQRPEVFSDNMFCVGDETQRHSVCQGDSGSVYVVWDNHAHHWVATGIVSWGIGCGEGYDFYTKVLSYVDWIKGVMNGKN

SEQ ID NO: 15708 - protein, 229 aa, Homo sapiens
MQPLEVGLVPAPAGEPRLTRWLRRGSGILAHLVALGFTIFLTALSRPGTSLFSWHPVFMALAFCLCMAEAILLFSPEHSLFFFCSRKARIRLHWAGQTLAILCAALGLGFIISSRTRSELPHLVSWHSWVGALTLLATAVQALCGLCLLCPRAARVSRVARLKLYHLTCGLVVYLMATVTVLLGMYSVWFQAQIKGAAWYLCLALPVYPALVIMHQISRSYLPRKKMEM

SEQ ID NO: 15709 - protein, 133 aa, Homo sapiens
MQPLEVGLVPAPAGEPRLTRWLRRGSGILAHLVALGFTIFLTALSRPGTKTGPLMEDRSEGGRARWVMPEIPALWEADAGGSLEVFSPGTLYSWPWRSASAWLKPSYSSHLNTPCSSSAPEKHGSGSTGQGRP

SEQ ID NO: 15710 - protein, 251 aa, Homo sapiens
MQPLEVGLVPAPAGEPRLTRWLRRGSGILAHLVALGFTIFLTALSRPGTKTGPLMEDRSEGGRARWVMPEIPALWEADAGGSLEFCLCMAEAILLFSPEHSLFFFCSRKARIRLHWAGQTLAILCAALGLGFIISSRTRSELPHLVSWHSWVGALTLLATAVQALCGLCLLCPRAARVSRVARLKLYHLTCGLVVYLMATVTVLLGMYSVWFQAQIKGAAWYLCLALPVYPALVIMHQISRSYLPRKKMEM

SEQ ID NO: 15711 - protein, 128 aa, Homo sapiens
MQPLEVGLVPAPAGEPRLTRWLRRGSGILAHLVALGFTIFLTALSRPGTKTGPLMEDRSEGGRARWVMPEIPALWEADAGGSLEVFSPGTLYSWPWRMYESTSFFSGLQARHEAYWLSPMFTVLPLHG

SEQ ID NO: 15712 - protein, 172 aa, Homo sapiens
MQPLEFCLCMAEAILLFSPEHSLFFFCSRKARIRLHWAGQTLAILCAALGLGFIISSRTRSELPHLVSWHSWVGALTLLATAVQALCGLCLLCPRAARVSRVARLKLYHLTCGLVVYLMATVTVLLGMYSVWFQAQIKGAAWYLCLALPVYPALVIMHQISRSYLPRKKMEM

SEQ ID NO: 15713 - protein, 688 aa, Homo sapiens
MWCIVLFSLLAWVYAEPTMYGEILSPNYPQAYPSEVEKSWDIEVPEGYGIHLYFTHLDIELSENCAYDSVQIISGDTEEGRLCGQRSSNNPHSPIVEEFQVPYNKLQVIFKSDFSNEERFTGFAAYYVATDINECTDFVDVPCSHFCNNFIGGYFCSCPPEYFLHDDMKNCGVNCSGDVFTALIGEIASPNYPKPYPENSRCEYQIRLEKGFQVVVTLRREDFDVEAADSAGNCLDSLVFVAGDRQFGPYCGHGFPGPLNIETKSNALDIIFQTDLTGQKKGWKLRYHGDPMPCPKEDTPNSVWEPAKAKYVFRDVVQITCLDGFEVVEGRVGATSFYSTCQSNGKWSNSKLKCQPVDCGIPESIENGKVEDPESTLFGSVIRYTCEEPYYYMENGGGGEYHCAGNGSWVNEVLGPELPKCVPVCGVPREPFEEKQRIIGGSDADIKNFPWQVFFDNPWAGGALINEYWVLTAAHVVEGNREPTMYVGSTSVQTSRLAKSKMLTPEHVFIHPGWKLLEVPEGRTNFDNDIALVRLKDPVKMGPTVSPICLPGTSSDYNLMDGDLGLISGWGRTEKRDRAVRLKAARLPVAPLRKCKEVKVEKPTADAEAYVFTPNMICAGGEKGMDSCKGDSGGAFAVQDPNDKTKFYAAGLVSWGPQCGTYGLYTRVKNYVDWIMKTMQENSTPRED

SEQ ID NO: 15714 - protein, 935 aa, Homo sapiens [sequence omitted]

SEQ ID NO: 15715 - protein, 832 aa, Homo sapiens
MILQAHLHSLCLLMLYLATGYGQEGKFSGPLKPMTFSIYEGQEPSQIIFQFKANPPAVTFELTGETDNIFVIEREGLLYYNRALDRETRSTHNLQVAALDANGIIVEGPVPITIKVKDINDNRPTFLQSKYEGSVRQNSRPGKPFLYVNATDLDDPATPNGQLYYQIVIQLPMINNVMYFQINNKTGAISLTREGSQELNPAKNPSYNLVISVKDMGGQSENSFSDTTSVDIIVTENIWKAPKPVEMVENSTDPHPIKITQVRWNDPGAQYSLVDKEKLPRFPFSIDQEGDIYVTQPLDREEKDAYVFYAVAKDEYGKPLSYPLEIHVKVKDINDNPPTCPSPVTVFEVQENERLGNSIGTLTAHDRDEENTANSFLNYRIVEQTPKLPMDGLFLIQTYAGMLQLAKQSLKKQDTPQYNLTIEVSDKDFKTLCFVQINVIDINDQIPIFEKSDYGNLTLAEDTNIGSTILTIQATDADEPFTGSSKILYHIIKGDSEGRLGVDTDPHTNTGYVIIKKPLDFETAAVSNIVFKAENPEPLVFGVKYNASSFAKFTLIVTDVNEAPQFSQHVFQAKVSEDVAIGTKVGNVTAKDPEGLDISYSLRGDTRGWLKIDHVTGEIFSVAPLDREAGSPYRVQVVATEVGGSSLSSVSEFHLILMDVNDNPPRLAKDYTGLFFCHPLSAPGSLIFEATDDDQHLFRGPHFTFSLGSGSLQNDWEVSKINGTHARLSTRHTEFEEREYVVLIRINDGGRPPLEGIVSLPVTFCSCVEGSCFRPAGHQTGIPTVGMAVGILLTTLLVIGIILAVVFIRIKKDKGKDNVESAQASEVKPLRS

SEQ ID NO: 15716 - protein, 978 aa, Homo sapiens
MGTRLPLVLRQLRRPPQPPGPPRRLRVPCRASSGGGGGGGGGREGLLGQRRPQDGQARSSCSPGGRTPAARDSIVREVIQNSKEVLSLLQEKNPAFKPVLAIIQAGDDNLMQEINQNLAEEAGLNITHICLPPDSSEAEIIDEILKINEDTRVHGLALQISENLFSNKVLNALKPEKDVDGVTDINLGKLVRGDAHECFVSPVAKAVIELLEKSGVNLDGKKILVVGAHGSLEAALQCLFQRKGSMTMSIQWKTRQLQSKLHEADIVVLGSPKPEEIPLTWIQPGTTVLNCSHDFLSGKVGCGSPRIHFGGLIEEDDVILLAAALRIQNMVSSGRRWLREQQHRRWRLHCLKLQPLSPVPSDIEISRGQTPKAVDVLAKEIGLLADEIEIYGKSKAKVRLSVLERLKDQADGKYVLVAGITPTPLGEGKSTVTIGLVQALTAHLNVNSFACLRQPSQGPTFGVKGGAAGGGYAQVIPMEEFNLHLTGDIHAITAANNLLAAAIDTRILHENTQTDKALYNRLVPLVNGVREFSEIQLARLKKLGINKTDPSTLTEEEVSKFARLDIDPSTITWQRVLDTNDRFLRKITIGQGNTEKGHYRQAQFDIAVASEIMAVLALTDSLADMKARLGRMVVASDKSGQPVTADDLGVTGALTVLMKDAIKPNLMQTLEGTPVFVHAGPFANIAHGNSSVLADKIALKLVGEEGFVVTEAGFGADIGMEKFFNIKCRASGLVPNVVVLVATVRALKMHGGGPSVTAGVPLKKEYTEENIQLVADGCCNLQKQIQITQLFGVPVVVALNVFKTDTRAEIDLVCELAKRAGAFDAVPCYHWSVGGKGSVDLARAVREAASKRSRFQFLYDVQVPIVDKIRTIAQAVYGAKDIELSPEAQAKIDRYTQQGFGNLPICMAKTHLSLSHQPDKKGVPRDFILPISDVRASIGAGFIYPLVGTMSTMPGLPTRPCFYDIDLDTETEQVKGLF

SEQ ID NO: 15717 - protein, 275 aa, Homo sapiens
MGTRLPLVLRQLRRPPQPPGPPRRLRVPCRASSGGGGGGGGGREGLLGQRRPQDGQARSSCSPGGRTPAARDSIVREVIQNSKEVLSLLQEKNPAFKPVLAIIQAGDDNLMQEINQNLAEEAGLNITHICLPPDSSEAEIIDEILKINEDTRVHGLALQISENLFSNKVLNALKPEKDVDGVTDINLGKLVRGDAHECFVSPVAKAVIELLEKSGVNLDGKKILVVGAHGSLEAALQCLFQRKGSMTMSIQWKTRQLQSKTESRSVTRLECRRVI

SEQ ID NO: 15718 - protein, 801 aa, Homo sapiens
MWTSGRMSNAKNWLGLGMSLYFWGLMDLTTTVLSDTPTPQGELEALLSDKPQSHQRTKRSWVWNQFFVLEEYTGTDPLYVGKLHSDMDRGDGSIKYILSGEGAGIVFTIDDTTGDIHAIQRLDREERAQYTLRAQALDRRTGRPMEPESEFIIKIQDINDNEPKFLDGPYVATVPEMSPVGTSVIQVTATDADDPTYGNSARVVYSILQGQPYFSVDSKTGVIRTALMNMDREAKEYYEVIIQAKDMGGQLGGLAGTTTVNITLSDVNDNPPRFPQKHYQMSVLESAPISSTVGRVFAKDLDEGINAEMKYTIVDGDGADAFDISTDPNFQVGIITVKKPLSFESKKSYTLKVEGANPHLEMRFLNLGPFQDTTTVHISVEDVDEPPVFEPGFYFVEVPEDVAIGTTIQIISAKDPDVTNNSIRYSIDRSSDPGRFFYVDITTGALMTARPLDREEFSWHNITVLAMEMNNPSQVGSVPVTIKVLDVNDNAPEFPRFYEAFVCENAKAGQLIQTVSAVDQDDPRNGQHFYYSLAPEAANNPNFTIRDNQDNTARILTRRSGFRQQEQSVFHLPILIADSGQPVLSSTGTLTIQVCSCDDDGHVMSCSPEAYMLPVSLSRGALIAILACIFVLLVLVLLILSMRRHRKQPYIIDDEENIHENIVRYDDEGGGEEDTEAFDIAAMWNPREAQAGAAPKTRQDMLPEIESLSRYVPQTCAVNSTVHSYVLAKLYEADMDLWAPPFDSLQTYMFEGDGSVAGSLSSLQSATSDSEQSFDFLTDWGPRFRKLAELYGASEGPAPLW

SEQ ID NO: 15719 - protein, 350 aa, Homo sapiens
MDSFNYTTPDYGHYDDKDTLDLNTPVDKTSNTLRVPDILALVIFAVVFLVGVLGNALVVWVTAFEAKRTINAIWFLNLAVADFLSCLALPILFTSIVQHHHWPFGGAACSILPSLILLNMYASILLLATISADRFLLVFKPIWCQNFRGAGLAWIACAVAWGLALLLTIPSFLYRVVREEYFPPKVLCGVDYSHDKRRERAVAIVRLVLGFLWPLLTLTICYTFILLRTWSRRATRSTKTLKVVVAVVASFFIFWLPYQVTGIMMSFLEPSSPTFLLLKKLDSLCVSFAYINCCINPIIYVVAGQGFQGRLRKSLPSLLRNVLTEESVVRESKSFTRSTVDTMAQKTQAV

SEQ ID NO: 15720 - protein, 305 aa, Homo sapiens
MDMFQKVEKIGEGTYGVVYKAKNRETGQLVALKKIRLDLEMEGVPSTAIREISLLKELKHPNIVRLLDVVHNERKLYLVFEFLSQDLKKYMDSTPGSELPLHLIKSYLFQLLQGVSFCHSHRVIHRDLKPQNLLINELGAIKLADFGLARAFGVPLRTYTHEVVTLWYRAPEILLGSKFYTTAVDIWSIGCIFAEMVTRKALFPGDSEIDQLFRIFRMLGTPSEDTWPGVTQLPDYKGSFPKWTRKGLEEIVPNLEPEGRDLLMQLLQYDPSQRITAKTALAHPYFSSPEPSPAARQYVLQRFRH

SEQ ID NO: 15721 - protein, 583 aa, Homo sapiens
MESKGASSCRLLFCLLISATVFRPGLGWYTVNSAYGDTIIIPCRLDVPQNLMFGKWKYEKPDGSPVFIAFRSSTKKSVQYDDVPEYKDRLNLSENYTLSISNARISDEKRFVCMLVTEDNVFEAPTIVKVFKQPSKPEIVSKALFLETEQLKKLGDCISEDSYPDGNITWYRNGKVLHPLEGAVVIIFKKEMDPVTQLYTMTSTLEYKTTKADIQMPFTCSVTYYGPSGQKTIHSEQAVFDIYYPTEQVTIQVLPPKNAIKEGDNITLKCLGNGNPPPEEFLFYLPGQPEGIRSSNTYTLTDVRRNATGDYKCSLIDKKSMIASTAITVHYLDLSLNPSGEVTRQIGDALPVSCTISASRNATVVWMKDNIRLRSSPSFSSLHYQDAGNYVCETALQEVEGLKKRESLTLIVEGKPQIKMTKKTDPSGLSKTIICHVEGFPKPAIQWTITGSGSVINQTEESPYINGRYYSKIIISPEENVTLTCTAENQLERTVNSLNVSAISIPEHDEADEISDENREKVNDQAKLIVGIVVGLLLAALVAGVVYWLYMKKSKTASKHVNKDLGNMEENKKLEENNHKTEA

SEQ ID NO: 15722 - protein, 570 aa, Homo sapiens
MESKGASSCRLLFCLLISATVFRPGLGWYTVNSAYGDTIIIPCRLDVPQNLMFGKWKYEKPDGSPVFIAFRSSTKKSVQYDDVPEYKDRLNLSENYTLSISNARISDEKRFVCMLVTEDNVFEAPTIVKVFKQPSKPEIVSKALFLETEQLKKLGDCISEDSYPDGNITWYRNGKVLHPLEGAVVIIFKKEMDPVTQLYTMTSTLEYKTTKADIQMPFTCSVTYYGPSGQKTIHSEQAVFDIYYPTEQVTIQVLPPKNAIKEGDNITLKCLGNGNPPPEEFLFYLPGQPEGIRSSNTYTLTDVRRNATGDYKCSLIDKKSMIASTAITVHYLDLSLNPSGEVTRQIGDALPVSCTISASRNATVVWMKDNIRLRSSPSFSSLHYQDAGNYVCETALQEVEGLKKRESLTLIVEGKPQIKMTKKTDPSGLSKTIICHVEGFPKPAIQWTITGSGSVINQTEESPYINGRYYSKIIISPEENVTLTCTAENQLERTVNSLNVSANENREKVNDQAKLIVGIVVGLLLAALVAGVVYWLYMKKSKTASKHVNKDLGNMEENKKLEENNHKTEA

SEQ ID NO: 15723 - protein, 133 aa, Homo sapiens
MESKGASSCRLLFCLLISATVFRPGLGWYTVNSAYGDTIIIPCRLDVPQNLMFGKWKYEKPDGSPVFIAFRSSTKKSVQYDDVPEYKDRLNLSENYTLSISNARISDEKRFVCMLVTEDNVFEAPTIVKVFSK

SEQ ID NO: 15724 - protein, 305 aa, Homo sapiens
MDPVTQLYTMTSTLEYKTTKADIQMPFTCSVTYYGPSGQKTIHSEQAVFDIYYLDLSLNPSGEVTRQIGDALPVSCTISASRNATVVWMKDNIRLRSSPSFSSLHYQDAGNYVCETALQEVEGLKKRESLTLIVEGKPQIKMTKKTDPSGLSKTIICHVEGFPKPAIQWTITGSGSVINQTEESPYINGRYYSKIIISPEENVTLTCTAENQLERTVNSLNVSAISIPEHDEADEISDENREKVNDQAKLIVGIVVGLLLAALVAGVVYWLYMKKSKTASKHVNKDLGNMEENKKLEENNHKTEA

SEQ ID NO: 15725 - protein, 701 aa, Homo sapiens
MVVSTFTDMDTFPNNFPPGGDSGLTGSQSEFQKMLIDERLRCEHHKANYQTLKAEHTRLQNEHVKLQNELKHLFNEKQTQQEKLQLLLEELRGELVEKTKDLEEMKLQILTPQKLELLRAQIQQELETPMRERFRNLDEEVEKYRAVYNKLRYEHTFLKSEFEHQKEEYARILDEGKIKYESEIARLEEDKEELRNQLLNVDLTKDSKRVEQLAREKVYLCQKLKGLEAEVAELKAEKENSEAQVENAQRIQVRQLAEMQATVRSLEAEKQSANLRAERLEKELQSSSEQNTFLINKLHKAEREINTLSSKVKELKHSNKLEITDIKLETARAKSELERERNKIQSELDGLQSDNEILKAAVEHHKVLLVEKDRELIRKVQAAKEEGYQKLVVLQDEKLELENRLADLEKMKVEHDVWRQSEKDQYEEKLRASQMAEEITRKELQSVRLKLQQQIVTIENAEKEKNENSDLKQQISSLQIQVTSLAQSENDLLNSNQMLKEMVERLKQECRNFRSQAEKAQLEAEKTLEEKQIQWLEEKHKLHERITDREEKYNQAKEKLQRAAIAQKKRKSLHENKLKRLQEKVEVLEAKKEELETENQVLNRQNVPFEDYTRLQKRLKDIQRRHNEFRSLILVPNMPPTASINPVSFQSSAMVPSMELPFPPHMQEEQHQRELSLLRKRLEELETTQRKQLEELGSSGE

SEQ ID NO: 15726 - protein, 576 aa, Homo sapiens
MLIDERLRCEHHKANYQTLKAEHTRLQNEHVKLQNELKHLFNEKQTQQEKLQLLLEELRGELVEKTKDLEEMKLQILTPQKLELLRAQIQQELETPMRERFRNLDEEVEKYRAVYNKLRYEHTFLKSEFEHQKEEYARILDEGKIKYESEIARLEEDKEELRNQLLNVDLTKDSKRVEQLAREKVYLCQKLKGLEAEVAELKAEKENSEAQVENAQRIQVRQLAEMQATVRSLEAEKQSANLRAERLEKELQSSSEQNTFLINKLHKAEREINTLSSKVKELKHSNKLEITDIKLETARAKSELERERNKIQSELDGLQSDNEILKAAVEHHKVLLVEKDRELIRKVQAAKEEGYQKLVVLQDEKLELENRLADLEKMKVEHDVWRQSEKDQYEEKLRASQMAEEITRKELQSVRLKLQQQIVTIENAEKEKNENSDLKQQISSLQIQVTSLAQSENDLLNSNQMLKEMVERLKQECRNFRSQAEKAQLEAEKTLEEKQIQWLEEKHKLHERITDREEKYNQAKEKLQRAAIAQKKLEQDLELGCPSVTDTYRESVFPPPPLKRDLLKEELGSSGE

SEQ ID NO: 15727 - protein, 126 aa, Homo sapiens
MSYKPIAPAPSSTPGSSTPGPGTPVPTGSVPSPSGSVPGAGAPFRPLFNDFGPPSMGYVQAMKPPGAQGSQSTYTDLLSVIEEMGKEIRPTYAGSKSAMERLKRGIIHARALVRECLAETERNART

SEQ ID NO: 15728 - protein, 297 aa, Homo sapiens
MTTPRNSVNGTFPAEPMKGPIAMQSGPKPLFRRMSSLVGPTQSFFMRESKTLGAVQIMNGLFHIALGGLLMIPAGIYAPICVTVWYPLWGGIMYIISGSLLAATEKNSRKCLVKGKMIMNSLSLFAAISGMILSIMDILNIKISHFLKMESLNFIRAHTPYINIYNCEPANPSEKNSPSTQYCYSIQSLFLGILSVMLIFAFFQELVIAGIVENEWKRTCSRPKSNIVLLSAEEKKEQTIEIKEEVVGLTETSSQPKNEEDIEIIPIQEEEEEETETNFPEPPQDQESSPIENDSSP

SEQ ID NO: 15729 - protein, 130 aa, Homo sapiens
MTTPRNSVNGTFPAEPMKGPIAMQSGPKPLFRRMSSLELVIAGIVENEWKRTCSRPKSNIVLLSAEEKKEQTIEIKEEVVGLTETSSQPKNEEDIEIIPIQEEEEEETETNFPEPPQDQESSPIENDSSP

SEQ ID NO: 15730 - protein, 156 aa, Homo sapiens
MEPAAGSSMEPSADWLATAAARGRVEEVRALLEAGALPNAPNSYGRRPIQVMMMGSARVAELLLLHGAEPNCADPATLTRPVHDAAREGFLDTLVVLHRAGARLDVRDAWGRLPVDLAEELGHRDVARYLRAAAGGTRGSNHARIDAAEGPSDIPD

SEQ ID NO: 15731 - protein, 105 aa, Homo sapiens
MMMGSARVAELLLLHGAEPNCADPATLTRPVHDAAREGFLDTLVVLHRAGARLDVRDAWGRLPVDLAEELGHRDVARYLRAAAGGTRGSNHARIDAAEGPSDIPD

SEQ ID NO: 15732 - protein, 116 aa, Homo sapiens
MEPAAGSSMEPSADWLATAAARGRVEEVRALLEAGALPNAPNSYGRRPIQVGRGSAAGAGDGGRLWRTKFAGELESGSASILRKKGRLPGEFSEGVCNHRPPPGDALGAWEAKEEE

SEQ ID NO: 15733 - protein, 167 aa, Homo sapiens
MEPAAGSSMEPSADWLATAAARGRVEEVRALLEAGALPNAPNSYGRRPIQVMMMGSARVAELLLLHGAEPNCADPATLTRPVHDAAREGFLDTLVVLHRAGARLDVRDAWGRLPVDLAEELGHRDVARYLRAAAGGTRGSNHARIDAAEGPSEMIGNHLWVCRSRHA

SEQ ID NO: 15734 - protein, 449 aa, Homo sapiens
MSDIRHSLLRRDALSAAKEVLYHLDIYFSSQLQSAPLPIVDKGPVELLEEFVFQVPKERSAQPKRLNSLQELQLLEIMCNYFQEQTKDSVRQIIFSSLFSPQGNKADDSRMSLLGKLVSMAVAVCRIPVLECAASWLQRTPVVYCVRLAKALVDDYCCLVPGSIQTLKQIFSASPRFCCQFITSVTALYDLSSDDLIPPMDLLEMIVTWIFEDPRLILITFLNTPIAANLPIGFLELTPLVGLIRWCVKAPLAYKRKKKPPLSNGHVSNKVTKDPGVGMDRDSHLLYSKLHLSVLQVLMTLQLHLTEKNLYGRLGLILFDHMVPLVEEINRLADELNPLNASQEIELSLDRLAQALQVAMASGALLCTRDDLRTLCSRLPHNNLLQLVISGPVQQSPHAALPPGFYPHIHTPPLGYGAVPAHPAAHPALPTHPGHTFISGVTFPFRPIR

SEQ ID NO: 15735 - protein, 352 aa, Homo sapiens
MSDIRHSLLRRDALSAAKEVLYHLDIYFSSQLQSAPLPIVDKGPVELLEEFVFQVPKERSAQPKEQTKDSVRQIIFSSLFSPQGNKADDSRMSLLGKLVSMAVAVCRIPVLECAASWLQRTPVVYCVRLAKALVDDYCCLVPGSIQTLKQIFSASPRFCCQFITSVTALYDLSSDDLIPPMDLLEMIVTWIFEDPSVLQVLMTLQLHLTEKNLYGRLGLILFDHMVPLVEEINRLADELNPLNASQEIELSLDRLAQALQVAMASGALLCTRDDLRTLCSRLPHNNLLQLVISGPVQQSPHAALPPGFYPHIHTPPLGYGAVPAHPAAHPALPTHPGHTFISGVTFPFRPIR

SEQ ID NO: 15736 - protein, 224 aa, Homo sapiens
MSILLPNMAEFDTISELEEEEEEEAATSSSSPSSSSSVSGPDDDEEDEEEEEEEEEEEEEEEEEEEEEAPPPPRVVSEEHLRRYAPDPVLVRGAGHITVFGLSNKFDTEFPSVLTGKVAPEEFKTSIGRVNACLKKALPVNVKWLLCGCLCCCCTLGCSLWPVICLNKRTRRSIQKLIEWENNRLYHKLALHWKLTKRKCETSNMMEYVILIEFLPKYPIFRPD

SEQ ID NO: 15737 - protein, 204 aa, Homo sapiens
MSILLPNMAEFDTISELEEEEEEEAATSSSSPSSSSSVSGPDDDEEDEEEEEEEEEEEEEEEEEEEEEAPPPPRVVSEEHLRRYAPDPVLVRGAGHITVFGLSNKFDTEFPSVLTGKVAPEEFKTSIGRVNACLKKALPVNVKWLLCGCLCCCCTLGCSLWPVICLNKRTRRSIQKLIEWENNRLYHKVILIEFLPKYPIFRPD

SEQ ID NO: 15738 - protein, 102 aa, Homo sapiens
MREIAEILPAQEKVEARIDLKMGKKRVTDHKLNVDKVIKNINTISSELKKIKELSQLLLCDLILHFNHPIKTENLAEAERNNPLFEESKISDVSLVSNSFSI

SEQ ID NO: 15739 - protein, 261 aa, Homo sapiens
MIETYNQTSPRSAATGLPISMKIFMYLLTVFLITQMIGSALFAVYLHRRLDKIEDERNLHEDFVFMKTIQRCNTGERSLSLLNCEEIKSQFEGFVKDIMLNKEETKKENSFEMQKGDQNPQIAAHVISEASSKTTSVLQWAEKGYYTMSNNLVTLENGKQLTVKRQGLYYIYAQVTFCSNREASSQAPFIASLCLKSPGRFERILLRAANTHSSAKPCGQQSIHLGGVFELQPGASVFVNVTDPSQVSHGTGFTSFGLLKL

SEQ ID NO: 15740 - protein, 294 aa, Homo sapiens
MAAAVSSVVRRVEELGDLAQAHIQQLSEAAGEDDHFLIRASAALEKLKLLCGEEKECSNPSNLLELYTQAILDMTYFEENKLVDEDFPEDSSSQKVKELISFLSEPEILVKENNMHPKHCNLLGDELLECLSWRRGALLYMYCHSLTKRREWLLRKSSLLKKYLLDGISYLLQMLNYRCPIQLNEGVSFQDLDTAKLLSAGIFSDIHLLAMMYSGEMCYWGSKYCADQQPENHEVDTSVSGAGCTTYKEPLDFREVGEKILKKYVSVCEGPLKEQEWNTTNAKQILNFFHHRCN

SEQ ID NO: 15741 - protein, 353 aa, Homo sapiens
MPRAQLPEDSSAVDMDILFPLDSVIGTELCPSPIPQIIHFVLFVVFSLVILIILRLYIPREPSSVPPREEDSENDQAEVGEWLRIGNKYITLKDYRILLKELENLEIYTFLSKKCLKKLSREGSSHHLPRQVRPGPVYKPAPARNHRPRGGRGKASPTSFHVSPRAPLAPLASMPSSVPKTSVESLGSPSSLSSSKPREPLCPLKHPSHQPPASTLSPNPTSSTESLGYLSSLSSSQPPEPLRPLKHPSHKPRGRSLPRRRNPGWVSWSDSMQADSETDTIICPMCKAPERSCPHTWWVPSSPRVIRGVGRCSDPNLGLSWRQEAARAWCHCTSSQFPFKHPNLPTHLPKASF

SEQ ID NO: 15742 - protein, 281 aa, Homo sapiens
MPRAQLPEDSSAVDMDILFPLDSVIGTELCPSPIPQIIHFVLFVVFSLVILIILRLYIPREPSSVPPREEDSENDQAEVGEWLRIGNKYITLKDYRILLKELENLEIYTFLSKKCLKKLSREGSSHHLPRQVRPGPVYKPAPARNHRPRGGRGKASPTSFHVSPRAPLAPLASMPSSVPKTSVESLGSPSSLSSSKPREPLCPLKHPSHQPPASTLSPNPTSSTESLGLPSRETPHAGRWRQGSRFPQPGCANAAGRIRHQNPRHSHGHRISDIHEQLGIS

SEQ ID NO: 15743 - protein, 237 aa, Homo sapiens
MPRAQLPEDSSAVDMDILFPLDSVIGTELCPSPIPQIIHFVLFVVFSLVILIILRLYIPREPSSVPPREEDSENDQAEVGEWLRIGNKYITLKDYRILLKELENLEIYTFLSKKCLKKLSREGSSHHLPRQVRPGPVYKPAPARNHRPRGGRGKASPTSFHVSPRAPLAPLASMPSSVPKTSVESLGSPSSLSSSKPREPLCPLKHPSHQPPASTLSPNPTSSTESLGLDVPTLLDA

SEQ ID NO: 15744 - protein, 277 aa, Homo sapiens
MPRAQLPEDSSAVDMDILFPLDSVIGTELCPSPIPQIIHFVLFVVFSLVILIILRLYIPREPSSVPPREEDSENDQAEVGEWLRIGNKYITLKDYRILLKELENLEIYTFLSKKCLKKLSREGSSHHLPRQVRPGPVYKPAPARNHRPRGGRGKASPTSFHVSPRAPLAPLASMPSSVPKTSVESLGSPSSLSSSKPREPLCPLKHPSHQPPASTLSPNPTSSTESLGETPHAGRWRQGSRFPQPGCANAAGRIRHQNPRHSHGHRISDIHEQLGIS

SEQ ID NO: 15745 - protein, 1460 aa, Homo sapiens
MAGRPLRIGDQLVLEEDYDETYIPSEQEILEFAREIGIDPIKEPELMWLAREGIVAPLPGEWKPCQDITGDIYYFNFANGQSMWDHPCDEHYRSLVIQERAKLSTSGAIKKKKKKKEKKDKKDRDPPKSSLALGSSLAPVHVPLGGLAPLRGLVDTPPSALRGSQSVSLGSSVESGRQLGELMLPSQGLKTSAYTKGLLGSIYEDKTALSLLGLGEETNEEDEEESDNQSVHSSSEPLRNLHLDIGALGGDFEYEESLRTSQPEEKKDVSLDSDAAGPPTPCKPSSPGADSSLSSAVGKGRQGSGARPGLPEKEENEKSEPKICRNLVTPKADPTGSEPAKASEKEAPEDTVDAGEEGSRREEAAKEPKKKASALEEGSSDASQELEISEHMKEPQLSDSIASDPKSFHGLDFGFRSRISEHLLDVDVLSPVLGGACRQAQQPLGIEDKDDSQSSQDELQSKQSKGLEERLSPPLPHEERAQSPPRSLATEEEPPQGPEGQPEWKEAEELGEDSAASLSLQLSLQREQAPSPPAACEKGKEQHSQAEELGPGQEEAEDPEEKVAVSPTPPVSPEVRSTEPVAPPEQLSEAALKAMEEAVAQVLEQDQRHLLESKQEKMQQLREKLCQEEEEEILRLHQQKEQSLSSLRERLQKAIEEEEARMREEESQRLSWLRAQVQSSTQADEDQIRAEQEASLQKLREELESQQKAERASLEQKNRQMLEQLKEEIEASEKSEQAALNAAKEKALQQLREQLEGERKEAVATLEKEHSAELERLCSSLEAKHREVVSSLQKKIQEAQQKEEAQLQKCLGQVEHRVHQKSYHVAGYEHELSSLLREKRQEVEGEHERRLDKMKEEHQQVMAKAREQYEAEERKQRAELLGHLTGELERLQRAHERELETVRQEQHKRLEDLRRRHREQERKLQDLELDLETRAKDVKARLALLEVQEETARREKQQLLDVQRQVALKSEEATATHQQLEEAQKEHTHLLQSNQQLREILDELQARKLKLESQVDLLQAQSQQLQKHFSSLEAEAQKKQHLLREVTVEENNASPHFEPDLHIEDLRKSLGTNQTKEVSSSLSQSKEDLYLDSLSSHNVWHLLSAEGVALRSAKEFLVQQTRSMRRRQTALKAAQQHWRHELASAQEVAKDPPGIKALEDMRKNLEKETRHLDEMKSAMRKGHNLLKKKEEKLNQLESSLWEEASDEGTLGGSPTKKAVTFDLSDMDSLSSESSESFSPPHREWWRQQRIDSTPSLTSRKIHGLSHSLRQISSQLSSVLSILDSLNPQSPPPLLASMPAQLPPRDPKSTPTPTYYGSLARFSALSSATPTSTQWAWDSGQGPRLPSSVAQTVDDFLLEKWRKYFPSGIPLLSNSPTPLESRLGYMSASEQLRLLQHSHSQVPEAGSTTFQGIIEANRRWLERVKNDPRLPLFSSTPKPKATLSLLQLGLDEHNRVKVYRF

SEQ ID NO: 15746 - protein, 1455 aa, Homo sapiens
MAGRPLRIGDQLVLEEDYDETYIPSEQEILEFAREIGIDPIKEPELMWLAREGIVAPLPGEWKPCQDITGDIYYFNFANGQSMWDHPCDEHYRSLVIQERAKLSTSGAIKKKKKKKEKKDKKDRDPPKSSLALGSSLAPVHVPLGGLAPLRGLVDTPPSALRGSQSVSLGSSVESGRQLGELMLPSQGLKTSAYTKGLLGSIYEDKTALSLLGLGEETNEEDEEESDNQSVHSSSEPLRNLHLDIGALGGDFEYEESLRTSQPEEKKDVSLDSDAAGPPTPCKPSSPGADSSLSSAVGKGRQGSGARPGLPEKEENEKSEPKICRNLVTPKADPTGSEPAKASEKEAPEDTVDAGEEGSRREEAAKEPKKKASALEEGSSDASQELEISEHMKEPQLSDSIASDPKSFHGLDFGFRSRISEHLLDVDVLSPVLGGACRQAQQPLGIEDKDDSQSSQDELQSKQSKGLEERYHRLSPPLPHEERAQSPPRSLATEEEPPQGPEGQPEWKEAEELGEDSAASLSLQLSLQREQAPSPPAACEKGKEQHSQAEELGPGQEEAEDPEEKVAVSPTPPVSPEVRSTEPVAPPEQLSEAALKAMEEAVAQVLEQDQRHLLESKQEKMQQLREKLCQEEEEEILRLHQQKEQSLSSLRERLQKAIEEEEARMREEESQRLSWLRAQVQSSTQADEDQIRAEQEASLQKLREELESQQKAERASLEQKNRQMLEQLKEEIEASEKSEQAALNAAKEKALQQLREQLEGERKEAVATLEKEHSAELERLCSSLEAKHREVVSSLQKKIQEAQQKEEAQLQKCLGQVEHRVHQKSYHVAGYEHELSSLLREKRQEVEGEHERRLDKMKEEHQQVMAKAREQYEAEERKQRAELLGHLTGELERLQRAHERELETVRQEQHKRLEDLRRRHREQERKLQDLELDLETRAKDVKARLALLEVQEETARREKQQLLDVQRQVALKSEEATATHQQLEEAQKEHTHLLQSNQQLREILDELQARKLKLESQVDLLQAQSQQLQKHFSSLEAEAQKKQHLLREVTVEENNASPHFEPDLHIEDLRKSLGTNQTKEVSSSLSQSKEDLYLDSLSSHNVWHLLSAEGVALRSAKEFLVQQTRSMRRRQTALKAAQQHWRHELASAQEVAKDPPGIKALEDMRKNLEKETRHLDEMKSAMRKGHNLLKKKEEKLNQLESSLWEEASDEGTLGGSPTKKAVTFDLSDMDSLSSESSESFSPPHLDSTPSLTSRKIHGLSHSLRQISSQLSSVLSILDSLNPQSPPPLLASMPAQLPPRDPKSTPTPTYYGSLARFSALSSATPTSTQWAWDSGQGPRLPSSVAQTVDDFLLEKWRKYFPSGIPLLSNSPTPLESRLGYMSASEQLRLLQHSHSQVPEAGSTTFQGIIEANRRWLERVKNDPRLPLFSSTPKPKATLSLLQLGLDEHNRVKVYRF

SEQ ID NO: 15747 - protein, 542 aa, Homo sapiens
MPRRGLILHTRTHWLLLGLALLCSLVLFMYLLECAPQTDGNASLPGVVGENYGKEYYQALLQEQEEHYQTRATSLKRQIAQLKQELQEMSEKMRSLQERRNVGANGIGYQSNKEQAPSDLLEFLHSQIDKAEVSIGAKLPSEYGVIPFESFTLMKVFQLEMGLTRHPEEKPVRKDKRDELVEVIEAGLEVINNPDEDDEQEDEEGPLGEKLIFNENDFVEGYYRTERDKGTQYELFFKKADLTEYRHVTLFRPFGPLMKVKSEMIDITRSIINIIVPLAERTEAFVQFMQNFRDVCIHQDKKIHLTVVYFGKEGLSKVKSILESVTSESNFHNYTLVSLNEEFNRGRGLNVGARAWDKGEVLMFFCDVDIYFSAEFLNSCRLNAEPGKKVFYPVVFSLYNPAIVYANQEVPPPVEQQLVHKKDSGFWRDFGFGMTCQYRSDFLTIGGFDMEVKGWGGEDVHLYRKYLHGDLIVIRTPVPGLFHLWHEKRCADELTPEQYRMCIQSKAMNEASHSHLGMLVFREEIETHLHKQAYRTNSEAVG

SEQ ID NO: 15748 - protein, 333 aa, Homo sapiens
MPRRGLILHTRTHWLLLGLALLCSLVLFMYLLECAPQTDGNASLPGVVGENYGKEYYQALLQEQEEHYQTRATSLKRQIAQLKQELQEMSEKMRSLQERRNVGANGIGYQSNKEQAPSDLLEFLHSQIDKAEVSIGAKLPSEYGVIPFESFTLMKVFQLEMGLTRHPEEKPVRKDKRDELVEVIEAGLEVINNPDEDDEQEDEEGPLGEKLIFNENDFVEGYYRTERDKGTQYELFFKKADLTEYRHVTLFRPFGPLMKVKSEMIDITRSIINIIVPLAERTEAFVQFMQNFRDVCIHQDKKIHLTVVYFGKEGLSKVKSILESVTRLASSTW

SEQ ID NO: 15749 - protein, 191 aa, Homo sapiens
MAAPRGRAAPWTTALLLLLASQVLSPGSCADEEEVPEEWVLLHVVQGQIGAGNYSYLRLNHEGKIVLRMRSLKGDADLYVSASSLHPSFDDYELQSATCGPDAVSIPAHFRRPVGIGVYGHPSHLESEFEMKVYYDGTVEQHPFGEAAYPADGADAGQKHAGAPEDASQEEESVLWTILISILKLVLEILF

SEQ ID NO: 15750 - protein, 130 aa, Homo sapiens
MRPGSSPRAPECGAPALPRPQLDRLPARPAPSRGRGAPSLRWPAKEVGPRPQIPATCEPGKVCGASAGRRDAARPSRPRSSRVTFSTRRQPGPQRGRWGLRGGPESVRGLPHLGLRISGTPLGIFSSWSL

SEQ ID NO: 15751 - protein, 359 aa, Homo sapiens
MNLNPPTSALQIEGKGSHIMARNVSCFLVRHTPHPRRVCHIKGLNNIPICTVNDDENAFGTLWGVGQSNYLEKNRIPFANCSYPSSTAVQESPVRGMSPAPNGAKVPPRPHSEPSRKIKECFKTSSENPLVIKKEEIKAKRPPSPPKACSTPGSCSSGMTSTKNDVKANTICIPNYLDQEIKILAKLCSILHTDSLAEVLQWLLHATSKEKEWVSALIHSELAEINLLTHHRRNTSMEPAAETGKPPTVKSPPTVKLPPNFTAKSKVLTRDTEGDQPTRVSSQGSEENKEVPKEAEHKPPLLIRRNNMKIPVAEYFSKPNSPPRPNTQESGSAKPVSARSIQEYNLCPQRACYPSTHRR

SEQ ID NO: 15752 - protein, 186 aa, Homo sapiens
MNLNPPTSALQIEGKGSHIMARNVSCFLVRHTPHPRRVCHIKGLNNIPICTVNDDENAFGTLWGVGQSNYLEKNRIPFANCSYPSSTAVQESPVRGMSPAPNGAKVPPRPHSEPSRKIKECFKTSSENPLVIKKEEIKAKRPPSPPKACSTPGSCSSGMTSTKNDVKANTICIPNYLDQEIKATLL

SEQ ID NO: 15753 - protein, 146 aa, Homo sapiens
MATFHRAHATSSVKPRARRHQEPNSGDWPGSYRAGTRCSAIGFRLLHSPQHWRPRSLGAGQGREDPSWEGGALGDLKALWDQPCQPPPWVQLQLSSAYGARQQRWQLSTLPEPPAARTPGQMPQQRLIRAAGPSAAGGGNQWLSPM

SEQ ID NO: 15754 - protein, 314 aa, Homo sapiens
MGCRCCKIIQSYLFDPVQVPSPGYVNEVNSCKLDEDDTDKLKGKWSSEVLVQKNDPQRQGSKKTESSSRTADPWEPCWPHQGPLPQGDAGGEHHACGVNGIGPAATPQPTGNSSPTQDDRGSWASTANTVPPTQPFLEGGGTRKQDCVLLASEGTQVMRNGDSRAPSEAESFALEVQDHVFQIPAPDYLQHWGPAGDNVDHNEKDCVFKNHTEDESLEGIQPPVGEHGLNTPFSVRRSWDSLNEDVETEVLSICFNEKGPVHAMPVVDSGNRQEDTHGSDGDGDGEIVDEDAAVAEALAALEAATAGEDLDETD

SEQ ID NO: 15755 - protein, 319 aa, Homo sapiens
MAICPELAQTDKSALANLSDETETLKNSTDEVQTSSSFSSSGGRQSSPLTSGSKLEREKQTPSLEQGDTQSELLDYKNYEKKLSKKWINYLKLKDSNFERHQPDTKLPTEITRVSDEELNALQSYCTMKINLIHRRGDSKKKTSSRHKKLHLGLDVEASERDAFSCTVPDELLNRIYFKNMRTTPKQEAAAKQHISYQCPYCNRKRAELALSAFLKQKKTLLESFLLQERIDEHLHTKDFLTRIGEAHQDFPRLSDDPRIIWKRLTEKSHIRYSGFERSETEQKLQRDGNSACHLPFSLPFLKRLTLIKPELVIVNDNV

SEQ ID NO: 15756 - protein, 538 aa, Homo sapiens
MSSPLASELSELAALRPGFRLSAPHARVAPRAATHARGRGRASHAGQPRLRSSCPGPSPGKRRVVPSGGAQPRVLPALSSRSHLFPMASHPQTRIQAYLEKNKIGPLFEELMTKLITETPDQPIPFLIDHLQSKQGNRGQLQRTLSGSAALWAESEKSESKGTRRDFRSYDKPWQLNAKKPKKSKSDLAVSNISPPSPDSKSLPRSVEHPKWNWRTKPQSRDFDELNHILQESKKLGKALENLSRSIAISDELDKETVTFNSSLLRPRVIGEWIGREENDADPLAAEMLQPPIPRSKNDQWESEDSGSSPAGSLKMEPKNKGLKQQQQQHKKLLAAMLSQDSFESIHSPTPSVTEEDIDNEDDAMELLEDLNDLRMEGVTTLVPSGSKFNQGRPTYPAEPQAKVTLNICSRCARLQGDNLEERTEESLPILHSPDEKIPDSFDSLPGTEEALMEEGDEFEKASKLTGPGEASSGVGHSLKNYMEEDESLKQLQVVHQPWILPSDTESEGVEAEQEKRSADLLLCVPCSSCPTLVYSGL

SEQ ID NO: 15757 - protein, 427 aa, Homo sapiens
MTKLITETPDQPIPFLIDHLQSKQGNRGQLQRTLSGSAALWAESEKSESKGTRRDFRSYDKPWQLNAKKPKKSKSDLAVSNISPPSPDSKSLPRSVEHPKWNWRTKPQSRDFDELNHILQESKKLGKALENLSRSIAISDELDKETVTFNSSLLRPRVIGEWIGREENDADPLAAEMLQPPIPRSKNDQWESEDSGSSPAGSLKMEPKNKGLKQQQQQHKKLLAAMLSQDSFESIHSPTPSVTEEDIDNEDDAMELLEDLNDLRMEGVTTLVPSGSKFNQGRPTYPAEPQAKVTLNICSRCARLQGDNLEERTEESLPILHSPDEKIPDSFDSLPGTEEALMEEGDEFEKASKLTGPGEASSGVGHSLKNYMEEDESLKQLQVVHQPWILPSDTESEGVEAEQEKRSADLLLCVPCSSCPTLVYSGL

SEQ ID NO: 15758 - protein, 287 aa, Homo sapiens
MASHPQTRIQAYLEKNKIGPLFEELMTKLITETPDQPIPFLIDHLQSKQGNRGQLQRTLSGSAALWAESEKSESKGTRRDFRSYDKPWQLNAKKPKKSKSDLAVSNISPPSPDSKSLPRSVEHPKWNWRTKPQSRDFDELNHILQESKKLGKALENLSRSIAISDELDKETVTFNSSLLRPRVIGEWIGREENDADPLAAEMLQPPIPRSKNDQWESEDSGSSPAGSLKMEPKNKGLKQQQQQHKKLLAAMLSQDSFESIHSPTPSVTEEDIDNEDDAMELLGNFKN

SEQ ID NO: 15759 - protein, 201 aa, Homo sapiens
MENGFTMCQTGRQHPVACGLHLSGGKEDLNDLRMEGVTTLVPSGSKFNQGRPTYPAEPQAKVTLNICSRCARLQGDNLEERTEESLPILHSPDEKIPDSFDSLPGTEEALMEEGDEFEKASKLTGPGEASSGVGHSLKNYMEEDESLKQLQVVHQPWILPSDTESEGVEAEQEKHLLNQNLCGWDSEFCIFHTLASFLIYK

SEQ ID NO: 15760 - protein, 117 aa, Homo sapiens
MAYGVPRKNTVKTILRGSCYNVQEPWDIALLAKTWSTNLANIKLPFLEEISFGGSVQLTKCTTIKDGLLPSAESIKLEREYEVKRLCKLKCQENTSKEIQLLLRERPAGLRRPLPSK

SEQ ID NO: 15761 - protein, 117 aa, Homo sapiens
METKKLIGKPLQPARPVRHLTSPPGAVFPFNFQNEYPCNTQCIQSGVSRCKTNGMQAFSQGLNEQQQQQSPVKKERIKYSRDFLLKLSSVSICRKKPDFLPDHPIVLQKPENNQSFK

SEQ ID NO: 15762 - protein, 2715 aa, Homo sapiens
MDLVITQELARAESQQDAASLKKAYELIKSANLGKSEFDPSESFSPDLFVLCAEQALKMRQPEVSEDCIQMYFKVKAPITQFLGRAHLCRAQMCAPKSAENLEEFENCVTEYMKAINFAKGEPRYYFLVYNASVLYWQMVRPFLKPGYRHHLIPSLSQIINVLSQTEEEDKEWRAELMLELLECYLQAGRKEEAARFCSTAAPFIKSHVPQKYRQIFSVMVRHELMDELQLKEEKKNSISLSVTFYINMLKAKAEQNDLPGDISVILRKAYRHLGHYNHQRFPSISEEKMLLLFELARFSLTLKCMEISSACLSDLKKMESKDPGKLIEMECLECESEALRLESKMKVYNRAAVEAQLDIIQRLDVALQRAVRLGDPRVIHVVCATQWNTCLPLLQHNLRHHLRKPLAGVADVLEKLDSLMTLLRCQVHMEMAQIEEDEDRLEPATEHLRKAARLDSLGLYRDRIQMASTRLRLCTTLYQAPERAEDKAIMAVEQAKKATPKDSVRKKRALLVNAGLALAPDAFQIVLDSENEAKVSTGKNRGRFTYLCAKAWHHTVSVDKAAGHLRRLGNENDKERIQIWAELAKVARKQGVWDVCRTASRFCLLYDNVKVKKLRLRRGKKKRGRDGSVQDTWSQPEVVLQRQVCPDLLRKFAEVGFIHAEATVHLLRSEGVELNDRAIPPEDLSQHPAGYVPEPPEVNAEWITYRTWIESLSRCAMNNWLRSAEIGQEIQEAWIVQNAVVYVLNHNHHLILAGRQKELVDALYHLLSIVKATGHSGDPVMLVTLCNTLARGLIISWIPVQAAEKSRKFMRPNAFHSPLDAGATSEIKTAVEVCEFALNLTNGSAPEETVPTGTRQQLIATWVKAKQLLQQQIGPRLGTEEQGTNEDVSSVTRVLVALEMYSCNGLGLMDFTVPSLAQLVKMASECNWSDPLVELQTLTRLTHFAHAARDHETTMACAHRALEMGIKYLKKFGPEESRLVAEMLCTATAIQGRSIMENLKGRKQLRLVAAKAFTESARFGGIAGSSALVMLAARHYWNAWLPLLSSAVYRKKAKGALKRLIGIINKTEARKQEKGKTLLLHQWPTADFQGGGTTEGYFLPGAEDDLALRAALYGLLFHSHADQDDWEGGLKVLDEAVQVLPRTAHRLLIFKHMVIVKAKLGQNFSMEIQKFKAESEDYLARMWHRLALNSPSVSGELACYNNAIQALQKPEMEWQKVEYLMEFGQWLHHRHFPLEDVVFHLRWAVEILLAMKPPGDVPEPQPTPDGEYVAVEMPPRSPVSEAEEAVSLEQLRSVRQLEALARVHILLALVLSPGAEGYEDCCLAAYAFFRHIWQVSLMTAGKSVLENRPLAATSSHLLLPKKEKENERSKEKEKERSKEKENERSKEKDKEKGKEEKVKEPKQSQSPAPIKQLEDLPMSIEEWASYSCPEEVLSVLKQDRSDSTVNPSSIQKPTYSLYFLDHLVKALQKMCLHELTVPVLQLGVLISDSVVGSKGLSDLYHLRLAHACSELKLREAAARHEEAVGQVCVSELEQASCRKEIALKKEKNKEPLLEESLPALNEQTLPVQPGEIKPLDAKDKILKMNGETGRDLDGTSFPHLWMLKAEVLLEMNLYQPARLLLSEAYLAFQELDEPCAEAQCLLLLAQLANKEKNYGQAKKMIAQAQHLGGSEEFWYNSTLTLAEALLSMEHSGREATVCHIFQKLINAFKILKKERPNRLPLLEFMITDLEARCLSLRVRVAQHSAVTEPTECSLLLKEMDDGLLEIERKFIDCGCKENCVDVKLERAKIKRLRAQNEKDEEQKTAYYLEAYGLAQGAVAEEEGRLHSIQGLYGLAQGAMAEEEGRLHSVQGLLSLQDLQNVNTPLMRKLARLKLGLVEMALDMLQFIWEEAHGQQSEQGSLEKLLADYLQNTSDYTSVGLQWFTLKRTLAHGALAQLGSLQPLSVGCVEIRARLLGLAGRALHLLAMQADPVHPTCYWEAGPSVGAKLSGLKSLELEVEEEGATKSSRDPPASRAAPEEHCRRGEDLKRRMVLAQQYLAQASEVLLQCLQVALGSGLLDVAAAASLEMVECVGTLDPATTCQFLALSQSCSASETMRDVLLAATANTSSSQLAALLQLQHQLRCQDRTTTSLGARVEQRLAAVSKAWQNLCVTEQHFNLLNEMPPTFWILFLHLSGDRSRLYGAAYEKPKFITAAKGKVQAVGGSCKVMRLAISPTAFSHLLACAQQFRKQTQAQVYSEDMALNIGSEPEGLQVEEKERPVQRLSSVLGPLEELLQPLFPLLSLSKARVQTPAVVADSGKSKGKDKERKTSTGQHSTVQPEVADKIVLVADRHLLELPLEGLSVFDEGTISSVSREFSLQMLWNRLHKEETEGGVKKEGRSRDPKKRSLAKKGRKGSIPRTIPPDCIIVDSDNFKFVVDPYEEAQGPEMLTPVSITQDILERFQDTFTSRWAGHLGSKHFPSQAQWEQALGSCSGFFFYGMESFLSHILVERLVAMNLQECQVAVLLDLARSYQSLKRHMESVEHRRSVGRWEANWRNSASPSEDEWRRGGEPRRGFSDLEGQAAAAPKLRAPSHHAQLGPVWAAAPSHRVVQAWTCLPSAAGAPALASALGSAPLPTHPHLPAPIPSSQLALPFLGLSPALGAASARDPPPATSRKAAAWTSSSACLCAPWGLRRGWSCVSSRGQDKGGLPLAALVLSCLDQKTIQTVSLFLI

SEQ ID NO: 15763 - protein, 405 aa, Homo sapiens
MDLVITQELARAESQQDAASLKKAYELIKSANLGKSEFDPSESFSPDLFVLCAEQALKMRQPEVSEDCIQMYFKVKAPITQFLGRAHLCRAQMCAPKSAENLEEFENCVTEYMKAINFAKGEPRYYFLVYNASVLYWQMVRPFLKPGYRHHLIPSLSQIINVLSQTEEEDKEWRAELMLELLECYLQAGRKEEAARFCSTAAPFIKSHVPQKYRQIFSVMVRHELMDELQLKEEKKNSISLSVTFYINMLKAKAEQNDLPGDISVILRKAYRHLGHYNHQRFPSISEEKMLLLFELARFSLTLKCMEISSACLSDLKKMESKVSGFMTLLPGDEALLTVQLDKRQRKEEQFTRPRPPGLRSVVGTLPSFLPVFCTVAVRWCLQFYTCPFLFTFLVATGPQHHSCF

SEQ ID NO: 15764 - protein, 247 aa, Homo sapiens
MDLVITQELARAESQQDAASLKKAYELIKSANLGKSEFDPSESFSPDLFVLCAEQALKMRQPEVSEDCIQMYFKVKAPITQFLGRAHLCRAQMCAPKSAENLEEFENCVTEYMKAINFAKGEPRYYFLVYNASVLYWQMVRPFLKPGYRHHLIPSLSQIINVLSQTEEEDKEWRAELMLELLECYLQAGRKEEAARFCSTAAPFIKSHVPQKYRQIFSVMVNQRIRNRDVRSNFLKSHCSENCVEIT

SEQ ID NO: 15765 - protein, 224 aa, Homo sapiens
MSVFGKLFGAGGGKAGKGGPTPQEAIQRLRDTEEMLSKKQEFLEKKIEQELTAAKKHGTKNKRAALQALKRKKRYEKQLAQIDGTLSTIEFQREALENANTNTEVLKNMGYAAKAMKAAHDNMDIDKVDELMQDIADQQELAEEISTAISKPVGFGEEFDEDELMAELEELEQEELDKNLLEISGPETVPLPNVPSIALPSKPAKKKEEEDDDMKELENWAGSM

SEQ ID NO: 15766 - protein, 916 aa, Homo sapiens
MEMPLPPDDQELRNVIDKLAQFVARNGPEFEKMTMEKQKDNPKFSFLFGGEFYSYYKCKLALEQQQLICKQQTPELEPAATMPPLPQPPLAPAAPIPPAQGAPSMDELIQQSQWNLQQQEQHLLALRQEQVTAAVAHAVEQQMQKLLEETQLDMNEFDNLLQPIIDTCTKDAISAGKNWMFSNAKSPPHCELMAGHLRNRITADGAHFELRLHLIYLINDVLHHCQRKQARELLAALQKVVVPIYCTSFLAVEEDKQQKIARLLQLWEKNGYFDDSIIQQLQSPALGLGQYQATLINEYSSVVQPVQLAFQQQIQTLKTQHEEFVTSLAQQQQQQQQQQQQLQMPQMEAEVKATPPPPAPPPAPAPAPAIPPTTQPDDSKPPIQMPGSSEYEAPGGVQDPAAAGPRGPGPHDQIPPNKPPWFDQPHPVAPWGQQQPPEQPPYPHHQGGPPHCPPWNNSHEGMWGEQRGDPGWNGQRDAPWNNQPDAAWNSQFEGPWNSQHEQPPWGGGQREPPFRMQRPPHFRGPFPPHQQHPQFNQPPHPHNFNRFPPRFMQDDFPPRHPFERPPYPHRFDYPQGDFPAEMGPPHHHPGHRMPHPGINEHPPWAGPQHPDFGPPPHGFNGQPPHMRRQGPPHINHDDPSLVPNVPYFDLPAGLMAPLVKLEDHEYKPLDPKDIRLPPPMPPSERLLAAVEAFYSPPSHDRPRNSEGWEQNGLYEFFRAKMRARRRKGQEKRNSGPSRSRSRSKSRGRSSSRSNSRSSKSSGSYSRSRSRSCSRSYSRSRSRSRSRSRSSRSRSRSQSRSRSKSYSPGRRRRSRSRSPTPPSSAGLGSNSAPPIPDSRLGEENKGHQMLVKMGWSGSGGLGAKEQGIQDPIKGGDVRDKWDQYKGVGVALDDPYENYRRNKSYSFIARMKARDECK

SEQ ID NO: 15767 - protein, 1925 aa, Homo sapiens
MFTLTGCRLVEKTQKVENPSVSFASSFPLIPLLLRGKSVQKKQAESKSQIKLHTQSAPFGLCPKDMMLTQAPSSVVRSRNSRNHTVNSGGSCLSASTVAIPAINDSSAAMSACSTISAQPASSMDTQMHSPKKQERVNKRVIWGIEVAEELHWKGWELGKETTRNLVLKNRSLKLQKMKYRPPKTKFFFTVIPQPIFLSPGITLTLPIVFRPLEAKEYMDQLWFEKAEGMFCVGLRATLPCHRLICRPPSLQLPMCAVGDTTEAFFCLDNVGDLPTFFTWEFSSPFQMLPATGLLEPGQASQIKVTFQPLTAVIYEVQATCWYGAGSRQRSSIQLQAVAKCAQLLVSIKHKCPEDQDAEGFQKLLYFGSVAVGCTSERQIRLHNPSAVNAPFRIEISPDELAEDQAFSCPTAHGIVLPGEKKCVSVFFHPKTLDTRTVDYCSIMPSGCASKTLLKVVGFCRGPAVSLQHYCVNFSWVNLGERSEQPLWIENQSDCTAHFQFAIDCLESVFTIRPAFGTLVGKARMTLHCAFQPTHPIICFRRVACLIHHQDPLFLDLMGTCHSDSTKPAILKPQHLTWYRTHLARGLTLYPPDILDAMLKEKKLAQDQNGALMIPIQDLEDMPAPQYPYIPPMTEFFFDGTSDITIFPPPISVEPVEVDFGACPGPEAPNPVPLCLMNHTKGKIMVVWTRRSDCPFWVTPESCDVPPLKSMAMRLHFQPPHPNCLYTVELEAFAIYKVLQSYSNIEEDCTMCPSWCLTVRARGHSYFAGFEHHIPQYSLDVPKLFPAVSSGEPTYRSLLLVNKDCKLLTFSLAPQRGSDVILRPTSGLVAPGAHQIILICTYPEGSSWKQHTFYLQCNASPQYLKEVSMYSREEPLQLKLDTHKSLYFKPTWVGCSSTSPFTFRNPSRLPLQFEWRVSEQHRKLLAVQPSRGLIQPNERLTLTWTFSPLEETKYLFQVGMWVWEAGLSPNANPAATTHYMLRLVGVGLTSSLSAKEKELAFGNVLVNSKQSRFLVLLNDGNCTLYYRLYLEQGSPEAVDNHPLALQLDRTEGSMPPRSQDTICLTACPKQRSQYSWTITYSLLSHRDNKAGEKQELCCVSLVAVYPLLSILDVSSMGSAEGITRKHLWRLFSLDLLNSYLERDPTPCELTYKVPTRHSMSQIPPVLTPLRLDFNFGAAPFKAPPSVVFLALKNSGVVSLDWAFLLPSDQRIDVELWAEQAELNSTELHQMRVQDNCLFSISPKAGSLSPGQEQMVELKYSHLFIGTDHLPVLFKVSHGREILLNFIGVTVKPEQKYVHFTSTTHQFIPIPIGDTLPPRQIYELYNGGSVPVTYEVQTDVLSQVQEKNFDHPIFCCLNPKGEIQPGSTARVLWIFSPIEAKTYTVDVPIHILGWNSALIHFQGVGYNPHMMGDTAPFHNISSWDNSSIHSRLVVPGQNVFLSQSHISLGNIPVQSKCSRLLFLNNISKNEEIAFSWQPSPLDFGEVSVSPMIGVVAPEETVPFVVTLRASVHASFYSADLVCKLYSQQLMRQYHKELQEWKDEKVRQEVEFTITDMKVKKRTCCTACEPARKYKTLPPIKNQQSVSRPASWKLQTPKEEVSWPCPQPPSPGMLCLGLTARAHATDYFLANFFSEFPCHFLHRELPKRKAPREESETSEEKSPNKWGPVSKQKKQLLVDILTTIIRGLLEDKNFHEAVDQSLVEQVPYFRQFWNEQSTKFMDQKNSLYLMPILPVPSSSWEDGKGKQPKEDRPEHYPGLGKKEEGEEEKGEEEEEELEEEEEEEEETEEEELGKEEIEEKEEERDEKEEKVSWAGIGPTPQPESQESMQWQWQQQLNVMVKEEQEQDEKEAIRRLPAFANLQEALLENMIQNILVEASRGEVVLTSRPRVIALPPFCVPRSLTPDTLLPTQQAEVLHPVVPLPTDLP

SEQ ID NO: 15768 - protein, 164 aa, Homo sapiens
MMLTQAPSSVVRSRNSRNHTVNSGGSCLSASTVAIPAINDSSAAMSACSTISAQPASSMDTQMHSPKKQERVNKRVIWGIEVAEELHWKGWELGKETTRNLVLKNRSLKLQKMKYRYQYKGSRTQCHSLEPRKQALFKTKQNKQKKPLTCHIKASECLKYVQYE

SEQ ID NO: 15769 - protein, 730 aa, Homo sapiens
MMLTQAPSSVVRSRNSRNHTVNSGGSCLSASTVAIPAINDSSAAMSACSTISAQPASSMDTQMHSPKKQERVNKRVIWGIEVAEELHWKGWELGKETTRNLVLKNRSLKLQKMKYRPPKTKFFFTVIPQPIFLSPGITLTLPIVFRPLEAKEYMDQLWFEKAEGMFCVGLRATLPCHRLICRPPSLQLPMCAVGDTTEAFFCLDNVGDLPTFFTWEFSSPFQMLPATGLLEPGQASQIKVTFQPLTAVIYEVQATCWYGAGSRQRSSIQLQAVAKCAQLLVSIKHKCPEDQDAEGFQKLLYFGSVAVGCTSERQIRLHNPSAVNAPFRIEISPDELAEDQAFSCPTAHGIVLPGEKKCVSVFFHPKTLDTRTVDYCSIMPSGCASKTLLKVVGFCRGPAVSLQHYCVNFSWVNLGERSEQPLWIENQSDCTAHFQFAIDCLESVFTIRPAFGTLVGKARMTLHCAFQPTHPIICFRRVACLIHHQDPLFLDLMGTCHSDSTKPAILKPQHLTWYRTHLARGLTLYPPDILDAMLKEKKLAQDQNGALMIPIQDLEDMPAPQYPYIPPMTEFFFDGTSDITIFPPPISVEPVEVDFGACPGPEAPNPVPLCLMNHTKGKIMVVWTRRSDCPFWVTPESCDVPPLKSMAMRLHFQPPHPNCLYTVELEAFAIYKVCARNEREECGVSARSLSGLVGWQEVTEGSFRLHPLRARLSLGWTVTPMSLSPPKLLA

SEQ ID NO: 15770 - protein, 784 aa, Homo sapiens
METAIWRRSYISLISSERPVHNWRGKSVQKKQAESKSQIKLHTQSAPFGLCPKDMMLTQAPSSVVRSRNSRNHTVNSGGSCLSASTVAIPAINDSSAAMSACSTISAQPASSMDTQMHSPKKQERVNKRVIWGIEVAEELHWKGWELGKETTRNLVLKNRSLKLQKMKYRPPKTKFFFTVIPQPIFLSPGITLTLPIVFRPLEAKEYMDQLWFEKAEGMFCVGLRATLPCHRLICRPPSLQLPMCAVGDTTEAFFCLDNVGDLPTFFTWEFSSPFQMLPATGLLEPGQASQIKVTFQPLTAVIYEVQATCWYGAGSRQRSSIQLQAVAKCAQLLVSIKHKCPEDQDAEGFQKLLYFGSVAVGCTSERQIRLHNPSAVNAPFRIEISPDELAEDQAFSCPTAHGIVLPGEKKCVSVFFHPKTLDTRTVDYCSIMPSGCASKTLLKVVGFCRGPAVSLQHYCVNFSWVNLGERSEQPLWIENQSDCTAHFQFAIDCLESVFTIRPAFGTLVGKARMTLHCAFQPTHPIICFRRVACLIHHQDPLFLDLMGTCHSDSTKPAILKPQHLTWYRTHLARGLTLYPPDILDAMLKEKKLAQDQNGALMIPIQDLEDMPAPQYPYIPPMTEFFFDGTSDITIFPPPISVEPVEVDFGACPGPEAPNPVPLCLMNHTKGKIMVVWTRRSDCPFWVTPESCDVPPLKSMAMRLHFQPPHPNCLYTVELEAFAIYKVCARNEREECGVSARSLSGLVGWQEVTEGSFRLHPLRARLSLGWTVTPMSLSPPKLLA

SEQ ID NO: 15771 - protein, 138 aa, Homo sapiens
MEEEAETEEQQRFSYQQRLKAAVHYTVGCLCEEVALDKEMQFSKQTIAAISELTFRQCENFAKDLEMFARHAKRTTINTEDVKLLARRSNSLLKYITDKSEEIAQINLERKAQKKKKSEDGSKNSRQPAEAGVVESEN

SEQ ID NO: 15772 - protein, 164 aa, Homo sapiens
MEEEAETEEQQRFSYQQRLKAAVHYTVGCLCEEVALDKEMQFSKQTIAAISELTFRQCENFAKDLEMFARHAKRTTINTEDVKLLARRSNSLHMQEAAGIRKSSLLTFLAWWFEWTSQASAGPLIGEEAREVARRQEGAPPQQSARRDRMPCRNFFWKTFSSCK

SEQ ID NO: 15773 - protein, 77 aa, Homo sapiens
MEEEAETEEQQRFSYQQRLKAAVHYTVGCLCEEVALDKEMQFSKQTIAAISELTFRQCENFAKDLEMFASICRKRQE

SEQ ID NO: 15774 - protein, 433 aa, Homo sapiens
MALRVTRNSKINAENKAKINMAGAKRVPTAPAATSKPGLRPRTALGDIGNKVSEQLQAKMPMKKEAKPSATGKVIDKKLPKPLEKVPMLVPVPVSEPVPEPEPEPEPEPVKEEKLSPEPILVDTASPSPMETSGCAPAEEDLCQAFSDVILAVNDVDAEDGADPNLCSEYVKDIYAYLRQLEEEQAVRPKYLLGREVTGNMRAILIDWLVQVQMKFRLLQETMYMTVSIIDRFMQNNCVPKKMLQLVGVTAMFIASKYEEMYPPEIGDFAFVTDNTYTKHQIRQMEMKILRALNFGLGRPLPLHFLRRASKIGEVDVEQHTLAKYLMELTMLDYDMVHFPPSQIAAGAFCLALKILDNGEWTPTLQHYLSYTEESLLPVMQHLAKNVVMVNQGLTKHMTVKNKYATSKHAKISTLPQLNSALVQDLAKAVAKV

SEQ ID NO: 15775 - protein, 396 aa, Homo sapiens
MALRVTRNSKINAENKAKINMAGAKRVPTAPAATSKPGLRPRTALGDIGNKVSEQLQAKMPMKKEAKPSATGKVIDKKLPKPLEKVPMLVPVPVSEPVPEPEPEPEPEPVKEEKLSPEPILVDTASPSPMETSGCAPAEEDLCQAFSDVILAVNDVDAEDGADPNLCSEYVKDIYAYLRQLEEEQAVRPKYLLGREVTGNMRAILIDWLVQVQMKFRLLQETMYMTVSIIDRFMQNNCVPKKMLQLVGVTAMFIASKYEEMYPPEIGDFAFVTDNTYTKHQIRQMEMKILRALNFGLGRPLPLHFLRRASKIGEVDVEQHTLAKYLMELTMLDYDMVHFPPSQIAAGAFCLALKILDNGEWTVKNKYATSKHAKISTLPQLNSALVQDLAKAVAKV

SEQ ID NO: 15776 - protein, 210 aa, Homo sapiens
MRPRLWLLLAAQLTVLHGNSVLQQTPAYIKVQTNKMVMLSCEAKISLSNMCIYWLRQRQAPSSDSHHEFLTLWDSAKGTIHGEEVEQEKIAVFRDASRFILNLTSVKPEDSGIYFCMIVGSPELTFGKGTQLSVVDFLPTTAQPTKKSTLKKRVCRLPRPETQKGPLCSPVTLGLLVAGVLVLLVSLGVAMHLCCRRRRARLRFMKQFYK

SEQ ID NO: 15777 - protein, 514 aa, Homo sapiens
MKEAGQMQNLESARAGRSVSTQTGSMTGQIPRLSKVNLFTLLSLWMELFPAEAQRQKSQKNEEGKHGPLGDNEERTRVSTDKRQVKRTGLVVVKNMKIVGLHCSSEDLHAGQIALIKHGSRLKNCDLYFSRKPCSACLKMIVNAGVNRISYWPADPEISLLTEASSSEDAKLDAKAVERLKSNSRAHVCVLLQPLVCYMVQFVEETSYKCDFIQKITKTLPDANTDFYYECKQERIKEYEMLFLVSNEEMHKQILMTIGLENLCENPYFSNLRQNMKDLILLLATVASSVPNFKHFGFYRSNPEQINEIHNQSLPQEIARHCMVQARLLAYRTEDHKTGVGAVIWAEGKSRSCDGTGAMYFVGCGYNAFPVGSEYADFPHMDDKQKDREIRKFRYIIHAEQNALTFRCQEIKPEERSMIFVTKCPCDECVPLIKGAGIKQIYAGDVDVGKKKADISYMRFGELEGVSKFTWQLNPSGAYGLEQNEPERRENGVLRPVPQKEEQHQDKKLRLGIH

SEQ ID NO: 15778 - protein, 99 aa, Homo sapiens
MKEAGQMQNLESARAGRSVSTQTGSMTGQIPRLSKVNLFTLLSLWMELFPAEAQRQKSQKNEEGKHGPLGDNEERTRVSTDKRQKTMFCLFENDCKCWS

SEQ ID NO: 15779 - protein, 153 aa, Homo sapiens
MKEAGQMQNLESARAGRSVSTQTGSMTGQIPRLSKVNLFTLLSLWMELFPAEAQRQKSQKNEEGKHGPLGDNEERTRVSTDKRQVKRTGLVVVKNMKIVGLHCSSEDLHAGQIALIKHGSRLKNCDLYFSRKPCSACLKMIVNGLLGAAKMPR

SEQ ID NO: 15780 - protein, 134 aa, Homo sapiens
MDDKQKDREIRKFRYIIHAEQNALTFRCQEIKPEERSMIFVTKCPCDECVPLIKGAGIKQIYAGDVDVGKKKADISYMRFGELEGVSKFTWQLNPSGAYGLEQNEPERRENGVLRPVPQKEEQHQDKKLRLGIH

SEQ ID NO: 15781 - protein, 359 aa, Homo sapiens
MAEAITYADLRFVKAPLKKSISSRLGQDPGADDDGEITYENVQVPAVLGVPSSLASSVLGDKAAVKSEQPTASWRAVTSPAVGRILPCRTTCLRYLLLGLLLTCLLLGVTAICLGVRYLQVSQQLQQTNRVLEVTNSSLRQQLRLKITQLGQSAEDLQGSRRELAQSQEALQVEQRAHQAAEGQLQACQADRQKTKETLQSEEQQRRALEQKLSNMENRLKPFFTCGSADTCCPSGWIMHQKSCFYISLTSKNWQESQKQCETLSSKLATFSEIYPQSHSYYFLNSLLPNGGSGNSYWTGLSSNKDWKLTDDTQRTRTYAQSSKCNKVHKTWSWWTLESESCRSSLPYICEMTAFRFPD

SEQ ID NO: 15782 - protein, 344 aa, Homo sapiens
MDSYSAPESTPSASSRPEDYFIGATPLQKRLESVRKQSSFILTPPRRKIPQCSQLQEDVDPQKVAFLLHKQWTLYSLTPLYKFSYSNLKEYSRLLNAFIVAEKQKGLAVEVGEDFNIKVIFSTLLGMKGTQRDPEAFLVQIVSKSQLPSENREGKVLWTGWFCCVFGDSLLETVSEDFTCLPLFLANGAESNTAIIGTWFQKTFDCYFSPLAINAFNLSWMAAMWTACKMDHYVATTEFLWSVPCSPQSLDISFAIHPEDAKALWDSVHKTPGEVTQEEVDLFMDCLYSHFHRHFKIHLSATRLVRVSTSVASAHTDGKIKILCHKYLIGVLAYLTELAIFQIE

SEQ ID NO: 15783 - protein, 390 aa, Homo sapiens
MDSYSAPESTPSASSRPEDYFIGATPLQKRLESVRKQSSFILTPPRRKIPQCSQLQEDVDPQKVAFLLHKQWTLYSLTPLYKFSYSNLKEYSRLLNAFIVAEKQKGLAVEVGEDFNIKVIFSTLLGMKGTQRDPEAFLVQGLILSPRLEYSGTILVDCNLCLLGSSDPSTLAFQVAGTAGACHHTRIVSKSQLPSENREGKVLWTGWFCCVFGDSLLETVSEDFTCLPLFLANGAESNTAIIGTWFQKTFDCYFSPLAINAFNLSWMAAMWTACKMDHYVATTEFLWSVPCSPQSLDISFAIHPEDAKALWDSVHKTPGEVTQEEVDLFMDCLYSHFHRHFKIHLSATRLVRVSTSVASAHTDGKIKILCHKYLIGVLAYLTELAIFQIE

SEQ ID NO: 15784 - protein, 188 aa, Homo sapiens
MDSYSAPESTPSASSRPEDYFIGATPLQKRLESVRKQSSFILTPPRRKIPQCSQLQEDVDPQKVAFLLHKQWTLYSLTPLYKFSYSNLKEYSRLLNAFIVAEKQKGLAVEVGEDFNIKVIFSTLLGMKGTQRDPEAFLVQGLILSPRLEYSGTILVDCNLCLLGSSDPSTLAFQVAGTADCVKISIAI

SEQ ID NO: 15785 - protein, 138 aa, Homo sapiens
MVAPAARVFLRAVRAALTSTVPDLLCLLARGSPRGLASGRLPLAVHSAQHGPGSGAPWLRIARRALRFVLSKHWGDDCYLTNRLWQDLKPPSHVENGQELRLAPPVQWALQVQGNQLQTAVLCLRMAPPEPAGSRQRI

SEQ ID NO: 15786 - protein, 226 aa, Homo sapiens
MVAPAARVFLRAVRAALTSTVPDLLCLLARGSPRGLASGRLPLAVHSAQHGPGSGAPWLRIARRALRFVLSKHWGDDCYLTNRLWQDLKPPSHVENGQELRLAPPVQWALQPKNLERVYVDTQVSASGDFLRGRARGTAGPGGSGSGSPRGRGRLRRPGRSPGAAPSSVSRGRKEATQARSRARGRRGGAVARVCRPESRQRWARPTSSPGGLIRGRRKNGIEAFQ

SEQ ID NO: 15787 - protein, 70 aa, Homo sapiens
MVAPAARVFLRAVRAALTSTVPDLLCLLARGSPRGLASGRLPLAVHSAQHGPGSGAPWLRIARRALSQRI

SEQ ID NO: 15788 - protein, 355 aa, Homo sapiens
MDYTLDLSVTTVTDYYYPDIFSSPCDAELIQTNGKLLLAVFYCLLFVFSLLGNSLVILVLVVCKKLRSITDVYLLNLALSDLLFVFSFPFQTYYLLDQWVFGTVMCKVVSGFYYIGFYSSMFFITLMSVDRYLAVVHAVYALKVRTIRMGTTLCLAVWLTAIMATIPLLVFYQVASEDGVLQCYSFYNQQTLKWKIFTNFKMNILGLLIPFTIFMFCYIKILHQLKRCQNHNKTKAIRLVLIVVIASLLFWVPFNVVLFLTSLHSMHILDGCSISQQLTYATHVTEIISFTHCCVNPVIYAFVGEKFKKHLSEIFQKSCSQIFNYLGRQMPRESCEKSSSCQQHSSRSSSVDYIL

SEQ ID NO: 15789 - protein, 272 aa, Homo sapiens
MRNLFRQMTYYLLDQWVFGTVMCKVVSGFYYIGFYSSMFFITLMSVDRYLAVVHAVYALKVRTIRMGTTLCLAVWLTAIMATIPLLVFYQVASEDGVLQCYSFYNQQTLKWKIFTNFKMNILGLLIPFTIFMFCYIKILHQLKRCQNHNKTKAIRLVLIVVIASLLFWVPFNVVLFLTSLHSMHILDGCSISQQLTYATHVTEIISFTHCCVNPVIYAFVGEKFKKHLSEIFQKSCSQIFNYLGRQMPRESCEKSSSCQQHSSRSSSVDYIL

SEQ ID NO: 15790 - protein, 466 aa, Homo sapiens
MKPPLLVFIVCLLWLKDSHCAPTWKDKTAISENLKSFSEVGEIDADEEVKKALTGIKQMKIMMERKEKEHTNLMSTLKKCREEKQEALKLLNEVQEHLEEEERLCRESLADSWGECRSCLENNCMRIYTTCQPSWSSVKNKIERFFRKIYQFLFPFHEDNEKDLPISEKLIEEDAQLTQMEDVFSQLTVDVNSLFNRSFNVFRQMQQEFDQTFQSHFISDTDLTEPYFFPAFSKEPMTKADLEQCWDIPNFFQLFCNFSVSIYESVSETITKMLKAIEDLPKQDKAPDHGGLISKMLPGQDRGLCGELDQNLSRCFKFHEKCQKCQAHLSEDCPDVPALHTELDEAIRLVNVSNQQYGQILQMTRKHLEDTAYLVEKMRGQFGWVSELANQAPETEIIFNSIQVVPRIHEGNISKQDETMMTDLSILPSSNFTLKIPLEESAESSNFIGYVVAKALQHFKEHFKTW

SEQ ID NO: 15791 - protein, 354 aa, Homo sapiens
MRLAVLFSGALLGLLAAQGTGNDCPHKKSATLLPSFTVTPTVTESTGTTSHRTTKSHKTTTHRTTTTGTTSHGPTTATHNPTTTSHGNVTVHPTSNSTATSQGPSTATHSPATTSHGNATVHPTSNSTATSPGFTSSAHPEPPPPSPSPSPTSKETIGDYTWTNGSQPCVHLQAQIQIRVMYTTQGGGEAWGISVLNPNKTKVQGSCEGAHPHLLLSFPYGHLSFGFMQDLQQKVVYLSYMAVEYNVSFPHAAQWTFSAQNASLRDLQAPLGQSFSCSNSSIILSPAVHLDLLSLRLQAAQLPHTGVFGQSFSCPSDRSILLPLIIGLILLGLLALVLIAFCIIRRRPSAYQAL

SEQ ID NO: 15792 - protein, 297 aa, Homo sapiens
MRLAVLFSGALLGLLAESTGTTSHRTTKSHKTTTHRTTTTGTTSHGPTTATHNPTTTSHGNATVHPTSNSTATSPGFTSSAHPEPPPPSPSPSPTSKETIGDYTWTNGSQPCVHLQAQIQIRVMYTTQGGGEAWGISVLNPNKTKVQGSCEGAHPHLLLSFPYGHLSFGFMQDLQQKVVYLSYMAVEYNVSFPHAAQWTFSAQNASLRDLQAPLGQSFSCSNSSIILSPAVHLDLLSLRLQAAQLPHTGVFGQSFSCPSDRSILLPLIIGLILLGLLALVLIAFCIIRRRPSAYQAL

SEQ ID NO: 15793 - protein, 327 aa, Homo sapiens
MRLAVLFSGALLGLLAESTGTTSHRTTKSHKTTTHRTTTTGTTSHGPTTATHNPTTTSHGNVTVHPTSNSTATSQGPSTATHSPATTSHGNATVHPTSNSTATSPGFTSSAHPEPPPPSPSPSPTSKETIGDYTWTNGSQPCVHLQAQIQIRVMYTTQGGGEAWGISVLNPNKTKVQGSCEGAHPHLLLSFPYGHLSFGFMQDLQQKVVYLSYMAVEYNVSFPHAAQWTFSAQNASLRDLQAPLGQSFSCSNSSIILSPAVHLDLLSLRLQAAQLPHTGVFGQSFSCPSDRSILLPLIIGLILLGLLALVLIAFCIIRRRPSAYQAL

SEQ ID NO: 15794 - protein, 182 aa, Homo sapiens
MKGWGWLALLLGALLGTAWARRSQDLHCGACRALVDELEWEIAQVDPKKTIQMGSFRINPDGSQSVVEVPYARSEAHLTELLEEICDRMKEYGEQIDPSTHRKNYVRVVGRNGESSELDLQGIRIDSDISGTLKFACESIVEEYEDELIEFFSREADNVKDKLCSKRTDLCDHALHISHDEL

SEQ ID NO: 15795 - protein, 84 aa, Homo sapiens
MKGWGWLALLLGALLGTAWARRSQDLHCGACRALVDELEWEIAQVDPKKTIQMGSFRINPDGSQSVVEVTVTVPPNKVAHSGFG

SEQ ID NO: 15796 - protein, 226 aa, Homo sapiens
MPGGPGVLQALPATIFLLFLLSAVYLGPGCQALWMHKVPASLMVSLGEDAHFQCPHNSSNNANVTWWRVLHGNYTWPPEFLGPGEDPNGTLIIQNVNKSHGGIYVCRVQEGNESYQQSCGTYLRVRQPPPRPFLDMGEGTKNRIITAEGIILLFCAVVPGTLLLFRKRWQNEKLGLDAGDEYEDENLYEGLNLDDCSMYEDISRGLQGTYQDVGSLNIGDVQLEKP

SEQ ID NO: 15797 - protein, 188 aa, Homo sapiens
MPGGPGVLQALPATIFLLFLLSAVYLGPGCQALWMHKVPASLMVSLGEDAHFQCPHNSSNNANVTWWRVLHGNYTWPPEFLGPGEDPNEPPPRPFLDMGEGTKNRIITAEGIILLFCAVVPGTLLLFRKRWQNEKLGLDAGDEYEDENLYEGLNLDDCSMYEDISRGLQGTYQDVGSLNIGDVQLEKP

SEQ ID NO: 15798 - protein, 1338 aa, Homo sapiens
MFLMPTSSELNSGQNFLTQWMTNPSRAGVILNRGFPILEADKEKRAAVDISTSFPIKGTHFSDSFSFINEEDSLLEEQKLESNNPYKPQSDKSETHTAFPCIKKGPQVAACHSAPGHQEENKNDFIPDLASEFKEGAYKDPLFKKLEQLKEVQQKKQEQLKRQQLEQLQRLMEEQEKLLTMVSGQCTLPGLSLLPDDQSQKHRSPGNTTTGERATCCFPSYVYPDPTQEETYPSNILSHEQSNFCRTAHGDFVLTSKRASPNLFSEAQYQEAPVEKNNLKEENRNHPTGESILCWEKVTEQIQEANDKNLQKHDDSSEVANIEERPIKAAIGERKQTFEDYLEEQIQLEEQELKQKQLKEAEGPLPIKAKPKQPFLKRGEGLARFTNAKSKFQKGKESKLVTNQSTSEDQPLFKMDRQQLQRKTALKNKELCADNPILKKDSKARTKSGSVTLSQKPKMLKCSNRKSLSPSGLKIQTGKKCDGQFRDQIKFENKVTSNNKENVTECPKPCDTGCTGWNKTQGKDRLPLSTGPASRLAAKSPIRETMKESESSLDVSLQKKLETWEREKEKENLELDEFLFLEQAADEISFSSNSSFVLKILERDQQICKGHRMSSTPVKAVPQKTNPADPISHCNRSEDLDHTAREKESECEVAPKQLHSLSSADELREQPCKIRKAVQKSTSENQTEWNARDDEGVPNSDSSTDSEEQLDVTIKPSTEDRERGISSREDSPQVCDDKGPFKDTRTQEDKRRDVDLDLSDKDYSSDESIMESIKHKVSEPSRSSSLSLSKMDFDDERTWTDLEENLCNHDVVLGNESTYGTPQTCYPNNEIGILDKTIKRKIAPVKRGEDLSKSRRSRSPPTSELMMKFFPSLKPKPKSDSHLGNELKLNISQDQPPGDNARSQVLREKIIELETEIEKFKAENASLAKLRIERESALEKLRKEIADFEQQKAKELARIEEFKKEEMRKLQKERKVFEKYTTAARTFPDKKEREEIQTLKQQIADLREDLKRKETKWSSTHSRLRSQIQMLVRENTDLREEIKVMERFRLDAWKRAEAIESSLEVEKKDKLANTSVRFQNSQISSGTQVEKYKKNYLPMQGNPPRRSKSAPPRDLGNLDKGQAASPREPLEPLNFPDPEYKEEEEDQDIQGEISHPDGKVEKVYKNGCRVILFPNGTRKEVSADGKTITVTFFNGDVKQVMPDQRVIYYYAAAQTTHTTYPEGLEVLHFSSGQIEKHYPDGRKEITFPDQTVKNLFPDGQEESIFPDGTIVRVQRDGNKLIEFNNGQRELHTAQFKRREYPDGTVKTVYANGHQETKYRSGRIRVKDKEGNVLMDTEL

SEQ ID NO: 15799 - protein, 1086 aa, Homo sapiens
MFLMPTSSELNSGQNFLTQWMTNPSRAGVILNRGFPILEADKEKRAAVDISTSFPIKGTHFSDSFSFINEEDSLLEEQKLESNNPYKPQSDKSETHTAFPCIKKGPQVAACHSAPGHQEENKNDFIPDLASEFKEGAYKDPLFKKLEQLKEVQQKKQEQLKRQQLEQLQRLMEEQEKLLTMVSGQCTLPGLSLLPDDQSQKHRSPGNTTTGERATCCFPSYVYPDPTQEETYPSNILSHEQSNFCRTAHGDFVLTSKRASPNLFSEAQYQEAPVEKNNLKEENRNHPTGESILCWEKVTEQIQEANDKNLQKHDDSSEVANIEERPIKAAIGERKQTFEDYLEEQIQLEEQELKQKQLKEAEGPLPIKAKPKQPFLKRGEGLARFTNAKSKFQKGKESKLVTNQSTSEDQPLFKMDRQQLQRKTALKNKELCADNPILKKDSKARTKSGSVTLSQKPKMLKCSNRKSLSPSGLKIQTGKKCDGQFRDQIKFENKVTSNNKENVTECPKPCDTGCTGWNKTQGKDRLPLSTGPASRLAAKSPIRETMKESESSLDVSLQKKLETWEREKEKENLELDEFLFLEQAADEISFSSNSSFVLKILERDQQICKGHRMSSTPVKAVPQKTNPADPISHCNRSEDLDHTAREKESECEVAPKQLHSLSSADELREQPCKIRKAVQKSTSENQTEWNARDDEGVPNSDSSTDSEEQLDVTIKPSTEDRERGISSREDSPQVCDDKGPFKDTRTQEDKRRDVDLDLSDKDYSSDESIMESIKHKVSEPSRSSSLSLSKMDFDDERTWTDLEENLCNHDVVLGNESTYGTPQTCYPNNEIGILDKTIKRKIAPVKRGEDLSKSRRSRSPPTSELMMKFFPSLKPKPKSDSHLGNELKLNISQDQPPGDNARSQVLREKIIELETEIEKFKAENASLAKLRIERESALEKLRKEIADFEQQKAKELARIEEFKKEEMRKLQKERKVFEKYTTAARTFPDKKEREEIQTLKQQIADLREDLKRKETKWSSTHSRLRSQIQMLVRENTDLREEIKVMERFRLDAWKRAEAIESSLEVEKKDKLAAIHLEDPSLHLLVI

SEQ ID NO: 15800 - protein, 668 aa, Homo sapiens
MWLFFGITGLLTAALSGHPSPAPPDQLNTSSAESELWEPGERLPVRLTNGSSSCSGTVEVRLEASWEPACGALWDSRAAEAVCRALGCGGAEAASQLAPPTPELPPPPAAGNTSVAANATLAGAPALLCSGAEWRLCEVVEHACRSDGRRARVTCAENRALRLVDGGGACAGRVEMLEHGEWGSVCDDTWDLEDAHVVCRQLGCGWAVQALPGLHFTPGRGPIHRDQVNCSGAEAYLWDCPGLPGQHYCGHKEDAGAVCSEHQSWRLTGGADRCEGQVEVHFRGVWNTVCDSEWYPSEAKVLCQSLGCGTAVERPKGLPHSLSGRMYYSCNGEELTLSNCSWRFNNSNLCSQSLAARVLCSASRSLHNLSTPEVPASVQTVTIESSVTVKIENKESRELMLLIPSIVLGILLLGSLIFIAFILLRIKGKYALPVMVNHQHLPTTIPAGSNSYQPVPITIPKEVFMLPIQVQAPPPEDSDSGSDSDYEHYDFSAQPPVALTTFYNSQRHRVTDEEVQQSRFQMPPLEEGLEELHASHIPTANPGHCITDPPSLGPQYHPRSNSESSTSSGEDYCNSPKSKLPPWNPQVFSSERSSFLEQPPNLELAGTQPAFSAGPPADDSSSTSSGEWYQNFQPPPQPPSEEQFGCPGSPSPQPDSTDNDDYDDISAA

SEQ ID NO: 15801 - protein, 636 aa, Homo sapiens
MWLFFGITGLLTAALSGHPSPAPPDQLNTSSAESELWEPGERLPVRLTNGSSSCSGTVEVRLEASWEPACGALWDSRAAEAVCRALGCGGAEAASQLAPPTPELPPPPAAGNTSVAANATLAGAPALLCSGAEWRLCEVVEHACRSDGRRARVTCAENRALRLVDGGGACAGRVEMLEHGEWGSVCDDTWDLEDAHVVCRQLGCGWAVQALPGLHFTPGRGPIHRDQVNCSGAEAYLWDCPGLPGQHYCGHKEDAGAVCSEHQSWRLTGGADRCEGQVEVHFRGVWNTVCDSEWYPSEAKVLCQSLGCGTAVERPKGLPHSLSGRMYYSCNGEELTLSNCSWRFNNSNLCSQSLAARVLCSASRSLHNLSTPEVPASVQTVTIESSVTVKIENKESRELMLLIPSIVLGILLLGSLIFIAFILLRIKGKYVFMLPIQVQAPPPEDSDSGSDSDYEHYDFSAQPPVALTTFYNSQRHRVTDEEVQQSRFQMPPLEEGLEELHASHIPTANPGHCITDPPSLGPQYHPRSNSESSTSSGEDYCNSPKSKLPPWNPQVFSSERSSFLEQPPNLELAGTQPAFSAGPPADDSSSTSSGEWYQNFQPPPQPPSEEQFGCPGSPSPQPDSTDNDDYDDISAA

SEQ ID NO: 15802 - protein, 595 aa, Homo sapiens
MWLFFGITGLLTAALSGHPSPAPPDQLNTSSAESELWEPGERLPVRLTNGSSSCSGTVEVRLEASWEPACGALWDSRAAEAVCRALGCGGAEAASQLAPPTPELPPPPAAGNTSVAANATLAGAPALLCSGAEWRLCEVVEHACRSDGRRARVTCAENRALRLVDGGGACAGRVEMLEHGEWGSVCDDTWDLEDAHVVCRQLGCGWAVQALPGLHFTPGRGPIHRDQVNCSGAEAYLWDCPGLPGQHYCGHKEDAGAVCSEHQSWRLTGGADRCEGQVEVHFRGVWNTVCDSEWYPSEAKVLCQSLGCGTAVERPKGLPHSLSGRMYYSCNGEELTLSNCSWRFNNSNLCSQSLAARVLCSASRSLHNLSTPEVPASVQTVTIESSVTVKIENKESRELMLLIPSIVLGILLLGSLIFIAFILLRIKGKYDSQRHRVTDEEVQQSRFQMPPLEEGLEELHASHIPTANPGHCITDPPSLGPQYHPRSNSESSTSSGEDYCNSPKSKLPPWNPQVFSSERSSFLEQPPNLELAGTQPAFSAGPPADDSSSTSSGEWYQNFQPPPQPPSEEQFGCPGSPSPQPDSTDNDDYDDISAA

SEQ ID NO: 15803 - protein, 601 aa, Homo sapiens
MWLFFGITGLLTAALSGHPSPAPPDQLNTSSAESELWEPGERLPVRLTNGSSSCSGTVEVRLEASWEPACGALWDSRAAEAVCRALGCGGAEAASQLAPPTPELPPPPAAGNTSVAANATLAGAPALLCSGAEWRLCEVVEHACRSDGRRARVTCAENRALRLVDGGGACAGRVEMLEHGEWGSVCDDTWDLEDAHVVCRQLGCGWAVQALPGLHFTPGRGPIHRDQVNCSGAEAYLWDCPGLPGQHYCGHKEDAGAVCSEHQSWRLTGGADRCEGQVEVHFRGVWNTVCDSEWYPSEAKVLCQSLGCGTAVERPKGLPHSLSGRMYYSCNGEELTLSNCSWRFNNSNLCSQSLAARVLCSASRSLHNLSTPEVPASVQTVTIESSVTVKIENKESRELMLLIPSIVLGILLLGSLIFIAFILLRIKGKYVFMLPIQVQAPPPEDSDSGSDSDYEHYDFSAQPPVALTTFYNSQRHRVTDEEVQQSRFQMPPLEEGLEELHASHIPTANPGHCITDPPSLGPQYHPRSNSESSTSSGEDYCNSPKSKLPPWNPQVFSSERSSFLEQPPNLELAGTQPAFSGSPSPQPDSTDNDDYDDISAA

SEQ ID NO: 15804 - protein, 592 aa, Homo sapiens
MWLFFGITGLLTAALSGHPSPAPPDQLNTSSAESELWEPGERLPVRLTNGSSSCSGTVEVRLEASWEPACGALWDSRAAEAVCRALGCGGAEAASQLAPPTPELPPPPAAGNTSVAANATLAGAPALLCSGAEWRLCEVVEHACRSDGRRARVTCAENRALRLVDGGGACAGRVEMLEHGEWGSVCDDTWDLEDAHVVCRQLGCGWAVQALPGLHFTPGRGPIHRDQVNCSGAEAYLWDCPGLPGQHYCGHKEDAGAVCSEHQSWRLTGGADRCEGQVEVHFRGVWNTVCDSEWYPSEAKVLCQSLGCGTAVERPKGLPHSLSGRMYYSCNGEELTLSNCSWRFNNSNLCSQSLAARVLCSASRSLHNLSTPEVPASVQTVTIESSVTVKIENKESRELMLLIPSIVLGILLLGSLIFIAFILLRIKGKYALPVMVNHQHLPTTIPAGSNSYQPVPITIPKEDSQRHRVTDEEVQQSRFQMPPLEEGLEELHASHIPTANPGHCITDPPSLGPQYHPRSNSESSTSSGEDYCNSPKSKLPPWNPQVFSSERSSFLEQPPNLELAGTQPAFSGSPSPQPDSTDNDDYDDISAA

SEQ ID NO: 15805 - protein, 545 aa, Homo sapiens
MWLFFGITGLLTAALSGHPSPAPPDQLNTSSAESELWEPGERLPVRLTNGSSSCSGTVEVRLEASWEPACGALWDSRAAEAVCRALGCGGAEAASQLAPPTPELPPPPAAGNTSVAANATLAGAPALLCSGAEWRLCEVVEHACRSDGRRARVTCAENRALRLVDGGGACAGRVEMLEHGEWGSVCDDTWDLEDAHVVCRQLGCGWAVQALPGLHFTPGRGPIHRDQVNCSGAEAYLWDCPGLPGQHYCGHKEDAGAVCSESSVTVKIENKESRELMLLIPSIVLGILLLGSLIFIAFILLRIKGKYALPVMVNHQHLPTTIPAGSNSYQPVPITIPKEVFMLPIQVQAPPPEDSDSGSDSDYEHYDFSAQPPVALTTFYNSQRHRVTDEEVQQSRFQMPPLEEGLEELHASHIPTANPGHCITDPPSLGPQYHPRSNSESSTSSGEDYCNSPKSKLPPWNPQVFSSERSSFLEQPPNLELAGTQPAFSAGPPADDSSSTSSGEWYQNFQPPPQPPSEEQFGCPGSPSPQPDSTDNDDYDDISAA

SEQ ID NO: 15806 - protein, 567 aa, Homo sapiens
MWLFFGITGLLTAALSGHPSPAPPDQLNTSSAESELWEPGERLPVRLTNGSSSCSGTVEVRLEASWEPACGALWDSRAAEAVCRALGCGGAEAASQLAPPTPELPPPPAAGNTSVAANATLAGAPALLCSGAEWRLCEVVEHACRSDGRRARVTCAENRALRLVDGGGACAGRVEMLEHGEWGSVCDDTWDLEDAHVVCRQLGCGWAVQALPGLHFTPGRGPIHRDQVNCSGAEAYLWDCPGLPGQHYCGHKEDAGAVCSASRSLHNLSTPEVPASVQTVTIESSVTVKIENKESRELMLLIPSIVLGILLLGSLIFIAFILLRIKGKYALPVMVNHQHLPTTIPAGSNSYQPVPITIPKEVFMLPIQVQAPPPEDSDSGSDSDYEHYDFSAQPPVALTTFYNSQRHRVTDEEVQQSRFQMPPLEEGLEELHASHIPTANPGHCITDPPSLGPQYHPRSNSESSTSSGEDYCNSPKSKLPPWNPQVFSSERSSFLEQPPNLELAGTQPAFSAGPPADDSSSTSSGEWYQNFQPPPQPPSEEQFGCPGSPSPQPDSTDNDDYDDISAA

SEQ ID NO: 15807 - protein, 499 aa, Homo sapiens
MAQFAFESDLHSLLQLDAPIPNAPPARWQRKAKEAAGPAPSPMRAANRSHSAGRTPGRTPGKSSSKVQTTPSKPGGDRYIPHRSAAQMEVASFLLSKENQPENSQTPTKKEHQKAWALNLNGFDVEEAKILRLSGKPQNAPEGYQNRLKVLYSQKATPGSSRKTCRYIPSLPDRILDAPEIRNDYYLNLVDWSSGNVLAVALDNSVYLWSASSGDILQLLQMEQPGEYISSVAWIKEGNYLAVGTSSAEVQLWDVQQQKRLRNMTSHSARVGSLSWNSYILSSGSRSGHIHHHDVRVAEHHVATLSGHSQEVCGLRWAPDGRHLASGGNDNLVNVWPSAPGEGGWVPLQTFTQHQGAVKAVAWCPWQSNVLATGGGTSDRHIRIWNVCSGACLSAVDAHSQVCSILWSPHYKELISGHGFAQNQLVIWKYPTMAKVAELKGHTSRVLSLTMSPDGATVASAAADETLRLWRCFELDPARRREREKASAAKSSLIHQGIR

SEQ ID NO: 15808 - protein, 235 aa, Homo sapiens
MALPVTALLLPLALLLHAARPSQFRVSPLDRTWNLGETVELKCQVLLSNPTSGCSWLFQPRGAAASPTFLLYLSQNKPKAAEGLDTQRFSGKRLGDTFVLTLSDFRRENEGYYFCSALSNSIMYFSHFVPVFLPAKPTTTPAPRPPTPAPTIASQPLSLRPEACRPAAGGAVHTRGLDFACDIYIWAPLAGTCGVLLLSLVITLYCNHRNRRRVCKCPRPVVKSGDKPSLSARYV

SEQ ID NO: 15809 - protein, 198 aa, Homo sapiens
MALPVTALLLPLALLLHAARPSQFRVSPLDRTWNLGETVELKCQVLLSNPTSGCSWLFQPRGAAASPTFLLYLSQNKPKAAEGLDTQRFSGKRLGDTFVLTLSDFRRENEGYYFCSALSNSIMYFSHFVPVFLPAKPTTTPAPRPPTPAPTIASQPLSLRPEACRPAAGGAGNRRRVCKCPRPVVKSGDKPSLSARYV

SEQ ID NO: 15810 - protein, 276 aa, Homo sapiens
MRNQAPGRPKGATFPPRRPTGSRAPPLAPELRAKQRPGERVMALPVTALLLPLALLLHAARPSQFRVSPLDRTWNLGETVELKCQVLLSNPTSGCSWLFQPRGAAASPTFLLYLSQNKPKAAEGLDTQRFSGKRLGDTFVLTLSDFRRENEGYYFCSALSNSIMYFSHFVPVFLPAKPTTTPAPRPPTPAPTIASQPLSLRPEACRPAAGGAVHTRGLDFACDIYIWAPLAGTCGVLLLSLVITLYCNHRNRRRVCKCPRPVVKSGDKPSLSARYV

SEQ ID NO: 15811 - protein, 449 aa, Homo sapiens
MWTALVLIWIFSLSLSESHAASNDPRNFVPNKMWKGLVKRNASVETVDNKTSEDVTMAAASPVTLTKGTSAAHLNSMEVTTEDTSRTDVSEPATSGGAADGVTSIAPTAVASSTTAASITTAASSMTVASSAPTTAASSTTVASIAPTTAASSMTAASSTPMTLALPAPTSTSTGRTPSTTATGHPSLSTALAQVPKSSALPRTATLATLATRAQTVATTANTSSPMSTRPSPSKHMPSDTAASPVPPMRPQAQGPISQVSVDQPVVNTTNKSTPMPSNTTPEPAPTPTVVTTTKAQAREPTASPVPVPHTSPIPEMEAMSPTTQPSPMPYTQRAAGPGTSQAPEQVETEATPGTDSTGPTPRSSGGTKMPATDSCQPSTQGQYMVVTTEPLTQAVVDKTLLLVVLLLGVTLFITVLVLFALQAYESYKKKDYTQVDYLINGMYADSEM

SEQ ID NO: 15812 - protein, 288 aa, Homo sapiens
MGHTRRQGTSPSKCPYLNFFQLLVLAGLSHFCSGVIHVTKEVKEVATLSCGHNVSVEELAQTRIYWQKEKKMVLTMMSGDMNIWPEYKNRTIFDITNNLSIVILALRPSDEGTYECVVLKYEKDAFKREHLAEVTLSVKADFPTPSISDFEIPTSNIRRIICSTSGGFPEPHLSWLENGEELNAINTTVSQDPETELYAVSSKLDFNMTTNHSFMCLIKYGHLRVNQTFNWNTTKQEHFPDNLLPSWAITLISVNGIFVICCLTYCFAPRCRERRRNERLRRESVRPV

SEQ ID NO: 15813 - protein, 256 aa, Homo sapiens
MGHTRRQGTSPSKCPYLNFFQLLVLAGLSHFCSGVIHVTKEVKEVATLSCGHNVSVEELAQTRIYWQKEKKMVLTMMSGDMNIWPEYKNRTIFDITNNLSIVILALRPSDEGTYECVVLKYEKDAFKREHLAEVTLSVKADFPTPSISDFEIPTSNIRRIICSTSGGFPEPHLSWLENGEELNAINTTVSQDPETELYAVSSKLDFNMTTNHSFMCLIKYGHLRVNQTFNWNTSFAPRCRERRRNERLRRESVRPV

SEQ ID NO: 15814 - protein, 162 aa, Homo sapiens
MGHTRRQGTSPSKCPYLNFFQLLVLAGLSHFCSGVIHVTKEVKEVATLSCGHNVSVEELAQTRIYWQKEKKMVLTMMSGDMNIWPEYKNRTIFDITNNLSIVILALRPSDEGTYECVVLKYEKDAFKREHLAEVTLSVKGFAPRCRERRRNERLRRESVRPV

SEQ ID NO: 15815 - protein, 115 aa, Homo sapiens
MGTGLRSQSLREPRPSYGKLQEPWGRPQEGQLRRALSLRQGQEKSRSQGLERGTEGPDATAQERVPGSLGDTEQLIQAQRRGSRWWLRRYQQVRRRWESFVAIFPSVTLSQPASP

SEQ ID NO: 15816 - protein, 333 aa, Homo sapiens
MLVGTPNLLTLDEADATWTLIKDKVIEEHFGPNAVAVPFLSDAACYDLLGVLVKQSRPAHTRLALPGRQGRRALKPVGPLPSLLEQAGSEGAFAHCTREYSPNGRAERAYEETRMLDGQPCKIRLHMGDLRKKVAFLLLPPGQVSLQQTLPWLRSTHSIYVIYQVFSCSWLQLGLTSTAREPQLLRLLRSLPVAFSCLKFSLQSKGVLGPQKPLTKDPLPHGANWVRPNLSIMPPLAPTSAPADTTEAADVPPPVPAPPTPPPQEGPEDKPTRFSYKGRNPFWRGPQILSENWLFSPRSPPPGAQGGGPRDPDGHSMSLPLLQGLSSEFDSDD

SEQ ID NO: 15817 - protein, 1401 aa, Homo sapiens
MAPQMYEFHLPLSPEELLKSGGVNQYVVQEVLSIKHLPPQLRAFQAAFRAQGPLAMLQHFDTIYSILHHFRSIDPGLKEDTLQFLIKVVSRHSQELPAILDDTTLSGSDRNAHLNALKMNCYALIRLLESFETMASQTNLVDLDLGGKGKKARTKAAHGFDWEEERQPILQLLTQLLQLDIRHLWNHSIIEEEFVSLVTGCCYRLLENPTINHQKNRPTREAITHLLGVALTRYNHMLSATVKIIQMLQHFEHLAPVLVAAVSLWATDYGMKSIVGEIVREIGQKCPQELSRDPSGTKGFAAFLTELAERVPAILMSSMCILLDHLDGENYMMRNAVLAAMAEMVLQVLSGDQLEAAARDTRDQFLDTLQAHGHDVNSFVRSRVLQLFTRIVQQKALPLTRFQAVVALAVGRLADKSVLVCKNAIQLLASFLANNPFSCKLSDADLAGPLQKETQKLQEMRAQRRTAAASAVLDPEEEWEAMLPELKSTLQQLLQLPQGEEEIPEQIANTETTEDVKGRIYQLLAKASYKKAIILTREATGHFQESEPFSHIDPEESEETRLLNILGLIFKGPAASTQEKNPRESTGNMVTGQTVCKNKPNMSDPEESRGNDELVKQEMLVQYLQDAYSFSRKITEAIGIISKMMYENTTTVVQEVIEFFVMVFQFGVPQALFGVRRMLPLIWSKEPGVREAVLNAYRQLYLNPKGDSARAKAQALIQNLSLLLVDASVGTIQCLEEILCEFVQKDELKPAVTQLLWERATEKVACCPLERCSSVMLLGMMARGKPEIVGSNLDTLVSIGLDEKFPQDYRLAQQVCHAIANISDRRKPSLGKRHPPFRLPQEHRLFERLRETVTKGFVHPDPLWIPFKEVAVTLIYQLAEGPEVICAQILQGCAKQALEKLEEKRTSQEDPKESPAMLPTFLLMNLLSLAGDVALQQLVHLEQAVSGELCRRRVLREEQEHKTKDPKEKNTSSETTMEEELGLVGATADDTEAELIRGICEMELLDGKQTLAAFVPLLLKVCNNPGLYSNPDLSAAASLALGKFCMISATFCDSQLRLLFTMLEKSPLPIVRSNLMVATGDLAIRFPNLVDPWTPHLYARLRDPAQQVRKTAGLVMTHLILKDMVKVKGQVSEMAVLLIDPEPQIAALAKNFFNELSHKGNAIYNLLPDIISRLSDPELGVEEEPFHTIMKQLLSYITKDKQTESLVEKLCQRFRTSRTERQQRDLAYCVSQLPLTERGLRKMLDNFDCFGDKLSDESIFSAFLSVVGKLRRGAKPEGKAIIDEFEQKLRACHTRGLDGIKELEIGQAGSQRAPSAKKPSTGSRYQPLASTASDNDFVTPEPRRTTRRHPNTQQRASKKKPKVVFSSDESSEEDLSAEMTEDETPKKTTPILRASARRHRS

SEQ ID NO: 15818 - protein, 605 aa, Homo sapiens
MEDVEARFAHLLQPIRDLTKNWEVDVAAQLGEYLEELDQICISFDEGKTTMNFIEAALLIQGSACVYSKKVEYLYSLVYQALDFISGKRRAKQLSSVQEDRANGVASSGVPQEAENEFLSLDDFPDSRTNVDLKNDQTPSEVLIIPLLPMALVAPDEMEKNNNPLYSRQGEVLASRKDFRMNTCVPHPRGAFMLEPEGMSPMEPAGVSPMPGTQKDTGRTEEQPMEVSVCRSPVPALGFSQEPGPSPEGPMPLGGGEDEDAEEAVELPEASAPKAALEPKESRSPQQSAALPRRYMLREREGAPEPASCVKETPDPWQSLDPFDSLESKPFKKGRPYSVPPCVEEALGQKRKRKGAAKLQDFHQWYLAAYADHADSRRLRRKGPSFADMEVLYWTHVKEQLETLRKLQRREVAEQWLRPAEEDHLEDSLEDLGAADDFLEPEEYMEPEGADPREAADLDAVPMSLSYEELVRRNVELFIATSQKFVQETELSQRIRDWEDTVQPLLQEQEQHVPFDIHTYGDQLVSRFPQLNEWCPFAELVAGQPAFEVCRSMLASLQLANDYTVEITQQPGLEMAVDTMSLRLLTHQRAHKRFQTYAAPSMAQP

SEQ ID NO: 15819 - protein, 583 aa, Homo sapiens
MEDVEARFAHLLQPIRDLTKNWEVDVAAQLGEYLEELDQICISFDEGKTTMNFIEAALLIQGSACVYSKKVEYLYSLVYQALDFISGKRRAKQLSSVQEDRANGVASSGVPQEAENEFLSLDDFPDSRTNVDLKNDQTPSEVLIIPLLPMALVAPDEMEKNNNPLYRGAFMLEPEGMSPMEPAGVSPMPGTQKDTGRTEEQPMEVSVCRSPVPALGFSQEPGPSPEGPMPLGGGEDEDAEEAVELPEASAPKAALEPKESRSPQQSAALPRRYMLREREGAPEPASCVKETPDPWQSLDPFDSLESKPFKKGRPYSVPPCVEEALGQKRKRKGAAKLQDFHQWYLAAYADHADSRRLRRKGPSFADMEVLYWTHVKEQLETLRKLQRREVAEQWLRPAEEDHLEDSLEDLGAADDFLEPEEYMEPEGADPREAADLDAVPMSLSYEELVRRNVELFIATSQKFVQETELSQRIRDWEDTVQPLLQEQEQHVPFDIHTYGDQLVSRFPQLNEWCPFAELVAGQPAFEVCRSMLASLQLANDYTVEITQQPGLEMAVDTMSLRLLTHQRAHKRFQTYAAPSMAQP

SEQ ID NO: 15820 - protein, 299 aa, Homo sapiens
MEDVEARFAHLLQPIRDLTKNWEVDVAAQLGEYLEELDQICISFDEGKTTMNFIEAALLIQGSACVYSKKVEYLYSLVYQALDFISGKRRAKQLSSVQEDRANGVASSGVPQEAENEFLSLDDFPDSRTNVDLKNDQTPSEVLIIPLLPMALVAPDEMEKNNNPLYSRQGEVLASRKDFRMNTCVPHPRGAFMLEPEGMSPMEPAGVSPMPGTQKDTGRTEEQPMEVSVCRSPVPALGFSQEPGPSPEGPMPLGGGEDEDAEEAVELPEASAPKAALEPKESRSPQQVGPTWRPAEPEL

SEQ ID NO: 15821 - protein, 606 aa, Homo sapiens
MEDVEARFAHLLQPIRDLTKNWEVDVAAQLGEYLEELDQICISFDEGKTTMNFIEAALLIQGSACVYSKKVEYLYSLVYQALDFISGKRRAKQLSSVQEDRANGVASSGVPQEAENEFLSLDDFPDSRTNVDLKNDQTPSEVLIIPLLPMALVAPDEMEKNNNPLYSRQGEVLASRKDFRMNTCVPHPRGAFMLEPEGMSPMEPAGVSPMPGTQKDTGRTEEQPMEVSVCRSPVPALGFSQEPGPSPEGPMPLGGGEDEDAEEAVELPEASAPKAALEPKESRSPQQSAALPRRYMLREREGAPEPASCVKETPDPWQSLDPFDSLESKPFKKGRPYSVPPCVEEALGQKRKRKGAAKLQDFHQWYLAAYADHADSRRLRRKGPSFADMEVLYWTHVKEQLETLRKLQRREVAEQWLRPAEEDHLEDSLEDLGAAADDFLEPEEYMEPEGADPREAADLDAVPMSLSYEELVRRNVELFIATSQKFVQETELSQRIRDWEDTVQPLLQEQEQHVPFDIHTYGDQLVSRFPQLNEWCPFAELVAGQPAFEVCRSMLASLQLANDYTVEITQQPGLEMAVDTMSLRLLTHQRAHKRFQTYAAPSMAQP

SEQ ID NO: 15822 - protein, 1498 aa, Homo sapiens
MVALRGLGSGLQPWCPLDLRLEWVDTVWELDFTETEPLDPSIEAEIIETGLAAFTKLYESLLPFATGEHGSMESIWTFFIENNVSHSTLVALFYHFVQIVHKKNVSVQYREYGLHAAGLYFLLLEVPGSVANQVFHPVMFDKCIQTLKKSWPQESNLNRKRKKEQPKSSQANPGRHRKRGKPPRREDIEMDEIIEEQEDENICFSARDLSQIRNAIFHLLKNFLRLLPKFSLKEKPQCVQNCIEVFVSLTNFEPVLHECHVTQARALNQAKYIPELAYYGLYLLCSPIHGEGDKVISCVFHQMLSVILMLEVGEGSHRAPLAVTSQVINCRNQAVQFISALVDELKESIFPVVRILLQHICAKVVDKSEYRTFAAQSLVQLLSKLPCGEYAMFIAWLYKYSRSSKIPHRVFTLDVVLALLELPEREVDNTLSLEHQKFLKHKFLVQEIMFDRCLDKAPTVRSKALSSFAHCLELTVTSASESILELLINSPTFSVIESHPGTLLRNSSAFSYQRQTSNRSEPSGEINIDSSGETVGSGERCVMAMLRRRIRDEKTNVRKSALQVLVSILKHCDVSGMKEDLWILQDQCRDPAVSVRKQALQSLTELLMAQPRCVQIQKAWLRGVVPVVMDCESTVQEKALEFLDQLLLQNIRHHSHFHSGDDSQVLAWALLTLLTTESQELSRYLNKAFHIWSKKEKFSPTFINNVISHTGTEHSAPAWMLLSKIAGSSPRLDYSRIIQSWEKISSQQNPNSNTLGHILCVIGHIAKHLPKSTRDKVTDAVKCKLNGFQWSLEVISSAVDALQRLCRASAETPAEEQELLTQVCGDVLSTCEHRLSNIVLKENGTGNMDEDLLVKYIFTLGDIAQLCPARVEKRIFLLIQSVLASSADADHSPSSQGSSEAPASQPPPQVRGSVMPSVIRAHAIITLGKLCLQHEDLAKKSIPALVRELEVCEDVAVRNNVIIVMCDLCIRYTIMVDKYIPNISMCLKDSDPFIRKQTLILLTNLLQEEFVKWKGSLFFRFVSTLIDSHPDIASFGEFCLAHLLLKRNPVMFFQHFIECIFHFNNYEKHEKYNKFPQSEREKRLFSLKGKSNKERRMKIYKFLLEHFTDEQRFNITSKICLSILACFADGILPLDLDASELLSDTFEVLSSKEIKLLAMRSKPDKDLLMEEDDMALANVVMQEAQKKLISQVQKRNFIENIIPIIISLKTVLEKNKIPALRELMHYLREVMQDYRDELKDFFAVDKQLASELEYDMKKYQEQLVQEQELAKHADVAGTAGGAEVAPVAQVALCLETVPVPAGQENPAMSPAVSQPCTPRASAGHVAVSSPTPETGPLQRLLPKARPMSLSTIAILNSVKKAVESKSRHRSRSLGVLPFTLNSGSPEKTCSQVSSYSLEQESNGEIEHVTKRAISTPEKSISDVTFGAGVSYIGTPRTPSSAKEKIEGRSQGNDILCLSLPDKPPPQPQQWNVRSPARNKDTPACSRRSLRKTPLKTAN

SEQ ID NO: 15823 - protein, 35 aa, Homo sapiens
MAEKAGSTFSHLLVPILLLIGWIVGCIIMIYVVFS

SEQ ID NO: 15824 - protein, 1143 aa, Homo sapiens
MEKRETFVQAVSKELVGEFLQFVQLDKEASDPFSLNELLDELSRKQKEELWQRLKNLLTDVLLESPVDGWQVVEAQGEDNMETEHGSKMRKSIEIIYAITSVILASVSVINESENYEALLECVIILNGILYALPESERKLQSSIQDLCVTWWEKGLPAKEDTGKTAFVMLLRRSLETKTGADVCRLWRIHQALYCFDYDLEESGEIKDMLLECFININYIKKEEGRRFLSCLFNWNINFIKMIHGTIKNQLQGLQKSLMVYIAEIYFRAWKKASGKILEAIENDCIQDFMFHGIHLPRRSPVHSKVREVLSYFHHQKKVRQGVEEMLYRLYKPILWRGLKARNSEVRSNAALLFVEAFPIRDPNLHAIEMDSEIQKQFEELYSLLEDPYPMVRSTGILGVCKITSKYWEMMPPTILIDLLKKVTGELAFDTSSADVRCSVFKCLPMILDNKLSHPLLEQLLPALRYSLHDNSEKVRVAFVDMLLKIKAVRAAKFWKICPMEHILVRLETDSRPVSRRLVSLIFNSFLPVNQPEEVWCERCVTLVQMNHAAARRFYQYAHEHTACTNIAKLIHVIRHCLNACIQRAVREPPEDEEEEDGREKENVTVLDKTLSVNDVACMAGLLEIIVILWKSIDRSMENNKEAKLYTINKFASVLPEYLKVFKDDRCKIPLFMLMSFMPASAVPPFSCGVISTLRSREEGAVDKSYCTLLDCLCSWGQVGHILELVDNWLPTEHAQAKSNTASKGRVQIHDTRPVKPELALVYIEYLLTHPKNRECLLSAPRKKLNHLLKALETSKADLESLLQTPGGKPRGFSEAAAPRAFGLHCRLSIHLQHKFCSEGKVYLSMLEDTGFWLESKILSFIQDQEEDYLKLHRVIYQQIIQTYLTVCKDVVMVGLGDHQFQMQLLQRSLGIMQTVKGFFYVSLLLDILKEITGSSLIQKTDSDEEVAMLLDTVQKVFQKMLECIARSFRKQPEEGLRLLYSVQRPLHEFITAVQSRHTDTPVHRGVLSTLIAGPVVEISHQLRKVSDVEELTPPEHLSDLPPFSRCLIGIIIKSSNVVRSFLDELKACVASNDIEGIVCLTAAVHIILVINAGKHKSSKVREVAATVHRKLKTFMEITLEEDSIERFLYESSSRTLGELLNS

SEQ ID NO: 15825 - protein, 1156 aa, Homo sapiens
MEKRETFVQAVSKELVGEFLQFVQLDKEASDPFSLNELLDELSRKQKEELWQRLKNLLTDVLLESPVDGWQVVEAQGEDNMETEHGSKMRKSIEIIYAITSVILASVSVINESENYEALLECVIILNGILYALPESERKLQSSIQDLCVTWWEKGLPAKEDTGKTAFVMLLRRSLETKTGADVCRLWRIHQALYCFDYDLEESGEIKDMLLECFININYIKKEEGRRFLSCLFNWNINFIKMIHGTIKNQLQGLQKSLMVYIAEIYFRAWKKASGKILEAIENDCIQDFMFHGIHLPRRSPVHSKVREVLSYFHHQKKVRQGVEEMLYRLYKPILWRGLKARNSEVRSNAALLFVEAFPIRDPNLHAIEMDSEIQKQFEELYSLLEDPYPMVRSTGILGVCKITSKYWEMMPPTILIDLLKKVTGELAFDTSSADVRCSVFKCLPMILDNKLSHPLLEQLLPALRYSLHDNSEKVRVAFVDMLLKIKAVRAAKFWKICPMEHILVRLETDSRPVSRRLVSLIFNSFLPVNQPEEVWCERCVTLVQMNHAAARRFYQYAHEHTACTNIAKLIHVIRHCLNACIQRAVREPPEDEEEEDGREKENVTVLDKTLSVNDVACMAGLLEIIVILWKSIDRSMENNKEAKLYTINKFASVLPEYLKVFKDDRCKIPLFMLMSFMPASAVPPFSCGVISTLRSREEGAVDKSYCTLLDCLCSWGQVGHILELVDNWLPTEHAQAKSNTASKGRVQIHDTRPVKPELALVYIEYLLTHPKNRECLLSAPRKKLNHLLKALETSKADLESLLQTPGGKPRGFSEAAAPRAFGLHCRLSIHLQHKFCSEGKVYLSMLEDTGFWLESKILSFIQDQEEDYLKLHRVIYQQIIQTYLTVCKDVVMVGLGDHQFQMQLLQRSLGIMQTVKGFFYVSLLLDILKEITGSSLIQKTDSDEEVAMLLDTVQKVFQKMLECIARSFRKQPEEGLRLLYSVQRPLHEFITAVQSRHTDTPVHRGVLSTLIAGPVVEISHQLRKVSDVEELTPPEHLSDLPPFSRCLIGIIIKSSNVVRSFLDELKACVASNDIEGIVCLTAAVHIILVINAGKHKSSKVREVAATVHRKLKTFMEITLEEDSIERYEDLLCCPGWALTPGLLDSIYPSASVPIG

SEQ ID NO: 15826 - protein, 270 aa, Homo sapiens
MADHMMAMNHGRFPDGTNGLHHHPAHRMGMGQFPSPHHHQQQQPQHAFNALMGEHIHYGAGNMNATSGIRHAMGPGTVNGGHPPSALAPAARFNNSQFMGPPVASQGGSLPASMQLQKLNNQYFNHHPYPHNHYMPDLHPAAGHQMNGTNQHFRDCNPKHSGGSSTPGGSGGSSTPGGSGSSSGGGAGSSNSGGGSGSGNMPASVAHVPAAMLPPNVIDTDFIDEEVLMSLVIEMGLDRIKELPELWLGQNEFDFMTDFVCKQQPSRVSC

SEQ ID NO: 15827 - protein, 213 aa, Homo sapiens
MADHMMAMNHGRFPDGTNGLHHHPAHRMGMGQFPSPHHHQQQQPQHAFNALMGEHIHYGAGNMNATSGIRHAMGPGTVNGGHPPSALAPAARFNNSQFMGPPVASQGGSLPASMQLQKLNNQYFNHHPYPHNHYMPDLHPAAGHQMNGTNQHFRDCNPNVIDTDFIDEEVLMSLVIEMGLDRIKELPELWLGQNEFDFMTDFVCKQQPSRVSC

SEQ ID NO: 15828 - protein, 1438 aa, Homo sapiens
MSMLKPSGLKAPTKILKPGSTALKTPTAVVAPVEKTISSEKASSTPSSETQEEFVDDFRVGERVWVNGNKPGFIQFLGETQFAPGQWAGIVLDEPIGKNDGSVAGVRYFQCEPLKGIFTRPSKLTRKVQAEDEANGLQTTPASRATSPLCTSTASMVSSSPSTPSNIPQKPSQPAAKEPSATPPISNLTKTASESISNLSEAGSIKKGERELKIGDRVLVGGTKAGVVRFLGETDFAKGEWCGVELDEPLGKNDGAVAGTRYFQCQPKYGLFAPVHKVTKIGFPSTTPAKAKANAVRRVMATTSASLKRSPSASSLSSMSSVASSVSSRPSRTGLLTETSSRYARKISGTTALQEALKEKQQHIEQLLAERDLERAEVAKATSHVGEIEQELALARDGHDQHVLELEAKMDQLRTMVEAADREKVELLNQLEEEKRKVEDLQFRVEEESITKGDLEQKSQISEDPENTQTKLEHARIKELEQSLLFEKTKADKLQRELEDTRVATVSEKSRIMELEKDLALRVQEVAELRRRLESNKPAGDVDMSLSLLQEISSLQEKLEVTRTDHQREITSLKEHFGAREETHQKEIKALYTATEKLSKENESLKSKLEHANKENSDVIALWKSKLETAIASHQQAMEELKVSFSKGLGTETAEFAELKTQIEKMRLDYQHEIENLQNQQDSERAAHAKEMEALRAKLMKVIKEKENSLEAIRSKLDKAEDQHLVEMEDTLNKLQEAEIKVKELEVLQAKCNEQTKVIDNFTSQLKATEEKLLDLDALRKASSEGKSEMKKLRQQLEAAEKQIKHLEIEKNAESSKASSITRELQGRELKLTNLQENLSEVSQVKETLEKELQILKEKFAEASEEAVSVQRSMQETVNKLHQKEEQFNMLSSDLEKLRENLADMEAKFREKDEREEQLIKAKEKLENDIAEIMKMSGDNSSQLTKMNDELRLKERDVEELQLKLTKANENASFLQKSIEDMTVKAEQSQQEAAKKHEEEKKELERKLSDLEKKMETSHNQCQELKARYERATSETKTKHEEILQNLQKTLLDTEDKLKGAREENSGLLQELEELRKQADKAKAAQTAEDAMQIMEQMTKEKTETLASLEDTKQTNAKLQNELDTLKENNLKNVEELNKSKELLTVENQKMEEFRKEIETLKQAAAQKSQQLSALQEENVKLAEELGRSRDEVTSHQKLEEERSVLNNQLLEMKKRESKFIKDADEEKASLQKSISITSALLTEKDAELEKLRNEVTVLRGENASAKSLHSVVQTLESDKVKLELKVKNLELQLKENKRQLSSSSGNTDTQADEDERAQESQIDFLNSVIVDLQRKNQDLKMKVEMMSEAALNGNGDDLNNYDSDDQEKQSKKKPRLFCDICDCFDLHDTEDCPTQAQMSEDPPHSTHHGSRGEERPYCEICEMFGHWATNCNDDETF

SEQ ID NO: 15829 - protein, 1427 aa, Homo sapiens
MSMLKPSGLKAPTKILKPGSTALKTPTAVVAPVEKTISSEKASSTPSSETQEEFVDDFRVGERVWVNGNKPGFIQFLGETQFAPGQWAGIVLDEPIGKNDGSVAGVRYFQCEPLKGIFTRPSKLTRKVQAEDEANGLQTTPASRATSPLCTSTASMVSSSPSTPSNIPQKPSQPAAKEPSATPPISNLTKTASESISNLSEAGSIKKGERELKIGDRVLVGGTKAGVVRFLGETDFAKGEWCGVELDEPLGKNDGAVAGTRYFQCQPKYGLFAPVHKVTKIGFPSTTPAKAKANAVRRVMATTSASLKRSPSASSLSSMSSVASSVSSRPSRTGLLTETSSRYARKISGTTALQEALKEKQQHIEQLLAERDLERAEVAKATSHVGEIEQELALARDGHDQHVLELEAKMDQLRTMVEAADREKVELLNQLEEEKRKVEDLQFRVEEESITKGDLETQTKLEHARIKELEQSLLFEKTKADKLQRELEDTRVATVSEKSRIMELEKDLALRVQEVAELRRRLESNKPAGDVDMSLSLLQEISSLQEKLEVTRTDHQREITSLKEHFGAREETHQKEIKALYTATEKLSKENESLKSKLEHANKENSDVIALWKSKLETAIASHQQAMEELKVSFSKGLGTETAEFAELKTQIEKMRLDYQHEIENLQNQQDSERAAHAKEMEALRAKLMKVIKEKENSLEAIRSKLDKAEDQHLVEMEDTLNKLQEAEIKVKELEVLQAKCNEQTKVIDNFTSQLKATEEKLLDLDALRKASSEGKSEMKKLRQQLEAAEKQIKHLEIEKNAESSKASSITRELQGRELKLTNLQENLSEVSQVKETLEKELQILKEKFAEASEEAVSVQRSMQETVNKLHQKEEQFNMLSSDLEKLRENLADMEAKFREKDEREEQLIKAKEKLENDIAEIMKMSGDNSSQLTKMNDELRLKERDVEELQLKLTKANENASFLQKSIEDMTVKAEQSQQEAAKKHEEEKKELERKLSDLEKKMETSHNQCQELKARYERATSETKTKHEEILQNLQKTLLDTEDKLKGAREENSGLLQELEELRKQADKAKAAQTAEDAMQIMEQMTKEKTETLASLEDTKQTNAKLQNELDTLKENNLKNVEELNKSKELLTVENQKMEEFRKEIETLKQAAAQKSQQLSALQEENVKLAEELGRSRDEVTSHQKLEEERSVLNNQLLEMKKRESKFIKDADEEKASLQKSISITSALLTEKDAELEKLRNEVTVLRGENASAKSLHSVVQTLESDKVKLELKVKNLELQLKENKRQLSSSSGNTDTQADEDERAQESQIDFLNSVIVDLQRKNQDLKMKVEMMSEAALNGNGDDLNNYDSDDQEKQSKKKPRLFCDICDCFDLHDTEDCPTQAQMSEDPPHSTHHGSRGEERPYCEICEMFGHWATNCNDDETF

SEQ ID NO: 15830 - protein, 1392 aa, Homo sapiens
MSMLKPSGLKAPTKILKPGSTALKTPTAVVAPVEKTISSEKASSTPSSETQEEFVDDFRVGERVWVNGNKPGFIQFLGETQFAPGQWAGIVLDEPIGKNDGSVAGVRYFQCEPLKGIFTRPSKLTRKVQAEDEANGLQTTPASRATSPLCTSTASMVSSSPSTPSNIPQKPSQPAAKEPSATPPISNLTKTASESISNLSEAGSIKKGERELKIGDRVLVGGTKAGVVRFLGETDFAKGEWCGVELDEPLGKNDGAVAGTRYFQCQPKYGLFAPVHKVTKIGFPSTTPAKAKANAVRRVMATTSASLKRSPSASSLSSMSSVASSVSSRPSRTGLLTETSSRYARKISGTTALQEALKEKQQHIEQLLAERDLERAEVAKATSHVGEIEQELALARDGHDQHVLELEAKMDQLRTMVEAADREKVELLNQLEEEKRKVEDLQFRVEEESITKGDLEVATVSEKSRIMELEKDLALRVQEVAELRRRLESNKPAGDVDMSLSLLQEISSLQEKLEVTRTDHQREITSLKEHFGAREETHQKEIKALYTATEKLSKENESLKSKLEHANKENSDVIALWKSKLETAIASHQQAMEELKVSFSKGLGTETAEFAELKTQIEKMRLDYQHEIENLQNQQDSERAAHAKEMEALRAKLMKVIKEKENSLEAIRSKLDKAEDQHLVEMEDTLNKLQEAEIKVKELEVLQAKCNEQTKVIDNFTSQLKATEEKLLDLDALRKASSEGKSEMKKLRQQLEAAEKQIKHLEIEKNAESSKASSITRELQGRELKLTNLQENLSEVSQVKETLEKELQILKEKFAEASEEAVSVQRSMQETVNKLHQKEEQFNMLSSDLEKLRENLADMEAKFREKDEREEQLIKAKEKLENDIAEIMKMSGDNSSQLTKMNDELRLKERDVEELQLKLTKANENASFLQKSIEDMTVKAEQSQQEAAKKHEEEKKELERKLSDLEKKMETSHNQCQELKARYERATSETKTKHEEILQNLQKTLLDTEDKLKGAREENSGLLQELEELRKQADKAKAAQTAEDAMQIMEQMTKEKTETLASLEDTKQTNAKLQNELDTLKENNLKNVEELNKSKELLTVENQKMEEFRKEIETLKQAAAQKSQQLSALQEENVKLAEELGRSRDEVTSHQKLEEERSVLNNQLLEMKKRESKFIKDADEEKASLQKSISITSALLTEKDAELEKLRNEVTVLRGENASAKSLHSVVQTLESDKVKLELKVKNLELQLKENKRQLSSSSGNTDTQADEDERAQESQIDFLNSVIVDLQRKNQDLKMKVEMMSEAALNGNGDDLNNYDSDDQEKQSKKKPRLFCDICDCFDLHDTEDCPTQAQMSEDPPHSTHHGSRGEERPYCEICEMFGHWATNCNDDETF

SEQ ID NO: 15831 - protein, 1197 aa, Homo sapiens [sequence omitted]

SEQ ID NO: 15832 - protein, 771 aa, Homo sapiens
MAEPRGPVDHGVQIRFITEPVSGAEMGTLRRGGRRPAKDARASTYGVAVRVQGIAGQPFVVLNSGEKGGDSFGVQIKGANDQGASGALSSDLELPENPYSQVKGFPAPSQSSTSDEEPGAYWNGKLLRSHSQASLAGPGPVDPSNRSNSMLELAPKVASPGSTIDTAPLSSVDSLINKFDSQLGGQARGRTGRRTRMLPPEQRKRSKSLDSRLPRDTFEERERQSTNHWTSSTKYDNHVGTSKQPAQSQNLSPLSGFSRSRQTQDWVLQSFEEPRRSAQDPTMLQFKSTPDLLRDQQEAAPPGSVDHMKATIYGILREGSSESETSVRRKVSLVLEKMQPLVMVSSGSTKAVAGQGELTRKVEELQRKLDEEVKKRQKLEPSQVGLERQLEEKTEECSRLQELLERRKGEAQQSNKELQNMKRLLDQGEDLRHGLETQVMELQNKLKHVQGPEPAKEVLLKDLLETRELLEEVLEGKQRVEEQLRLRERELTALKGALKEEVASRDQEVEHVRQQYQRDTEQLRRSMQDATQDHAVLEAERQKMSALVRGLQRELEETSEETGHWQSMFQKNKEDLRATKQELLQLRMEKEEMEEELGEKIEVLQRELEQARASAGDTRQVEVLKKELLRTQEELKELQAERQSQEVAGRHRDRELEKQLAVLRVEADRGRELEEQNLQLQKTLQQLRQDCEEASKARGVGTGLRRWRLRVSGGLRSQRVWKVTCHGYVLTSSWVLGMWFKEARIWQGEDTCICVGVGFSEKRLAGGSCSL

SEQ ID NO: 15833 - protein, 510 aa, Homo sapiens
MPGGGASAASGRLLTAAEQRGSREAAGSASRSGFGGSGGGRGGASGPGSGSGGPGGPAGRMSLTPKELSSLLSIISEEAGGGSTFEGLSTAFHHYFSKADHFRLGSVLVMLLQQPDLLPSAAQRLTALYLLWEMYRTEPLAANPFAASFAHLLNPAPPARGGQEPDRPPLSGFLPPITPPEKFFLSQLMLAPPRELFKKTPRQIALMDVGNMGQSVDISGLQLALAERQSELPTQSKASFPSILSDPDPDSSNSGFDSSVASQITEALVSGPKPPIESHFRPEFIRPPPPLHICEDELAWLNPTEPDHAIQWDKSMCVKNSTGVEIKRIMAKAFKSPLSSPQQTQLLGELEKDPKLVYHIGLTPAKLPDLVENNPLVAIEMLLKLMQSSQITEYFSVLVNMDMSLHSMEVVNRLTTAVDLPPEFIHLYISNCISTCEQIKDKYMQNRLVRLVCVFLQSLIRNKIINVQDLFIEVQAFCIEFSRIREAAGLFRLLKTLDTGETPSETKMSK

SEQ ID NO: 15834 - protein, 285 aa, Homo sapiens
MPAATVDHSQRICEVWACNLDEEMKKIRQVIRKYNYVAMDTEFPGVVARPIGEFRSNADYQYQLLRCNVDLLKIIQLGLTFMNEQGEYPPGTSTWQFNFKFNLTEDMYAQDSIELLTTSGIQFKKHEEEGIETQYFAELLMTSGVVLCEGVKWLSFHSGYDFGYLIKILTNSNLPEEELDFFEILRLFFPVIYDVKYLMKSCKNLKGGLQEVAEQLELERIGPQHQAGSDSLLTGMAFFKMREMFFEDHIDDAKYCGHLYGLGSGSSYVQNGTGNAYEEEANKQS

SEQ ID NO: 15835 - protein, 244 aa, Homo sapiens
MPAATVDHSQRICEVWACNLDEEMKKIRQVIRKYNYVAMDTEFPGVVARPIGEFRSNADYQYQLLRCNVDLLKIIQLGLTFMNEQGEYPPGTSTWQFNFKFNLTEDMYAQDSIELLTTSGIQFKKHEEEGIETQYFAELLMTSGVVLCEGVKWLSFHSGYDFGYLIKILTNSNLPEEELDFFEILRLFFPVIYDVKYLMKSCKNLKGGLQEVAEQLELERIGPQHQAGSDSLLTGMAFFKMREV

SEQ ID NO: 15836 - protein, 207 aa, Homo sapiens
MVATCLQVVGFVTSFVGWIGVIVTTSTNDWVVTCGYTIPTCRKLDELGSKGLWADCVMATGLYHCKPLVDILILPGYVQACRALMIAASVLGLPAILLLLTVLPCIRMGQEPGVAKYRRAQLAGVLLILLALCALVATIWFPVCAHRETTIVSFGYSLYAGWIGAVLCLVGGCVILCCAGDAQAFGENRFYYTAGSSSPTHAKSAHV

SEQ ID NO: 15837 - protein, 327 aa, Homo sapiens
MALVHKLLRGTYFLRKFSKPTSALYPFLGIRFAEYSSSLQKPVASPGKASSQRKTEGDLQGDHQKEVALDITSSEEKPDVSFDKAIRDEAIYHFRLLKDEIVDHWRGPEGHPLHEVLLEQAKVVWQFRGKEDLDKWTVTSDKTIGGRSEVFLKMGKNNQSALLYGTLSSEAPQDGESTRSGYCAMISRIPRGAFERKMSYDWSQFNTLYLRVRGDGRPWMVNIKEDTDFFQRTNQMYSYFMFTRGGPYWQEVKIPFSKFFFSNRGRIRDVQHELPLDKISSIGFTLADKVDGPFFLEIDFIGVFTDPAHTEEFAYENSPELNPRLFK

SEQ ID NO: 15838 - protein, 239 aa, Homo sapiens
MEGLPCPCPALPHFWQLRSHLMAEGSRTQAPGKGPPLSIQFLRAQYEGLKRQQRTQAHLLVLPKGGNTPAPAESMVNAVWINKERRSSLSLEEADSEVEGRLEEAAQGCLQAPKSPWHTHLEMHCLVQTSPQDTSHQVHHRGKLVGSDQRLPPEGDTHLFETNQMTQQGTGIPEAAQLPCQVGNTQTKAVESGLKFSTQCPLSIKNPHRSGKPAYYPFPQRKTPRISQAARNLGLYGSA

SEQ ID NO: 15839 - protein, 160 aa, Homo sapiens
MQRVSGLLSWTLSRVLWLSGLSEPGAARQPRIMEEKALEVYDLIRTIRDPEKPNTLEELEVVSESCVEVQEINEEEYLVIIRFTPTVPHCSLATLIGLCLRVKLQRCLPFKHKLEIYISEGTHSTEEDINKQINDKERVAAAMENPNLREIVEQCVLEPD

SEQ ID NO: 15840 - protein, 102 aa, Homo sapiens
MQRVSGLLSWTLSRVLWLSGLSEPGAARQPRIMEEKALEVYDLIRTIRDPEKPNTLEELEVVSESCVEVQEINEEEYLVIIRFTPTVPHCSLATLIVGNLHF

SEQ ID NO: 15841 - protein, 121 aa, Homo sapiens
MWSRRGLGVSRAPLHLLLGVWGPSGRTGGQRKGASLARPGRGGLASCSVGANGKRDVLFLRKTLTNTVEDIQIDNFRRKSDLGVGSPDWKNLLIDVTREDHENSQNNSKRRCKVNCETDQR

SEQ ID NO: 15842 - protein, 1663 aa, Homo sapiens
MGPTSGPSLLLLLLTHLPLALGSPMYSIITPNILRLESEETMVLEAHDAQGDVPVTVTVHDFPGKKLVLSSEKTVLTPATNHMGNVTFTIPANREFKSEKGRNKFVTVQATFGTQVVEKVVLVSLQSGYLFIQTDKTIYTPGSTVLYRIFTVNHKLLPVGRTVMVNIENPEGIPVKQDSLSSQNQLGVLPLSWDIPELVNMGQWKIRAYYENSPQQVFSTEFEVKEYVLPSFEVIVEPTEKFYYIYNEKGLEVTITARFLYGKKVEGTAFVIFGIQDGEQRISLPESLKRIPIEDGSGEVVLSRKVLLDGVQNPRAEDLVGKSLYVSATVILHSGSDMVQAERSGIPIVTSPYQIHFTKTPKYFKPGMPFDLMVFVTNPDGSPAYRVPVAVQGEDTVQSLTQGDGVAKLSINTHPSQKPLSITVRTKKQELSEAEQATRTMQALPYSTVGNSNNYLHLSVLRTELRPGETLNVNFLLRMDRAHEAKIRYYTYLIMNKGRLLKAGRQVREPGQDLVVLPLSITTDFIPSFRLVAYYTLIGASGQREVVADSVWVDVKDSCVGSLVVKSGQSEDRQPVPGQQMTLKIEGDHGARVVLVAVDKGVFVLNKKNKLTQSKIWDVVEKADIGCTPGSGKDYAGVFSDAGLTFTSSSGQQTAQRAELQCPQPAARRRRSVQLTEKRMDKVGKYPKELRKCCEDGMRENPMRFSCQRRTRFISLGEACKKVFLDCCNYITELRRQHARASHLGLARSNLDEDIIAEENIVSRSEFPESWLWNVEDLKEPPKNGISTKLMNIFLKDSITTWEILAVSMSDKKGICVADPFEVTVMQDFFIDLRLPYSVVRNEQVEIRAVLYNYRQNQELKVRVELLHNPAFCSLATTKRRHQQTVTIPPKSSLSVPYVIVPLKTGLQEVEVKAAVYHHFISDGVRKSLKVVPEGIRMNKTVAVRTLDPERLGREGVQKEDIPPADLSDQVPDTESETRILLQGTPVAQMTEDAVDAERLKHLIVTPSGCGEQNMIGMTPTVIAVHYLDETEQWEKFGLEKRQGALELIKKGYTQQLAFRQPSSAFAAFVKRAPSTWLTAYVVKVFSLAVNLIAIDSQVLCGAVKWLILEKQKPDGVFQEDAPVIHQEMIGGLRNNNEKDMALTAFVLISLQEAKDICEEQVNSLPGSITKAGDFLEANYMNLQRSYTVAIAGYALAQMGRLKGPLLNKFLTTAKDKNRWEDPGKQLYNVEATSYALLALLQLKDFDFVPPVVRWLNEQRYYGGGYGSTQATFMVFQALAQYQKDAPDHQELNLDVSLQLPSRSSKITHRIHWESASLLRSEETKENEGFTVTAEGKGQGTLSVVTMYHAKAKDQLTCNKFDLKVTIKPAPETEKRPQDAKNTMILEICTRYRGDQDATMSILDISMMTGFAPDTDDLKQLANGVDRYISKYELDKAFSDRNTLIIYLDKVSHSEDDCLAFKVHQYFNVELIQPGAVKVYAYYNLEESCTRFYHPEKEDGKLNKLCRDELCRCAEENCFIQKSDDKVTLEERLDKACEPGVDYVYKTRLVKVQLSNDFDEYIMAIEQTIKSGSDEVQVGQQRTFISPIKCREALKLEEKKHYLMWGLSSDFWGEKPNLSYIIGKDTWVEHWPEEDECQDEENQKQCQDLGAFTESMVVFGCPN

SEQ ID NO: 15843 - protein, 882 aa, Homo sapiens
MAVRSRRPWMSVALGLVLGFTAASWLIAPRVAELSERKRRGSSLCSYYGRSAAGPRAGAQQPLPQPQSRPRQEQSPPPARQDLQGPPLPEAAPGITSFRSSPWQQPPPLQQRRRGREPEGATGLPGAPAAEGEPEEEDGGAAGQRRDGRPGSSHNGSGDGGAAAPSARPRDFLYVGVMTAQKYLGSRALAAQRTWARFIPGRVEFFSSQQPPNAGQPPPPLPVIALPGVDDSYPPQKKSFMMIKYMHDHYLDKYEWFMRADDDVYIKGDKLEEFLRSLNSSKPLYLGQTGLGNIEELGKLGLEPGENFCMGGPGMIFSREVLRRMVPHIGECLREMYTTHEDVEVGRCVRRFGGTQCVWSYEMQQLFHENYEHNRKGYIQDLHNSKIHAAITLHPNKRPAYQYRLHNYMLSRKISELRYRTIQLHRESALMSKLSNTEVSKEDQQLGVIPSFNHFQPRERNEVIEWEFLTGKLLYSAAENQPPRQSLSSILRTALDDTVLQVMEMINENAKSRGRLIDFKEIQYGYRRVNPMHGVEYILDLLLLYKRHKGRKLTVPVRRHAYLQQLFSKPFFRETEELDVNSLVESINSETQSFSFISNSLKILSSFQGAKEMGGHNEKKVHILVPLIGRYDIFLRFMENFENMCLIPKQNVKLVIILFSRDSGQDSSKHIELIKGYQNKYPKAEMTLIPMKGEFSRGLGLEMASAQFDNDTLLLFCDVDLIFREDFLQRCRDNTIQGQQVYYPIIFSQYDPKVTNGGNPPTDDYFIFSKKTGFWRDYGYGITCIYKSDLLGAGGFDTSIQGWGLEDVDLYNKVILSGLRPFRSQEVGVVHIFHPVHCDPNLDPKQYKMCLGSKASTFASTMQLAELWLEKHLGVRYNRTLS

SEQ ID NO: 15844 - protein, 745 aa, Homo sapiens
MVGPGPTAAAAVEERQRKLQEYLAAKGKLKSQNTKPYLKSKNNCQNQPPSKSTIRPKNDVTNHVVLPVKPKRSISIKLQPRPPNTAGSQKPKLEPPKLLGKRLTSECVSSNPYSKPSSKSFQQCEAGSSTTGELSRKPVGSLNIEQLKTTKQQLTDQGNGKCIDFMNNIHVENESLDNFLKETNKENLLDILTEPERKPDPKLYTRSKPKTDSYNQTKNSLVPKQALGKSSVNSAVLKDRVNKQFVGETQSRTFPVKSQQLSRGADLARPGVKPSRTVPSHFIRTLSKVQSSKKPVVKNIKDIKVNRSQYERPNETKIRSYPVTEQRVKHTKPRTYPSLLQGEYNNRHPNIKQDQKSSQVCIPQTSCVLQKSKAISQRPNLTVGRFNSAIPSTPSIRPNGTSGNKHNNNGFQQKAQTLDSKLKKAVPQNHFLNKTAPKTQADVTTVNGTQTNPNIKKKATAEDRRKQLEEWQKSKGKTYKRPPMELKTKRKVIKEMNISFWKSIEKEEEEKKAQLELSSKINNTLTECLNLIEGGVPSNEILNILSSIPEAEKFAKFWICKAKLLASKGTFDVIGLYEEAIKNGATPIQELRKVVLNILQDSNRTTEGITSDSLVAETSITSVEELAKKMESVKSCLSPKEREQVTATPRIAKAEQHNYPGIKLQIGPIPRINGMPEVQDMKFITPVRRSSRIERAVSRYPEMLQEHDLVVASLDELLEVEETKCFIFRRNEALPVTLGFQTPES

SEQ ID NO: 15845 - protein, 334 aa, Homo sapiens
MQKAQTLDSKLKKAVPQNHFLNKTAPKTQADVTTVNGTQTNPNIKKKATAEDRRKQLEEWQKSKGKTYKRPPMELKTKRKVIKEMNISFWKSIEKEEEEKKAQLELSSKINNTLTECLNLIEGGVPSNEILNILSSIPEAEKFAKFWICKAKLLASKGTFDVIGLYEEAIKNGATPIQELRKVVLNILQDSNRTTEGITSDSLVAETSITSVEELAKKMESVKSCLSPKEREQVTATPRIAKAEQHNYPGIKLQIGPIPRINGMPEVQDMKFITPVRRSSRIERAVSRYPEMLQEHDLVVASLDELLEVEETKCFIFRRNEALPVTLGFQTPES

SEQ ID NO: 15846 - protein, 580 aa, Homo sapiens
MNNIHVENESLDNFLKETNKENLLDILTEPERKPDPKLYTRSKPKTDSYNQTKNSLVPKQALGKSSVNSAVLKDRVNKQFVGETQSRTFPVKSQQLSRGADLARPGVKPSRTVPSHFIRTLSKVQSSKKPVVKNIKDIKVNRSQYERPNETKIRSYPVTEQRVKHTKPRTYPSLLQGEYNNRHPNIKQDQKSSQVCIPQTSCVLQKSKAISQRPNLTVGRFNSAIPSTPSIRPNGTSGNKHNNNGFQQKAQTLDSKLKKAVPQNHFLNKTAPKTQADVTTVNGTQTNPNIKKKATAEDRRKQLEEWQKSKGKTYKRPPMELKTKRKVIKEMNISFWKSIEKEEEEKKAQLELSSKINNTLTECLNLIEGGVPSNEILNILSSIPEAEKFAKFWICKAKLLASKGTFDVIGLYEEAIKNGATPIQELRKVVLNILQDSNRTTEGITSDSLVAETSITSVEELAKKMESVKSCLSPKEREQVTATPRIAKAEQHNYPGIKLQIGPIPRINGMPEVQDMKFITPVRRSSRIERAVSRYPEMLQEHDLVVASLDELLEVEETKCFIFRRNEALPVTLGFQTPES

SEQ ID NO: 15847 - protein, 163 aa, Homo sapiens
MVGGGGVGGGLLENANPLIYQRSGERPVTAGEEDEQVPDSIDAREIFDLIRSINDPEHPLTLEELNVVEQVRVQVSDPESTVAVAFTPTIPHCSMATLIGLSIKVKLLRSLPQRFKMDVHITPGTHASEHAVNKQLADKERVAAALENTHLLEVVNQCLSARS

SEQ ID NO: 15848 - protein, 652 aa, Homo sapiens
MNWVGGSRSRVLIKQERRKQKEYFEKHRLKSKMKSLGVLSPVKNSAVSLDILNLYMVNQISCKKKIPETVRKPTHVNMNRDIKMPLRKHNLELTMSPHCVPSKLCLDDTETNVNCQRLSSKEDLGPVQSQGMDSYSMLHPQFSKIENCSFTPSSFSVELPSNRHISKLNFTSGIAPTPQKLAYEKKQNDQRSTVNCSDSLLSKLNKSQDVFSPSHKTTRFGTLFERLNSLGNRNLLTKSPAVIMDEDCRSTDEIRQSDYITEKHSIQHIWGKNGKEVSNFLEDVNQSTPNLLSENCDSFVSQNMINVLNIDEQRIKKTFNKCDYDSMGDTCVVTSSDKNHVTDRCIRNIFTVPELTFSNSTLNKTSYPEKCQPNKKYQREYNKNERNDLSTSFENDYYPSSSERKEKFENDYQEKTPQKSIQKYPANSMGNIPSEELHSKQSWDFGLDEILMEEGGIYSLKSKRISTKKISLDSAQSSRSTSYSPRPTDSCFSSSSDLPSEDEDQISQQIEDSNRMTIKTKEKMNNFYVERMAKLSGDRIVKNDDKIHKQNENFYQFSVKNNTDQFPQLQCNSAHILQNKTNDNCVLQAARCDAGIQTESESVMEEKLDVAIQCDLISKCTCRSDVSLCNLERCSGNIKADTTGGQEIHKNN

SEQ ID NO: 15849 - protein, 477 aa, Homo sapiens
MNWVGGSRSRVLIKQERRKQKEYFEKHRLKSKMKSLGVLSPVKNSAVSLDILNLYMVNQISCKKKIPETVRKPTHVNMNRDIKMPLRKHNLELTMSPHCVPSKLCLDDTETNVNCQRLSSKEDLGPVQSQGMDSYSMLHPQFSKIENCSFTPSSFSVELPSNRHISKLNFTSGIAPTPQKLAYEKKQNDQRSTVNCSDSLLSKLNKSQDVFSPSHKTTRFGTLFERLNSLGNRNLLTKSPAVIMDEDCRSTDEIRQSDYITEKHSIQHIWGKNGKEVSNFLEDVNQSTPNLLSENCDSFVSQNMINVLNIDEQRIKKTFNKCDYDSMGDTCVVTSSDKNHVTDRCIRNIFTVPELTFSNSTLNKTSYPEKCQPNKKYQREYNKNERNDLSTSFENDYYPSSSERKEKFENDYQEKTPQKSIQKYPANSMGNIPSEELHSKQSWDFGLDEILMEEGGIYSLKSKRISTKKICQYNCIS

SEQ ID NO: 15850 - protein, 394 aa, Homo sapiens
MNRDIKMPLRKHNLELTMSPHCVPSKLCLDDTETNVNCQRLSSKEDLGPVQSQGMDSYSMLHPQFSKIENCSFTPSSFSVELPSNRHISKLNFTSGIAPTPQKLAYEKKQNDQRSTVNCSDSLLSKLNKSQDVFSPSHKTTRFGTLFERLNSLGNRNLLTKSPAVIMDEDCRSTDEIRQSDYITEKHSIQHIWGKNGKEVSNFLEDVNQSTPNLLSENCDSFVSQNMINVLNIDEQRIKKTFNKCDYDSMGDTCVVTSSDKNHVTDRCIRNIFTVPELTFSNSTLNKTSYPEKCQPNKKYQREYNKNERNDLSTSFENDYYPSSSERKEKFENDYQEKTPQKSIQKYPANSIWCTKCSEFKVIFTLIHYVLMLNLFLKSLRTAFQAFLNNDLQL

SEQ ID NO: 15851 - protein, 386 aa, Homo sapiens
MLLPKKMKLLLFLVSQMAILALFFHMYSHNISSLSMKAQPERMHVLVLSSWRSGSSFVGQLFGQHPDVFYLMEPAWHVWMTFKQSTAWMLHMAVRDLIRAVFLCDMSVFDAYMEPGPRRQSSLFQWENSRALCSAPACDIIPQDEIIPRAHCRLLCSQQPFEVVEKACRSYSHVVLKEVRFFNLQSLYPLLKDPSLNLHIVHLVRDPRAVFRSRERTKGDLMIDSRIVMGQHEQKLKKEDQPYYVMQVICQSQLEIYKTIQSLPKALQERYLLVRYEDLARAPVAQTSRMYEFVGLEFLPHLQTWVHNITRGKGMGDHAFHTNARDALNVSQAWRWSLPYEKVSRLQKACGDAMNLLGYRHVRSEQEQRNLLLDLLSTWTVPEQIH

SEQ ID NO: 15852 - protein, 135 aa, Homo sapiens
MFQNLQGTFEKEIGKIIPFTIAFKRAEAVEPDGCVQSWRCCLPCDLGQASRFIHTTVCSAIRWRSCKGERNFAERHILPAELEEQSNHAGMGPILPAMPSVDGNHFQHPAGDCHPYGILCLQAHSASVTARQVLQ

SEQ ID NO: 15853 - protein, 414 aa, Homo sapiens
MEMQQNCSISCFWETQPLGCVKISCIFYHSKPRNINGLFLPPSSNITLQKEIQEGIPLQSQSQEPLKPQENISRPIHHPLVLKTNFEEEEEVDEQNDASSLWTKTPEEIEEKRAIKEMCYKSGEYYRFHTPPDILSSKSMTPTAEKQLEKPLENGSELQEGDSLTVPTKLSQYERQGEIKTSLHGKPKTDIAAFENGGGDCYVPQRVIFLGVDESEALTEEKEITISKCSNTKDNKDSPHPKHSLTTRLVPTTHVLNATENISMKCREDPSSMNDVQPVKKPHFKGVKKRKWIYDEPQNFPNSGMQRAVQAPRPQNKMSYHRNNKNRNAENASYIHVQRDAVRTVALNAPSRSRPTHGSYNKVHANREPKPNLSPDKYTSTSYNDSAWRKRIPFSKTYSKSEKIYPEPRRNGSK

SEQ ID NO: 15854 - protein, 589 aa, Homo sapiens
MSVSVHENRKSRASSGSINIYLFHKSSYADSVLTHLNLLRQQRLFTDVLLHAGNRTFPCHRAVLAACSRYFEAMFSGGLKESQDSEVNFDNSIHPEVLELLLDYAYSSRVIINEENAESLLEAGDMLEFQDIRDACAEFLEKNLHPTNCLGMLLLSDAHQCTKLYELSWRMCLSNFQTIRKNEDFLQLPQDMVVQLLSSEELETEDERLVYESAINWISYDLKKRYCYLPELLQTVRLALLPAIYLMENVAMEELITKQRKSKEIVEEAIRCKLKILQNDGVVTSLCARPRKTGHALFLLGGQTFMCDKLYLVDQKAKEIIPKADIPSPRKEFSACAIGCKVYITGGRGSENGVSKDVWVYDTLHEEWSKAAPMLVARFGHGSAELKHCLYVVGGHTAATGCLPASPSVSLKQVEHYDPTINKWTMVAPLREGVSNAAVVSAKLKLFAFGGTSVSHDKLPKVQCYDQCENRWTVPATCPQPWRYTAAAVLGNQIFIMGGDTEFSACSAYKFNSETYQWTKVGDVTAKRMSCHAVASGNKLYVVGGYFGIQRCKTLDCYDPTLDVWNSITTVPYSLIPTAFVSTWKHLPS

SEQ ID NO: 15855 - protein, 516 aa, Homo sapiens
MFSGGLKESQDSEVNFDNSIHPEVLELLLDYAYSSRVIINEENAESLLEAGDMLEFQDIRDACAEFLEKNLHPTNCLGMLLLSDAHQCTKLYELSWRMCLSNFQTIRKNEDFLQLPQDMVVQLLSSEELETEDERLVYESAINWISYDLKKRYCYLPELLQTVRLALLPAIYLMENVAMEELITKQRKSKEIVEEAIRCKLKILQNDGVVTSLCARPRKTGHALFLLGGQTFMCDKLYLVDQKAKEIIPKADIPSPRKEFSACAIGCKVYITGGRGSENGVSKDVWVYDTLHEEWSKAAPMLVARFGHGSAELKHCLYVVGGHTAATGCLPASPSVSLKQVEHYDPTINKWTMVAPLREGVSNAAVVSAKLKLFAFGGTSVSHDKLPKVQCYDQCENRWTVPATCPQPWRYTAAAVLGNQIFIMGGDTEFSACSAYKFNSETYQWTKVGDVTAKRMSCHAVASGNKLYVVGGYFGIQRCKTLDCYDPTLDVWNSITTVPYSLIPTAFVSTWKHLPS

SEQ ID NO: 15856 - protein, 414 aa, Homo sapiens
MAMVVSTWRDPQDEVPGSQGSQASQAPPVPGPPPGAPHTPQTPGQGGPASTPAQTAAGGQGGPGGPGSDKQQQQQHIECVVCGDKSSGKHYGQFTCEGCKSFFKRSVRRNLSYTCRANRNCPIDQHHRNQCQYCRLKKCLKVGMRREAVQRGRMPPTQPTHGQFALTNGDPLNCHSYLSGYISLLLRAEPYPTSRFGSQCMQPNNIMGIENICELAARMLFSAVEWARNIPFFPDLQITDQVALLRLTWSELFVLNAAQCSMPLHVAPLLAAAGLHASPMSADRVVAFMDHIRIFQEQVEKLKALHVDSAEYSCLKAIVLFTSDACGLSDVAHVESLQEKSQCALEEYVRSQYPNQPTRFGKLLLRLPSLRTVSSSVIEQLFFVRLVGKTPIETLIRDMLLSGSSFNWPYMAIQ

SEQ ID NO: 15857 - protein, 281 aa, Homo sapiens
MQAVWDLEQGKYGFAVQRGRMPPTQPTHGQFALTNGDPLNCHSYLSGYISLLLRAEPYPTSRFGSQCMQPNNIMGIENICELAARMLFSAVEWARNIPFFPDLQITDQVALLRLTWSELFVLNAAQCSMPLHVAPLLAAAGLHASPMSADRVVAFMDHIRIFQEQVEKLKALHVDSAEYSCLKAIVLFTSDACGLSDVAHVESLQEKSQCALEEYVRSQYPNQPTRFGKLLLRLPSLRTVSSSVIEQLFFVRLVGKTPIETLIRDMLLSGSSFNWPYMAIQ

SEQ ID NO: 15858 - protein, 261 aa, Homo sapiens
MPPTQPTHGQFALTNGDPLNCHSYLSGYISLLLRAEPYPTSRFGSQCMQPNNIMGIENICELAARMLFSAVEWARNIPFFPDLQITDQVALLRLTWSELFVLNAAQCSMPLHVAPLLAAAGLHASPMSADRVVAFMDHIRIFQEQVEKLKALHVDSAEYSCLKAIVLFTSDACGLSDVAHVESLQEKSQCALEEYVRSQYPNQPTRFGKLLLRLPSLRTVSSSVIEQLFFVRLVGKTPIETLIRDMLLSGSSFNWPYMAIQ

SEQ ID NO: 15859 - protein, 152 aa, Homo sapiens
MERLKSHKPATMTIMVEDIMKLLCSLSGERKMKAAVKHSGKGALVTGAMAFVGGLVGGPPGLAVGGAVGGLLGAWMTSGQFKPVPQILMELPPAEQQRLFNEAAAIIRHLEWTDAVQLTALVMGSEALQQQLLAMLVNYVTKELRAEIQYDD

SEQ ID NO: 15860 - protein, 77 aa, Homo sapiens
MTSGQFKPVPQILMELPPAEQQRLFNEAAAIIRHLEWTDAVQLTALVMGSEALQQQLLAMLVNYVTKELRAEIQYDD

SEQ ID NO: 15861 - protein, 107 aa, Homo sapiens
MTIMVEDIMKLLCSLSGERKMKAAVKHSGKGALVTGAMAFVGGLVGGPPGLAVGGAVGGLLGAWMTSGQFKPVPQILMELPPAEQQRLFNEAAAIIRPCSSSCWPCW

SEQ ID NO: 15862 - protein, 141 aa, Homo sapiens
MTIMVEDIMKLLCSLSGERKMKAAVKHSGKGALVTGAMAFVGGLVGGPPGLAVGGAVGGLLGAWMTSGQFKPVPQILMELPPAEQQRLFNEAAAIIRHLEWTDAVQLTALVMGSEALQQQLLAMLVNYVTKELRAEIQYDD

SEQ ID NO: 15863 - protein, 79 aa, Homo sapiens
MHPDLSPHLHTEECNVLINLLKECHKNHNILKFFGYCNDVDRELRKCLKNEYVENRTKSREHGIAMRKKLFNPPEESEK

SEQ ID NO: 15864 - protein, 619 aa, Homo sapiens
MAASPGSGSANPRKFSEKIALHTQRQAEETRAFEQLMTDLTLSRVQFQKLQQLRLTQYHGGSLPNVSQLRSSASEFQPSFHQADNVRGTRHHGLVERPSRNRFHPLHRRSGDKPGRQFDGSAFGANYSSQPLDESWPRQQPPWKDEKHPGFRLTSALNRTNSDSALHTSALSTKPQDPYGGGGQSAWPAPYMGFCDGENNGHGEVASFPGPLKEENLLNVPKPLPKQLWETKEIQSLSGRPRSCDVGGGNAFPHNGQNLGLSPFLGTLNTGGSLPDLTNLHYSTPLPASLDTTDHHFGSMSVGNSVNNIPAAMTHLGIRSSSGLQSSRSNPSIQATLNKTVLSSSLNNHPQTSVPNASALHPSLRLFSLSNPSLSTTNLSGPSRRRQPPVSPLTLSPGPEAHQGFSRQLSSTSPLAPYPTSQMVSSDRSQLSFLPTEAQAQVSPPPPYPAPQELTQPLLQQPRAPEAPAQQPQAASSLPQSDFQLLPAQGSSLTNFFPDVGFDQQSMRPGPAFPQQVPLVQQGSRELQDSFHLRPSPYSNCGSLPNTILPEDSSTSLFKDLNSALAGLPEVSLNVDTPFPLEEELQIEPLSLDGLNMLSDSSMGLLDPSVEETFRADRL

SEQ ID NO: 15865 - protein, 618 aa, Homo sapiens
MAASPGSGSANPRKFSEKIALHTQRQAEETRAFEQLMTDLTLSRVQFQKLQQLRLTQYHGGSLPNVSQLRSSASEFQPSFHQADNVRGTRHHGLVERPSRNRFHPLHRRSGDKPGRQFDGSAFGANYSSQPLDESWPRQQPPWKDEKHPGFRLTSALNRTNSDSALHTSALSTKPQDPYGGGGQSAWPAPYMGFCDGENNGHGEVASFPGPLKEENLLNVPKPLPKQLWETKEIQSLSGRPRSCDVGGGNAFPHNGQNLGLSPFLGTLNTGGSLPDLTNLHYSTPLPASLDTTDHHFGSMSVGNSVNNIPAAMTHLGIRSSSGLQSSRSNPSIQATLNKTVLSSSLNNHPQTSVPNASALHPSLRLFSLSNPSLSTTNLSGPSRRRQPPVSPLTLSPGPEAHQGFSRQLSSTSPLAPYPTSQMVSSDRSQLSFLPTEAQAQVSPPPPYPAPQELTQPLLQQPRAPEAPAQQPQAASSLPQSDFQLLPAQGSSLTNFFPDVGFDQQSMRPGPAFPQQVPLVQQGSRELQDSFHLRPSPYSNCGSLPNTILPDSSTSLFKDLNSALAGLPEVSLNVDTPFPLEEELQIEPLSLDGLNMLSDSSMGLLDPSVEETFRADRL

SEQ ID NO: 15866 - protein, 327 aa, Homo sapiens
MAAPGSCALWSYCGRGWSRAMRGCQLLGLRSSWPGDLLSARLLSQEKRAAETHFGFETVSEEEKGGKVYQVFESVAKKYDVMNDMMSLGIHRVWKDLLLWKMHPLPGTQLLDVAGGTGDIAFRFLNYVQSQHQRKQKRQLRAQQNLSWEEIAKEYQNEEDSLGGSRVVVCDINKEMLKVGKQKALAQGYRAGLAWVLGDAEELPFDDDKFDIYTIAFGIRNVTHIDQALQEAHRVLKPGGRFLCLEFSQVNNPLISRLYDLYSFQVIPVLGEVIAGDWKSYQYLVESIRRFPSQEEFKDMIEDAGFHKVTYESLTSGIVAIHSGFKL

SEQ ID NO: 15867 - protein, 350 aa, Homo sapiens
MPGPAAGSRARVYAEVNSLRSREYWDYEAHVPSWGNQDDYQLVRKLGRGKYSEVFEAINITNNERVVVKILKPVKKKKIKREVKILENLRGGTNIIKLIDTVKDPVSKTPALVFEYINNTDFKQLYQILTDFDIRFYMYELLKALDYCHSKGIMHRDVKPHNVMIDHQQKKLRLIDWGLAEFYHPAQEYNVRVASRYFKGPELLVDYQMYDYSLDMWSLGCMLASMIFRREPFFHGQDNYDQLVRIAKVLGTEELYGYLKKYHIDLDPHFNDILGQHSRKRWENFIHSENRHLVSPEALDLLDKLLRYDHQQRLTAKEAMEHPYFYPVVKEQSQPCADNAVLSSGLTAAR

SEQ ID NO: 15868 - protein, 391 aa, Homo sapiens [sequence omitted]

SEQ ID NO: 15869 - protein, 160 aa, Homo sapiens
MTTQEDTTGLHQKTSLWTMSRPGAKKVMNSYFIAGCGPAVCYYAVSWLRQGFSINLTSFGRIPWPHAGVGTCPSPQSWISPFLQSHREHHYAKTSSHSQPSPQSLALCLAYSRCSINICQMTECISLASGCHQALREPGRSEESFWIPATPYISNIFSES

SEQ ID NO: 15870 - protein, 31 aa, Homo sapiens
MTTQEDTTGLHQKTSLWTMSRPGAKKVSVST

SEQ ID NO: 15871 - protein, 180 aa, Homo sapiens
MQAEGRGTGGSTGDADGPGGPGIPDGPGGNAGGPGEAGATGGRGPRGAGAARASGPGGGAPRGPHGGAASGLNGCCRCGARGPESRLLEFYLAMPFATPMEAELARRSLAQDAPPLPVPGVLLKEFTVSGNILTIRLTAADHRQLQLSISSCLQQLSLLMWITQCFLPVFLAQPPSGQRR

SEQ ID NO: 15872 - protein, 168 aa, Homo sapiens
MQAEGRGTGGSTGDADGPGGPGIPDGPGGNAGGPGEAGATGGRGPRGAGAARASGPGGGAPRGPHGGAASGLNGCCRCGARGPESRLLEFYLAMPFATPMEAELARRSLAQDAPPLPVPGVLLKEFTVSGNILTMSVQDQDRDGAWVGGGHSVAGWGLGSAYTPRSGC

SEQ ID NO: 15873 - protein, 598 aa, Homo sapiens
MENSSAASASSEAGSSRSQEIEELERFIDSYVLEYQVQGLLADKTEGDGESERTQSHISQWTADCSEPLDSSCSFSRGRAPPQQNGSKDNSLDMLGTDIWAANTFDSFSGATWDLQPEKLDFTQFHRKVRHTPKQPLPHIDREGCGKGKLEDGDGINLNDIEKVLPAWQGYHPMPHEVEIAHTKKLFRRRRNDRRRQQRPPGGNKPQQHGDHQPGSAKHNRDHQKSYQGGSAPHPSGRPTHHGYSQNRRWHHGNMKHPPGDKGEAGAHRNAKETMTIENPKLEDTAGDTGHSSLEAPRSPDTLAPVASERLPPQQSGGPEVETKRKDSILPERIGERPKITLLQSSKDRLRRRLKEKDEVAVETTTPQQNKMDKLIEILNSMRNNSSDVDTKLTTFMEEAQNSTNSEEMLGEIVRTIYQKAVSDRSFAFTAAKLCDKMALFMVEGTKFRSLLLNMLQKDFTVREELQQQDVERWLGFITFLCEVFGTMRSSTGEPFRVLVCPIYTCLRELLQSQDVKEDAVLCCSMELQSTGRLLEEQLPEMMTELLASARDKMLCPSESMLTRSLLLEVIELHANSWNPLTPPITQYYNRTIQKLTA

SEQ ID NO: 15874 - protein, 600 aa, Homo sapiens
MENSSAASASSEAGSSRSQEIEELERFIDSYVLEYQVQGLLADKTEGDGESERTQSHISQWTADCSEPLDSSCSFSRGRAPPQQNGSKDNSLDMLGTDIWAANTFDSFSGATWDLQPEKLDFTQFHRKVRHTPKQPLPHIDREGCGKGKLEDGDGINLNDIEKVLPAWQGYHPMPHEVEIAHTKKLFRRRRNDRRRQQRPPGGNKPQQHGDHQPGSAKHNRDHQKSYQGGSAPHPSGRPTHHGYSQNRRWHHGNMKHPPGDKGEAGAHRNAKETMTIENPKLEDTAGDTGHSSLEAPRSPDTLAPVASERLPPQQSGGPEVETKRKDSILPERIGERPKITLLQSSKDRLRRRLKEKVPDEVAVETTTPQQNKMDKLIEILNSMRNNSSDVDTKLTTFMEEAQNSTNSEEMLGEIVRTIYQKAVSDRSFAFTAAKLCDKMALFMVEGTKFRSLLLNMLQKDFTVREELQQQDVERWLGFITFLCEVFGTMRSSTGEPFRVLVCPIYTCLRELLQSQDVKEDAVLCCSMELQSTGRLLEEQLPEMMTELLASARDKMLCPSESMLTRSLLLEVIELHANSWNPLTPPITQYYNRTIQKLTA

SEQ ID NO: 15875 - protein, 198 aa, Homo sapiens
MHHRNDSQRLGKAGCPPEPSLQMANTNFLSTLSPEHCRPLAGECMNKLKCGAAEAEIMNLPERVGTFSAIPALGGISLPPGVIVMTALHSPAAASAAVTDSAFQIANLADCPQNHSSSSSSSSGGAGGANPAKKKRKRCGVCVPCKRLINCGVCSSCRNRKTGHQICKFRKCEELKKKPGTSLERTPVPSAEAFRWFF

SEQ ID NO: 15876 - protein, 466 aa, Homo sapiens
MVSQALRLLCLLLGLQGCLAAGGVAKASGGETRDMPWKPGPHRVFVTQEEAHGVLHRRRRANAFLEELRPGSLERECKEEQCSFEEAREIFKDAERTKLFWISYSDGDQCASSPCQNGGSCKDQLQSYICFCLPAFEGRNCETHKDDQLICVNENGGCEQYCSDHTGTKRSCRCHEGYSLLADGVSCTPTVEYPCGKIPILEKRNASKPQGRIVGGKVCPKGECPWQVLLLVNGAQLCGGTLINTIWVVSAAHCFDKIKNWRNLIAVLGEHDLSEHDGDEQSRRVAQVIIPSTYVPGTTNHDIALLRLHQPVVLTDHVVPLCLPERTFSERTLAFVRFSLVSGWGQLLDRGATALELMVLNVPRLMTQDCLQQSRKVGDSPNITEYMFCAGYSDGSKDSCKGDSGGPHATHYRGTWYLTGIVSWGQGCATVGHFGVYTRVSQYIEWLQKLMRSEPRPGVLLRAPFP

SEQ ID NO: 15877 - protein, 444 aa, Homo sapiens
MVSQALRLLCLLLGLQGCLAAVFVTQEEAHGVLHRRRRANAFLEELRPGSLERECKEEQCSFEEAREIFKDAERTKLFWISYSDGDQCASSPCQNGGSCKDQLQSYICFCLPAFEGRNCETHKDDQLICVNENGGCEQYCSDHTGTKRSCRCHEGYSLLADGVSCTPTVEYPCGKIPILEKRNASKPQGRIVGGKVCPKGECPWQVLLLVNGAQLCGGTLINTIWVVSAAHCFDKIKNWRNLIAVLGEHDLSEHDGDEQSRRVAQVIIPSTYVPGTTNHDIALLRLHQPVVLTDHVVPLCLPERTFSERTLAFVRFSLVSGWGQLLDRGATALELMVLNVPRLMTQDCLQQSRKVGDSPNITEYMFCAGYSDGSKDSCKGDSGGPHATHYRGTWYLTGIVSWGQGCATVGHFGVYTRVSQYIEWLQKLMRSEPRPGVLLRAPFP

SEQ ID NO: 15878 - protein, 251 aa, Homo sapiens
MEGGAAAATPTALPYYVAFSQLLGLTLVAMTGAWLGLYRGGIAWESDLQFNAHPLCMVIGLIFLQGNALLVYRVFRNEAKRTTKVLHGLLHIFALVIALVGLVAVFDYHRKKGYADLYSLHSWCGILVFVLYFVQWLVGFSFFLFPGASFSLRSRYRPQHIFFGATIFLLSVGTALLGLKEALLFNLGGKYSAFEPEGVLANVLGLLLACFGGAVLYILTRADWKRPSQAEEQALSMDFKTLTEGDSPGSQ

SEQ ID NO: 15879 - protein, 138 aa, Homo sapiens
MEGGAAAATPTALPYYVAFSQLLGLTLVAMTGAWLGLYRGGIAWESDLQFNAHPLCMVIGLIFLQGNALLVYRVFRNEAKRTTKVLHGLLHIFALVIALVGLVAVFDYHRKKGYADLYSLHSWCGILVFVLYFVQGQV

SEQ ID NO: 15880 - protein, 179 aa, Homo sapiens
MSGGRAPAVLLGGVASLLLSFVWMPALLPVASRLLLLPRVLLTMASGSPPTQPSPASDSGSGYVPGSVSAAFVTCPNEKVAKEIARAVVEKRLAACVNLIPQITSIYEWKGKIEEDSEVLMMIKTQSSLVPALTDFVRSVHPYEVAEVIALPVEQGNFPYLQWVRQVTESVSDSITVLP

SEQ ID NO: 15881 - protein, 198 aa, Homo sapiens
MIGSGLAGSGGAGGPSSTVTWCALFSNHVAATQASLLLSFVWMPALLPVASRLLLLPRVLLTMASGSPPTQPSPASDSGSGYVPGSVSAAFVTCPNEKVAKEIARAVVEKRLAACVNLIPQITSIYEWKGKIEEDSEVLMMIKTQSSLVPALTDFVRSVHPYEVAEVIALPVEQGNFPYLQWVRQVTESVSDSITVLP

SEQ ID NO: 15882 - protein, 156 aa, Homo sapiens
MPALLPVASRLLLLPRVLLTMASGSPPTQPSPASDSGSGYVPGSVSAAFVTCPNEKVAKEIARAVVEKRLAACVNLIPQITSIYEWKGKIEEDSEVLMMIKTQSSLVPALTDFVRSVHPYEVAEVIALPVEQGNFPYLQWVRQVTESVSDSITVLP

SEQ ID NO: 15883 - protein, 79 aa, Homo sapiens
MQALRVSQALIRSFSSTARNRFQNRVREKQKLFQEDNDIPLYLKGGIVDNILYRVTMTLCLGGTVYSLYSLGWASFPRN

SEQ ID NO: 15884 - protein, 83 aa, Homo sapiens
MLRNLLALRQIGQRTISTASRRHFKNKVPEKQKLFQEDDEIPLYLKGGVADALLYRATMILTVGGTAYAIYELAVASFPKKQE

SEQ ID NO: 15885 - protein, 273 aa, Homo sapiens
MKRQGASSERKRARIPSGKAGAANGFLMEVCVDSVESAVNAERGGADRIELCSGLSEGGTTPSMGVLQVVKQSVQIPVFVMIRPRGGDFLYSDREIEVMKADIRLAKLYGADGLVFGALTEDGHIDKELCMSLMAICRPLPVTFHRAFDMVHDPMAALETLLTLGFERVLTSGCDSSALEGLPLIKRLIEQAKGRIVVMPGGGITDRNLQRILEGSGATEFHCSARSTRDSGMKFRNSSVAMGASLSCSEYSLKVTDVTKVRTLNAIAKNILV

SEQ ID NO: 15886 - protein, 3623 aa, Homo sapiens
MMNMSLPFLWSLLTLLIFAEVNGEAGELELQRQKRSINLQQPRMATERGNLVFLTGSAQNIEFRTGSLGKIKLNDEDLSECLHQIQKNKEDIIELKGSAIGLPQNISSQIYQLNSKLVDLERKFQGLQQTVDKKVCSSNPCQNGGTCLNLHDSFFCICPPQWKGPLCSADVNECEIYSGTPLSCQNGGTCVNTMGSYSCHCPPETYGPQCASKYDDCEGGSVARCVHGICEDLMREQAGEPKYSCVCDAGWMFSPNSPACTLDRDECSFQPGPCSTLVQCFNTQGSFYCGACPTGWQGNGYICEDINECEINNGGCSVAPPVECVNTPGSSHCQACPPGYQGDGRVCTLTDICSVSNGGCHPDASCSSTLGSLPLCTCLPGYTGNGYGPNGCVQLSNICLSHPCLNGQCIDTVSGYFCKCDSGWTGVNCTENINECLSNPCLNGGTCVDGVDSFSCECTRLWTGALCQVPQQVCGESLSGINGSFSYRSPDVGYVHDVNCFWVIKTEMGKVLRITFTFFRLESMDNCPHEFLQVYDGDSSSAFQLGRFCGSSLPHELLSSDNALYFHLYSEHLRNGRGFTVRWETQQPECGGILTGPYGSIKSPGYPGNYPPGRDCVWIVVTSPDLLVTFTFGTLSLEHHDDCNKDYLEIRDGPLYQDPLLGKFCTTFSVPPLQTTGPFARIHFHSDSQISDQGFHITYLTSPSDLRCGGNYTDPEGELFLPELSGPFTHTRQCVYMMKQPQGEQIQINFTHVELQCQSDSSQNYIEVRDGETLLGKVCGNGTISHIKSITNSVWIRFKIDASVEKASFRAVYQVACGDELTGEGVIRSPFFPNVYPGERTCRWTIHQPQSQVILLNFTVFEIGSSAHCETDYVEIGSSSILGSPENKKYCGTDIPSFITSVYNFLYVTFVKSSSTENHGFMAKFSAEDLACGEILTESTGTIQSPGHPNVYPHGINCTWHILVQPNHLIHLMFETFHLEFHYNCTNDYLEVYDTDSETSLGRYCGKSIPPSLTSSGNSLMLVFVTDSDLAYEGFLINYEAISAATACLQDYTDDLGTFTSPNFPNNYPNNWECIYRITVRTGQLIAVHFTNFSLEEAIGNYYTDFLEIRDGGYEKSPLLGIFYGSNLPPTIISHSNKLWLKFKSDQIDTRSGFSAYWDGSSTGCGGNLTTSSGTFISPNYPMPYYHSSECYWWLKSSHGSAFELEFKDFHLEHHPNCTLDYLAVYDGPSSNSHLLTQLCGDEKPPLIRSSGDSMFIKLRTDEGQQGRGFKAEYRQTCENVVIVNQTYGILESIGYPNPYSENQHCNWTIRATTGNTVNYTFLAFDLEHHINCSTDYLELYDGPRQMGRYCGVDLPPPGSTTSSKLQVLLLTDGVGRREKGFQMQWFVYGCGGELSGATGSFSSPGFPNRYPPNKECIWYIRTDPGSSIQLTIHDFDVEYHSRCNFDVLEIYGGPDFHSPRIAQLCTQRSPENPMQVSSTGNELAIRFKTDLSINGRGFNASWQAVTGGCGGIFQAPSGEIHSPNYPSPYRSNTDCSWVIRVDRNHRVLLNFTDFDLEPQDSCIMAYDGLSSTMSRLARTCGREQLANPIVSSGNSLFLRFQSGPSRQNRGFRAQFRQACGGHILTSSFDTVSSPRFPANYPNNQNCSWIIQAQPPLNHITLSFTHFELERSTTCARDFVEILDGGHEDAPLRGRYCGTDMPHPITSFSSALTLRFVSDSSISAGGFHTTVTASVSACGGTFYMAEGIFNSPGYPDIYPPNVECVWNIVSSPGNRLQLSFISFQLEDSQDCSRDFVEIREGNATGHLVGRYCGNSFPLNYSSIVGHTLWVRFISDGSGSGTGFQATFMKIFGNDNIVGTHGKVASPFWPENYPHNSNYQWTVNVNASHVVHGRILEMDIEEIQNCYYDKLRIYDGPSIHARLIGAYCGTQTESFSSTGNSLTFHFYSDSSISGKGFLLEWFAVDAPDGVLPTIAPGACGGFLRTGDAPVFLFSPGWPDSYSNRVDCTWLIQAPDSTVELNILSLDIESHRTCAYDSLVIRDGDNNLAQQLAVLCGREIPGPIRSTGEYMFIRFTSDSSVTRAGFNASFHKSCGGYLHADRGIITSPKYPETYPSNLNCSWHVLVQSGLTIAVHFEQPFQIPNGDSSCNQGDYLVLRNGPDICSPPLGPPGGNGHFCGSHASSTLFTSDNQMFVQFISDHSNEGQGFKIKYEAKSLACGGNVYIHDADSAGYVTSPNHPHNYPPHADCIWILAAPPETRIQLQFEDRFDIEVTPNCTSNYLELRDGVDSDAPILSKFCGTSLPSSQWSSGEVMYLRFRSDNSPTHVGFKAKYSIAQCGGRVPGQSGVVESIGHPTLPYRDNLFCEWHLQGLSGHYLTISFEDFNLQNSSGCEKDFVEIWDNHTSGNILGRYCGNTIPDSIDTSSNTAVVRFVTDGSVTASGFRLRFESSMEECGGDLQGSIGTFTSPNYPNPNPHGRICEWRITAPEGRRITLMFNNLRLATHPSCNNEHVIVFNGIRSNSPQLEKLCSSVNVSNEIKSSGNTMKVIFFTDGSRPYGGFTASYTSSEDAVCGGSLPNTPEGNFTSPGYDGVRNYSRNLNCEWTLSNPNQGNSSISIHFEDFYLESHQDCQFDVLEFRVGDADGPLMWRLCGPSKPTLPLVIPYSQVWIHFVTNERVEHIGFHAKYSFTDCGGIQIGDSGVITSPNYPNAYDSLTHCSSLLEAPQGHTITLTFSDFDIEPHTTCAWDSVTVRNGGSPESPIIGQYCGNSNPRTIQSGSNQLVVTFNSDHSLQGGGFYATWNTQTLGCGGIFHSDNGTIRSPHWPQNFPENSRCSWTAITHKSKHLEISFDNNFLIPSGDGQCQNSFVKVWAGTEEVDKALLATGCGNVAPGPVITPSNTFTAVFQSQEAPAQGFSASFVSRCGSNFTGPSGYIISPNYPKQYDNNMNCTYVIEANPLSVVLLTFVSFHLEARSAVTGSCVNDGVHIIRGYSVMSTPFATVCGDEMPAPLTIAGPVLLNFYSNEQITDFGFKFSYRIISCGGVFNFSSGIITSPAYSYADYPNDMHCLYTITVSDDKVIELKFSDFDVVPSTSCSHDYLAIYDGANTSDPLLGKFCGSKRPPNVKSSNNSMLLVFKTDSFQTAKGWKMSFRQTLGPQQGCGGYLTGSNNTFASPDSDSNGMYDKNLNCVWIIIAPVNKVIHLTFNTFALEAASTRQRCLYDYVKLYDGDSENANLAGTFCGSTVPAPFISSGNFLTVQFISDLTLEREGFNATYTIMDMPCGGTYNATWTPQNISSPNSSDPDVPFSICTWVIDSPPHQQVKITVWALQLTSQDCTQNYLQLQDSPQGHGNSRFQFCGRNASAVPVFYSSMSTAMVIFKSGVVNRNSRMSFTYQIADCNRDYHKAFGNLRSPGWPDNYDNDKDCTVTLTAPQNHTISLFFHSLGIENSVECRNDFLEVRNGSNSNSPLLGKYCGTLLPNPVFSQNNELYLRFKSDSVTSDRGYEIIWTSSPSGCGGTLYGDRGSFTSPGYPGTYPNNTYCEWVLVAPAGRLVTINFYFISIDDPGDCVQNYLTLYDGPNASSPSSGPYCGGDTSIAPFVASSNQVFIKFHADYARRPSAFRLTWDS

SEQ ID NO: 15887 - protein, 734 aa, Homo sapiens
MNSMKTEENKSFSAMEDDQRTRPEVSKDTVMKQTHADTPVDHCLSGIRKCSSTFKLKSEVNKHETALEMQNPNLNNKECCFTFTLNGNSRKLDRSVFTAYGKPSESIYSALSANDYFSERIKNQFNKNIIVYEEKTIDGHINLGMPLKCLPSDSHFKITFGQRKSSKEDGHILRQCENPNMECILFHVVAIGRTRKKIVKINELHEKGSKLCIYALKGETIEGALCKDGRFRSDIGEFEWKLKEGHKKIYGKQSMVDEVSGKVLEMDISKKKALQQKDIHKKIKQNESATDEINHQSLIQSKKKVHKPKKDGETKDVEHSREQILPPQDLSHYIKDKTRQTIPRIRNYYFCSLPRKYRQINSQVRRRPHLGRRYAINLDVQKEAINLLKNYQTLNEAIMHQYPNFKEEAQWVRKYFREEQKRMNLSPAKQFNIYKKDFGKMTANSVSVATCEQLTYYSKSVGFMQWDNNGNTGNATCFVFNGGYIFTCRHVVHLMVGKNTHPSLWPDIISKCAKVTFTYTEFCPTPDNWFSIEPWLKVSNENLDYAILKLKENGNAFPPGLWRQISPQPSTGLIYLIGHPEGQIKKIDGCTVIPLNERLKKYPNDCQDGLVDLYDTTSNVYCMFTQRSFLSEVWNTHTLSYDTCFSDGSSGSPVFNASGKLVALHTFGLFYQRGFNVHALIEFGYSMDSILCDIKKTNESLYKSLNDEKLETYDEEKGKQESSLQDHQIEPMEC

SEQ ID NO: 15888 - protein, 704 aa, Homo sapiens
MKQTHADTPVDHCLSGIRKCSSTFKLKSEVNKHETALEMQNPNLNNKECCFTFTLNGNSRKLDRSVFTAYGKPSESIYSALSANDYFSERIKNQFNKNIIVYEEKTIDGHINLGMPLKCLPSDSHFKITFGQRKSSKEDGHILRQCENPNMECILFHVVAIGRTRKKIVKINELHEKGSKLCIYALKGETIEGALCKDGRFRSDIGEFEWKLKEGHKKIYGKQSMVDEVSGKVLEMDISKKKALQQKDIHKKIKQNESATDEINHQSLIQSKKKVHKPKKDGETKDVEHSREQILPPQDLSHYIKDKTRQTIPRIRNYYFCSLPRKYRQINSQVRRRPHLGRRYAINLDVQKEAINLLKNYQTLNEAIMHQYPNFKEEAQWVRKYFREEQKRMNLSPAKQFNIYKKDFGKMTANSVSVATCEQLTYYSKSVGFMQWDNNGNTGNATCFVFNGGYIFTCRHVVHLMVGKNTHPSLWPDIISKCAKVTFTYTEFCPTPDNWFSIEPWLKVSNENLDYAILKLKENGNAFPPGLWRQISPQPSTGLIYLIGHPEGQIKKIDGCTVIPLNERLKKYPNDCQDGLVDLYDTTSNVYCMFTQRSFLSEVWNTHTLSYDTCFSDGSSGSPVFNASGKLVALHTFGLFYQRGFNVHALIEFGYSMDSILCDIKKTNESLYKSLNDEKLETYDEEKGKQESSLQDHQIEPMEC

SEQ ID NO: 15889 - protein, 90 aa, Homo sapiens
MKMANSLRGEVLKLYKNLLYLGRDYPKGADYFKKRLKNIFLKNKDVKNPEKIKELIAQGEFVMKELEALYFLRKYRAMKQRYYSDTNKTN

SEQ ID NO: 15890 - protein, 64 aa, Homo sapiens
MRQGCKFRGSSQKIRWSRSPPSSLLHTLRPRLLSAEITLQTNLPLQSPCCRLCFLRGTQAKTLK

SEQ ID NO: 15891 - protein, 484 aa, Homo sapiens
MERRMKAGYLDQQVPYTFSSKSPGNGSLREALIGPLGKLMDPGSLPPLDSEDLFQDLSHFQETWLAEAQVPDSDEQFVPDFHSENLAFHSPTTRIKKEPQSPRTDPALSCSRKPPLPYHHGEQCLYSSAYDPPRQIAIKSPAPGALGQSPLQPFPRAEQRNFLRSSGTSQPHPGHGYLGEHSSVFQQPLDICHSFTSQGGGREPLPAPYQHQLSEPCPPYPQQSFKQEYHDPLYEQAGQPAVDQGGVNGHRYPGAGVVIKQEQTDFAYDSDVTGCASMYLHTEGFSGPSPGDGAMGYGYEKPLRPFPDDVCVVPEKFEGDIKQEGVGAFREGPPYQRRGALQLWQFLVALLDDPTNAHFIAWTGRGMEFKLIEPEEVARLWGIQKNRPAMNYDKLSRSLRYYYEKGIMQKVAGERYVYKFVCEPEALFSLAFPDNQRPALKAEFDRPVSEEDTVPLSHLDESPAYLPELAGPAQPFGPKGGYSY

SEQ ID NO: 15892 - protein, 445 aa, Homo sapiens
MDPGSLPPLDSEDLFQDLSHFQETWLAEAQVPDSDEQFVPDFHSENLAFHSPTTRIKKEPQSPRTDPALSCSRKPPLPYHHGEQCLYSSAYDPPRQIAIKSPAPGALGQSPLQPFPRAEQRNFLRSSGTSQPHPGHGYLGEHSSVFQQPLDICHSFTSQGGGREPLPAPYQHQLSEPCPPYPQQSFKQEYHDPLYEQAGQPAVDQGGVNGHRYPGAGVVIKQEQTDFAYDSDVTGCASMYLHTEGFSGPSPGDGAMGYGYEKPLRPFPDDVCVVPEKFEGDIKQEGVGAFREGPPYQRRGALQLWQFLVALLDDPTNAHFIAWTGRGMEFKLIEPEEVARLWGIQKNRPAMNYDKLSRSLRYYYEKGIMQKVAGERYVYKFVCEPEALFSLAFPDNQRPALKAEFDRPVSEEDTVPLSHLDESPAYLPELAGPAQPFGPKGGYSY

SEQ ID NO: 15893 - protein, 207 aa, Homo sapiens
MYLHTEGFSGPSPGDGAMGYGYEKPLRPFPDDVCVVPEKFEGDIKQEGVGAFREGPPYQRRGALQLWQFLVALLDDPTNAHFIAWTGRGMEFKLIEPEEVARLWGIQKNRPAMNYDKLSRSLRYYYEKGIMQKVAGERYVYKFVCEPEALFSLAFPDNQRPALKAEFDRPVSEEDTVPLSHLDESPAYLPELAGPAQPFGPKGGYSY

SEQ ID NO: 15894 - protein, 746 aa, Homo sapiens
MDSAAKDEMQPALSPGPEWPEQERAEQLARGAALKWASGIFYRPEQLARLGQYRSREVQRTCSLESRLKSVMQSYLEGVQTGVWQLAQAIEVVQGTREALSQARGLLQGMSQALQTLEPLRERVAQHKQLQALSHLLPRLRAVPAAVSHTQTLIDGQQFLEAYVSLRELEQLREDTWAPLGGLELPVFQGLDLLFEALGQAVEAAAGAAGKLAREDPALLVAAVRVAEVETGRTTPLGQVPRDWRQRCLRALQEGLEQAHFGSPLLPAPGALPGWLEALRVALPVELATAEALVAPCCPPQYNVVQLWAHTLHSGLRRSLQNLLAGPELEAADAFALLHWALHVYLGQEMMGSLELGPEADVSQLEPLLTLENIEQLEATFVANIQASVSQWLQNALDGEVAEWGREHGPNTDPSGSYYSPMPAIVLQILEENIRVASLVSESLQQRVHGMALSELGTFLRSFSDALIRFSRDHFRGKSMAPHYVPYLLAALNHKSALSSSVSVLQLDGAPSGALAPVEAALDELQRRIYRLVLEALQAELQPLFADLPSRQWLSSPELLQSVCERTGRFCRDFWRVRNPTVQLLLAEAERAVVLQYLSALMQGRLVCRGADERTQAAERLRHDAAQLQQLFLSLGLEENAHCAPVLLALRELLNLRDPALLGLEVAGLRQQFPDVSEDHVSALLGLRGDLSREQHLAALSSLQAALPPSPRASRRVLFSLVPAPALAPASCLPSGSCARALLLAE

SEQ ID NO: 15895 - protein, 125 aa, Homo sapiens
MKKSGVLFLLGIILLVLIGVQGTPVVRKGRCSCISTNQGTIHLQSLKDLKQFAPSPSCEKIEIIATLKNGVQTCLNPDSADVKELIKKWEKQVSQKKKQKNGKKHQKKKVLKVRKSQRSRQKKTT

SEQ ID NO: 15896 - protein, 350 aa, Homo sapiens
MSNITDPQMWDFDDLNFTGMPPADEDYSPCMLETETLNKYVVIIAYALVFLLSLLGNSLVMLVILYSRVGRSVTDVYLLNLALADLLFALTLPIWAASKVNGWIFGTFLCKVVSLLKEVNFYSGILLLACISVDRYLAIVHATRTLTQKRHLVKFVCLGCWGLSMNLSLPFFLFRQAYHPNNSSPVCYEVLGNDTAKWRMVLRILPHTFGFIVPLFVMLFCYGFTLRTLFKAHMGQKHRAMRVIFAVVLIFLLCWLPYNLVLLADTLMRTQVIQESCERRNNIGRALDATEILGFLHSCLNPIIYAFIGQNFRHGFLKILAMHGLVSKEFLARHRVTSYTSSSVNVSSNL

SEQ ID NO: 15897 - protein, 261 aa, Homo sapiens
MAAAVPRAAFLSPLLPLLLGFLLLSAPHGGSGLHTKGALPLDTVTFYKVIPKSKFVLVKFDTQYPYGEKQDEFKRLAENSASSDDLLVAEVGISDYGDKLNMELSEKYKLDKESYPVFYLFRDGDFENPVPYTGAVKVGAIQRWLKGQGVYLGMPGCLPVYDALAGEFIRASGVEARQALLKQGQDNLSSVKETQKKWAEQYLKIMGKILDQGEDFPASEMTRIARLIEKNKMSDGKKEELQKSLNILTAFQKKGAEKEEL

SEQ ID NO: 15898 - protein, 53 aa, Homo sapiens
MAAAVPRAAFLSPLLPLLLGFLLLSAPHGGSGLHTKGALPLDTVTFYKIMVTS

SEQ ID NO: 15899 - protein, 409 aa, Homo sapiens
MAALENGELGPLLSPGTLRGLEDECVTDVKAQTRAALLRVLQEDEEHWGSLEDQPSSLAQDVCELLEEHTERAPRISQEFGERMAHCCLGGLAEFLQSFQQRVERFHENPAVREMLPDTYISKTIALVNCGPPLRALAERLARVGPPESEPAREASASALDHVTRLCHRVVANLLFQELQPHFNKLMRRKWLSSPEALDGIVGTLGAQALALRRMQDEPYQALVAELHRRALVEYVRPLLRGRLRCSSARTRSRVAGRLREDAAQLQRLFRRLESQASWLDAVVPHLAEVMQLEDTPSIQVEVGVLVRDYPDIRQKHVAALLDIRGLRNTAARQEILAVARDLELSEEGALSPPRDRAFFADIPVPRPSFCLSLPLFLGRLPLSRLARPSLACLPRPRPPSLARPRAQR

SEQ ID NO: 15900 - protein, 193 aa, Homo sapiens
MPNWGGGKKCGVCQKTVYFAEEVQCEGNSFHKSCFLCMVCKKNLDSTTVAVHGEEIYCKSCYGKKYGPKGYGYGQGAGTLSTDKGESLGIKHEEAPGHRPTTNPNASKFAQKIGGSERCPRCSQAVYAAEKVIGAGKSWHKACFRCAKCGKGLESTTLADKDGEIYCKGCYAKNFGPKGFGFGQGAGALVHSE

SEQ ID NO: 15901 - protein, 372 aa, Homo sapiens
MNYPLTLEMDLENLEDLFWELDRLDNYNDTSLVENHLCPATEGPLMASFKAVFVPVAYSLIFLLGVIGNVLVLVILERHRQTRSSTETFLFHLAVADLLLVFILPFAVAEGSVGWVLGTFLCKTVIALHKVNFYCSSLLLACIAVDRYLAIVHAVHAYRHRRLLSIHITCGTIWLVGFLLALPEILFAKVSQGHHNNSLPRCTFSQENQAETHAWFTSRFLYHVAGFLLPMLVMGWCYVGVVHRLRQAQRRPQRQKAVRVAILVTSIFFLCWSPYHIVIFLDTLARLKAVDNTCKLNGSLPVAITMCEFLGLAHCCLNPMLYTFAGVKFRSDLSRLLTKLGCTGPASLCQLFPSWRRSSLSESENATSLTTF

SEQ ID NO: 15902 - protein, 327 aa, Homo sapiens
MASFKAVFVPVAYSLIFLLGVIGNVLVLVILERHRQTRSSTETFLFHLAVADLLLVFILPFAVAEGSVGWVLGTFLCKTVIALHKVNFYCSSLLLACIAVDRYLAIVHAVHAYRHRRLLSIHITCGTIWLVGFLLALPEILFAKVSQGHHNNSLPRCTFSQENQAETHAWFTSRFLYHVAGFLLPMLVMGWCYVGVVHRLRQAQRRPQRQKAVRVAILVTSIFFLCWSPYHIVIFLDTLARLKAVDNTCKLNGSLPVAITMCEFLGLAHCCLNPMLYTFAGVKFRSDLSRLLTKLGCTGPASLCQLFPSWRRSSLSESENATSLTTF

SEQ ID NO: 15903 - protein, 263 aa, Homo sapiens
MASLWLLSCFSLVGAAFGCGVPAIHPVLSGLSRIVNGEDAVPGSWPWQVSLQDKTGFHFCGGSLISEDWVVTAAHCGVRTSDVVVAGEFDQGSDEENIQVLKIAKVFKNPKFSILTVNNDITLLKLATPARFSQTVSAVCLPSADDDFPAGTLCATTGWGKTKYNANKTPDKLQQAALPLLSNAECKKSWGRRITDVMICAGASGVSSCMGDSGGPLVCQKDGAWTLVGIVSWGSDTCSTSSPGVYARVTKLIPWVQKILAAN

SEQ ID NO: 15904 - protein, 317 aa, Homo sapiens
MTTTQKHDLFTPEPHYVPGYAGFFPQLRYQVGNTYGRTTGQLLTDPSVQKSPCSVLSPMSKPKFIEDFSQSKPPRVPCQDLTEPYIPHYTSLKPSKNFEILGQLPPLEVDAQEPPGVENIPRQILLPAGFTPDTPHPPCPPGRKGDSRDLGHPVYGEEAWKSATPVCEAPRQHQLYHCQRDEYPPPARRQQETLDVGSFQRLPQLDHPNLIQRKAISGYAGFIPRFTWVMGLNYRDGVMQAMDEFDKSQFLFRNPHCDLGEKLPGTHWPSNHIYSSQGLIPFYMGFIPAMQDNYALTFGNSTRRAYWKEWAKRNHTL

SEQ ID NO: 15905 - protein, 271 aa, Homo sapiens
MTTTQKHDLFTPEPHYVPGYAGFFPQLRYQVGNTYGRTTGQLLTDPSVQKSPCSVLSPMSKPKFIEDFSQSKPPRVPCQDLTEPYIPHYTSLKPSKNFEILGQLPPLEVDAQEPPGVENIPRQILLPAGFTPDTPHPPCPPGRKGDSRDLGHPVYGEEAWKSATPVCEAPRQHQLYHCQRDEYPPPARRQQETLDVGSFQRLPQLDHPNLIQRKAISEQASGLGGPPLPPSCFQEPSFSQDEAVPCLPVPIWPHQTVANVQGTKGSLAWLP

SEQ ID NO: 15906 - protein, 400 aa, Homo sapiens
MDEDGGGEGGGVPEDLSLEEREELLDIRRRKKELIDDIERLKYEIAEVMTEIDNLTSVEESKTTQRNKQIAMGRKKFNMDPKKGIQFLIENDLLQSSPEDVAQFLYKGEGLNKTVIGDYLGERDEFNIKVLQAFVELHEFADLNLVQALRQFLWSFRLPGEAQKIDRMMEAFASRYCLCNPGVFQSTDTCYVLSFAIIMLNTSLHNHNVRDKPTAERFIAMNRGINEGGDLPEELLRNLYESIKNEPFKIPEDDGNDLTHTFFNPDREGWLLKLGGGRVKTWKRRWFILTDNCLYYFEYTTDKEPRGIIPLENLSIREVEDPRKPNCFELYNPSHKGQVIKACKTEADGRVVEGNHVVYRISAPSPEEKEEWMKSIKASISRDPFYDMLATRKRRIANKK

SEQ ID NO: 15907 - protein, 399 aa, Homo sapiens
MDEDGGGEGGGVPEDLSLEEREELLDIRRRKKELIDDIERLKYEIAEVMTEIDNLTSVEESKTTQRNKQIAMGRKKFNMDPKKGIQFLIENDLLQSSPEDVAQFLYKGEGLNKTVIGDYLGERDEFNIKVLQAFVELHEFADLNLVQALRQFLWSFRLPGEAQKIDRMMEAFASRYCLCNPGVFQSTDTCYVLSFAIIMLNTSLHNHNVRDKPTAERFIAMNRGINEGGDLPEELLRNLYESIKNEPFKIPEDDGNDLTHTFFNPDREGWLLKLGGRVKTWKRRWFILTDNCLYYFEYTTDKEPRGIIPLENLSIREVEDPRKPNCFELYNPSHKGQVIKACKTEADGRVVEGNHVVYRISAPSPEEKEEWMKSIKASISRDPFYDMLATRKRRIANKK

SEQ ID NO: 15908 - protein, 142 aa, Homo sapiens
MPRCRWLSLILLTIPLALVARKDPKKNETGVLRKLKPVNASNANVKQCLWFAMQEYNKESEDKYVFLVVKTLQAQLQVTNLLEYLIDVEIARSDCRKPLSTNEICAIQENSKLKRKLSCSFLVGALPWNGEFTVMEKKCEDA

SEQ ID NO: 15909 - protein, 472 aa, Homo sapiens
MRDNEKAWWQQWTSHTGLEGWGGTQEDRMGFGGAVAALRGRPSPLQSTIHESYGRPEEQVLINRQEITNKADAWDMQEFITHMYIKQLLRHPAFQLLLALLLVINAITIALRTNSYLDQKHYELFSTIDDIVLTILLCEVLLGWLNGFWIFWKDGWNILNFIIVFILLLRFFINEINIPSINYTLRALRLVHVCMAVEPLARIIRVILQSVPDMANIMVLILFFMLVFSVFGVTLFGAFVPKHFQNIQVALYTLFICITQDGWVDIYSDFQTEKREYAMEIGGAIYFTIFITIGAFIGINLFVIVVTTNLEQMMKAGEQGQQQRITFSETGAEEEEENDQLPLVHCVVARSEKSGLLQEPLAGGPLSNLSENTCDNFCLVLEAIQENLRQYKEIRDELNMIVEEVRAIRFNQEQESEVLNRRSSTSGSLETTSSKDIRQMSQQQDLLSALVSMEKVHDSSSQILLKKHKSSH

SEQ ID NO: 15910 - protein, 384 aa, Homo sapiens
MRDNEKAWWQQWTSHTGLEGWGGTQEDRMGFGGAVAALRGRPSPLQSTIHESYGRPEEQVLINRQEITNKADAWDMQEFITHMYIKQLLRHPAFQLLLALLLVINAITIALRTNSYLDQKHYELFSTIDDIVLTILLCEVLLGWLNGFWIFWKDGWNILNFIIVFILLLRFFINEINIPSINYTLRALRLVHVCMAVEPLARIIRVILQSVPDMANIMVLILFFMLHFQNIQVALYTLFICITQDGWVDIYSDFQTEKREYAMEIGGAIYFTIFITIGAFIGINLFVIVVTTNLEQMMKAGEQGQQQRITFSETGAEEEEENDQLPLVHCVVARSEKSGLLQEPLAGGPLSNLSENTCDNFCLVLEAIQENLRQYKEIRDELNM

SEQ ID NO: 15911 - protein, 279 aa, Homo sapiens
MCGRFLRRLLAEESRRSTPVGRLLLPVLLGFRLVLLAASGPGVYGDEQSEFVCHTQQPGCKAACFDAFHPLSPLRFWVFQVILVAVPSALYMGFTLYHVIWHWELSGKGKEEETLIQGREGNTDVPGAGSLRLLWAYVAQLGARLVLEGAALGLQYHLYGFQMPSSFACRREPCLGSITCNLSRPSEKTIFLKTMFGVSGFCLLFTFLELVLLGLGRWWRTWKHKSSSSKYFLTSESTRRHKKATDSLPVVETKEQFQEAVPGRSLAQEKQRPVGPRDA

SEQ ID NO: 15912 - protein, 955 aa, Homo sapiens
MLPGRLCWVPLLLALGVGSGSGGGGDSRQRRLLAAKVNKHKPWIETSYHGVITENNDTVILDPPLVALDKDAPVPFAGEICAFKIHGQELPFEAVVLNKTSGEGRLRAKSPIDCELQKEYTFIIQAYDCGAGPHETAWKKSHKAVVHIQVKDVNEFAPTFKEPAYKAVVTEGKIYDSILQVEAIDEDCSPQYSQICNYEIVTTDVPFAIDRNGNIRNTEKLSYDKQHQYEILVTAYDCGQKPAAQDTLVQVDVKPVCKPGWQDWTKRIEYQPGSGSMPLFPSIHLETCDGAVSSLQIVTELQTNYIGKGCDRETYSEKSLQKLCGASSGIIDLLPSPSAATNWTAGLLVDSSEMIFKFDGRQGAKVPDGIVPKNLTDQFTITMWMKHGPSPGVRAEKETILCNSDKTEMNRHHYALYVHNCRLVFLLRKDFDQADTFRPAEFHWKLDQICDKEWHYYVINVEFPVVTLYMDGATYEPYLVTNDWPIHPSHIAMQLTVGACWQGGEVTKPQFAQFFHGSLASLTIRPGKMESQKVISCLQACKEGLDINSLESLGQGIKYHFNPSQSILVMEGDDIGNINRALQKVSYINSRQFPTAGVRRLKVSSKVQCFGEDVCISIPEVDAYVMVLQAIEPRITLRGTDHFWRPAAQFESARGVTLFPDIKIVSTFAKTEAPGDVKTTDPKSEVLEEMLHNLDFCDILVIGGDLDPRQECLELNHSELHQRHLDATNSTAGYSIYGVGSMSRYEQVLHHIRYRNWRPASLEARRFRIKCSELNGRYTSNEFNLEVSILHEDQVSDKEHVNHLIVQPPFLQSVHHPESRSSIQHSSVVPSIATVVIIISVCMLVFVVAMGVYRVRIAHQHFIQETEAAKESEMDWDDSALTITVNPMEKHEGPGHGEDETEGEEEEEAEEEMSSSSGSDDSEEEEEEEGMGRGRHGQNGARQAQLEWDDSTLPY

SEQ ID NO: 15913 - protein, 717 aa, Homo sapiens
MSGDGATEQAAEYVPEKVKKAEKKLEENPYDLDAWSILIREAQNQPIDKARKTYERLVAQFPSSGRFWKLYIEAEIKAKNYDKVEKLFQRCLMKVLHIDLWKCYLSYVRETKGKLPSYKEKMAQAYDFALDKIGMEIMSYQIWVDYINFLKGVEAVGSYAENQRITAVRRVYQRGCVNPMINIEQLWRDYNKYEEGINIHLAKKMIEDRSRDYMNARRVAKEYETVMKGLDRNAPSVPPQNTPQEAQQVDMWKKYIQWEKSNPLRTEDQTLITKRVMFAYEQCLLVLGHHPDIWYEAAQYLEQSSKLLAEKGDMNNAKLFSDEAANIYERAISTLLKKNMLLYFAYADYEESRMKYEKVHSIYNRLLAIEDIDPTLVYIQYMKFARRAEGIKSGRMIFKKAREDTRTRHHVYVTAALMEYYCSKDKSVAFKIFELGLKKYGDIPEYVLAYIDYLSHLNEDNNTRVLFERVLTSGSLPPEKSGEIWARFLAFESNIGDLASILKVEKRRFTAFKEEYEGKETALLVDRYKFMDLYPCSASELKALGYKDVSRAKLAAIIPDPVVAPSIVPVLKDEVDRKPEYPKPDTQQMIPFQPRHLAPPGLHPVPGGVFPVPPAAVVLMKLLPPPICFQGPFVQVDELMEIFRRCKIPNTVEEAVRIITGGAPELAVEGNGPVESNAVLTKAVKRPNEDSDEDEEKGAVVPPVHDIYRARQQKRIR

SEQ ID NO: 15914 - protein, 103 aa, Homo sapiens
MSGDGATEQAAEYVPEKVKKAEKKLEENPYDLDAWSILIREAQNQPIDKARKTYERLVAQFPSSGRFWKLYIEAEVTILFYFFLYQYCSIHCSDRKQVRNIAN

SEQ ID NO: 15915 - protein, 44 aa, Homo sapiens
MSGDGATEQAAEYVPEKVKKAEKKLEENPYDLDAWSILIREAQV

SEQ ID NO: 15916 - protein, 189 aa, Homo sapiens; identical to SEQ ID NO: 14928

SEQ ID NO: 15917 - protein, 122 aa, Homo sapiens
MYKSKIPRAQNQVSVKVTPKNTEMKIAEEPSPSLGQTLEWLRKELSEMQIQDQSLLLTLRHLHSVLEELRADSAHWEDARSSGGTSPIRARAGSEGRGCQPVCSRGLAQLLRGEDSRRSSLP

SEQ ID NO: 15918 - protein, 2322 aa, Homo sapiens
MQSGPRPPLPAPGLALALTLTMLARLASAASFFGENHLEVPVATALTDIDLQLQFSTSQPEALLLLAAGPADHLLLQLYSGRLQVRLVLGQEELRLQTPAETLLSDSIPHTVVLTVVEGWATLSVDGFLNASSAVPGAPLEVPYGLFVGGTGTLGLPYLRGTSRPLRGCLHAATLNGRSLLRPLTPDVHEGCAEEFSASDDVALGFSGPHSLAAFPAWGTQDEGTLEFTLTTQSRQAPLAFQAGGRRGDFIYVDIFEGHLRAVVEKGQGTVLLHNSVPVADGQPHEVSVHINAHRLEISVDQYPTHTSNRGVLSYLEPRGSLLLGGLDAEASRHLQEHRLGLTPEATNASLLGCMEDLSVNGQRRGLREALLTRNMAAGCRLEEEEYEDDAYGHYEAFSTLAPEAWPAMELPEPCVPEPGLPPVFANFTQLLTISPLVVAEGGTAWLEWRHVQPTLDLMEAELRKSQVLFSVTRGARHGELELDIPGAQARKMFTLLDVVNRKARFIHDGSEDTSDQLVLEVSVTARVPMPSCLRRGQTYLLPIQVNPVNDPPHIIFPHGSLMVILEHTQKPLGPEVFQAYDPDSACEGLTFQVLGTSSGLPVERRDQPGEPATEFSCRELEAGSLVYVHRGGPAQDLTFRVSDGLQASPPATLKVVAIRPAIQIHRSTGLRLAQGSAMPILPANLSVETNAVGQDVSVLFRVTGALQFGELQKQGAGGVEGAEWWATQAFHQRDVEQGRVRYLSTDPQHHAYDTVENLALEVQVGQEILSNLSFPVTIQRATVWMLRLEPLHTQNTQQETLTTAHLEATLEEAGPSPPTFHYEVVQAPRKGNLQLQGTRLSDGQGFTQDDIQAGRVTYGATARASEAVEDTFRFRVTAPPYFSPLYTFPIHIGGDPDAPVLTNVLLVVPEGGEGVLSADHLFVKSLNSASYLYEVMERPRHGRLAWRGTQDKTTMVTSFTNEDLLRGRLVYQHDDSETTEDDIPFVATRQGESSGDMAWEEVRGVFRVAIQPVNDHAPVQTISRIFHVARGGRRLLTTDDVAFSDADSGFADAQLVLTRKDLLFGSIVAVDEPTRPIYRFTQEDLRKRRVLFVHSGADRGWIQLQVSDGQHQATALLEVQASEPYLRVANGSSLVVPQGGQGTIDTAVLHLDTNLDIRSGDEVHYHVTAGPRWGQLVRAGQPATAFSQQDLLDGAVLYSHNGSLSPRDTMAFSVEAGPVHTDATLQVTIALEGPLAPLKLVRHKKIYVFQGEAAEIRRDQLEAAQEAVPPADIVFSVKSPPSAGYLVMVSRGALADEPPSLDPVQSFSQEAVDTGRVLYLHSRPEAWSDAFSLDVASGLGAPLEGVLVELEVLPAAIPLEAQNFSVPEGGSLTLAPPLLRVSGPYFPTLLGLSLQVLEPPQHGALQKEDGPQARTLSAFSWRMVEEQLIRYVHDGSETLTDSFVLMANASEMDRQSHPVAFTVTVLPVNDQPPILTTNTGLQMWEGATAPIPAEALRSTDGDSGSEDLVYTIEQPSNGRVVLRGAPGTEVRSFTQAQLDGGLVLFSHRGTLDGGFRFRLSDGEHTSPGHFFRVTAQKQVLLSLKGSQTLTVCPGSVQPLSSQTLRASSSAGTDPQLLLYRVVRGPQLGRLFHAQQDSTGEALVNFTQAEVYAGNILYEHEMPPEPFWEAHDTLELQLSSPPARDVAATLAVAVSFEAACPQRPSHLWKNKGLWVPEGQRARITVAALDASNLLASVPSPQRSEHDVLFQVTQFPSRGQLLVSEEPLHAGQPHFLQSQLAAGQLVYAHGGGGTQQDGFHFRAHLQGPAGASVAGPQTSEAFAITVRDVNERPPQPQASVPLRLTRGSRAPISRAQLSVVDPDSAPGEIEYEVQRAPHNGFLSLVGGGLGPVTRFTQADVDSGRLAFVANGSSVAGIFQLSMSDGASPPLPMSLAVDILPSAIEVQLRAPLEVPQALGRSSLSQQQLRVVSDREEPEAAYRLIQGPQYGHLLVGGRPTSAFSQFQIDQGEVVFAFTNFSSSHDHFRVLALARGVNASAVVNVTVRALLHVWAGGPWPQGATLRLDPTVLDAGELANRTGSVPRFRLLEGPRHGRVVRVPRARTEPGGSQLVEQFTQQDLEDGRLGLEVGRPEGRAPGPAGDSLTLELWAQGVPPAVASLDFATEPYNAARPYSVALLSVPEAARTEAGKPESSTPTGEPGPMASSPEPAVAKGGFLSFLEANMFSVIIPMCLVLLLLALILPLLFYLRKRNKTGKHDVQVLTAKPRNGLAGDTETFRKVEPGQAIPLTAVPGQGPPPGGQPDPELLQFCRTPNPALKNGQYWV

SEQ ID NO: 15919 - protein, 189 aa, Homo sapiens
MTDKTEKVAVDPETVFKRPRECDSPSYQKRQRMALLARKQGAGDSLIAGSAMSKEKKLMTGHAIPPSQLDSQIDDFTGFSKDGMMQKPGSNAPVGGNVTSNFSGDDLECRGIASSPKSQQEINADIKCQVVKEIRCLGRKYEKIFEMLEGVQGPTAVRKRFFESIIKEAARCMRRDFVKHLKKKLKRMI

SEQ ID NO: 15920 - protein, 149 aa, Homo sapiens
MLSGPHPSPTFRPNPCPWPCLHSLWMEISPTQLCFLSPGPSPQSPSCCFQGMNSGSELGKLWRKLFKGIPRLSVSHFDFYCGTCVLLGRPQIPQGSSLGNDIDQYPVVFRNASDQGSWMQLEMLLRKLSDLVWTSDALSDKILEDGLVP

SEQ ID NO: 15921 - protein, 202 aa, Homo sapiens
MKRWQIFVLWVFWVLILWLMTPYLDLTPESAPQEKRMYLVPQHCDCPWFSSGKCGCPSETLNCSSCHHTADEWNWLDACSRKTMGYLMRTRESMTSDTVLWWLGMNSGSELGKLWRKLFKGIPRLSVSHFDFYCGTCVLLGRPQIPQGSSLGNDIDQYPVVFRNASDQGSWMQLEMLLRKLSDLVWTSDALSDKILEDGLVP

SEQ ID NO: 15922 - protein, 94 aa, Homo sapiens
MRTIAILAAILLVALQAQAESLQERADEATTQKQSGEDNQDLAISFAGNGLSALRTSGSQARATCYCRTGRCATRESLSGVCEISGRLYRLCCR

SEQ ID NO: 15923 - protein, 585 aa, Homo sapiens
MASPGSGFWSFGSEDGSGDSENPGTARAWCQVAQKFTGGIGNKLCALLYGDAEKPAESGGSQPPRAAARKAACACDQKPCSCSKVDVNYAFLHATDLLPACDGERPTLAFLQDVMNILLQYVVKSFDRSTKVIDFHYPNELLQEYNWELADQPQNLEEILMHCQTTLKYAIKTGHPRYFNQLSTGLDMVGLAADWLTSTANTNMFTYEIAPVFVLLEYVTLKKMREIIGWPGGSGDGIFSPGGAISNMYAMMIARFKMFPEVKEKGMAALPRLIAFTSEHSHFSLKKGAAALGIGTDSVILIKCDERGKMIPSDLERRILEAKQKGFVPFLVSATAGTTVYGAFDPLLAVADICKKYKIWMHVDAAWGGGLLMSRKHKWKLSGVERANSVTWNPHKMMGVPLQCSALLVREEGLMQNCNQMHASYLFQQDKHYDLSYDTGDKALQCGRHVDVFKLWLMWRAKGTTGFEAHVDKCLELAEYLYNIIKNREGYEMVFDGKPQHTNVCFWYIPPSLRTLEDNEERMSRLSKVAPVIKARMMEYGTTMVSYQPLGDKVNFFRMVISNPAATHQDIDFLIEEIERLGQDL

SEQ ID NO: 15924 - protein, 2602 aa, Homo sapiens
MPVTEKDLAEDAPWKKIQQNTFTRWCNEHLKCVNKRIGNLQTDLSDGLRLIALLEVLSQKRMYRKYHQRPTFRQMQLENVSVALEFLDRESIKLVSIDSKAIVDGNLKLILGLVWTLILHYSISMPVWEDEGDDDAKKQTPKQRLLGWIQNKIPYLPITNFNQNWQDGKALGALVDSCAPGLCPDWESWDPQKPVDNAREAMQQADDWLGVPQVITPEEIIHPDVDEHSVMTYLSQFPKAKLKPGAPLKPKLNPKKARAYGRGIEPTGNMVKQPAKFTVDTISAGQGDVMVFVEDPEGNKEEAQVTPDSDKNKTYSVEYLPKVTGLHKVTVLFAGQHISKSPFEVSVDKAQGDASKVTAKGPGLEAVGNIANKPTYFDIYTAGAGVGDIGVEVEDPQGKNTVELLVEDKGNQVYRCVYKPMQPGPHVVKIFFAGDTIPKSPFVVQVGEACNPNACRASGRGLQPKGVRIRETTDFKVDTKAAGSGELGVTMKGPKGLEELVKQKDFLDGVYAFEYYPSTPGRYSIAITWGGHHIPKSPFEVQVGPEAGMQKVRAWGPGLHGGIVGRSADFVVESIGSEVGSLGFAIEGPSQAKIEYNDQNDGSCDVKYWPKEPGEYAVHIMCDDEDIKDSPYMAFIHPATGGYNPDLVRAYGPGLEKSGCIVNNLAEFTVDPKDAGKAPLKIFAQDGEGQRIDIQMKNRMDGTYACSYTPVKAIKHTIAVVWGGVNIPHSPYRVNIGQGSHPQKVKVFGPGVERSGLKANEPTHFTVDCTEAGEGDVSVGIKCDARVLSEDEEDVDFDIIHNANDTFTVKYVPPAAGRYTIKVLFASQEIPASPFRVKVDPSHDASKVKAEGPGLSKAGVENGKPTHFTVYTKGAGKAPLNVQFNSPLPGDAVKDLDIIDNYDYSHTVKYTPTQQGNMQVLVTYGGDPIPKSPFTVGVAAPLDLSKIKLNGLENRVEVGKDQEFTVDTRGAGGQGKLDVTILSPSRKVVPCLVTPVTGRENSTAKFIPREEGLYAVDVTYDGHPVPGSPYTVEASLPPDPSKVKAHGPGLEGGLVGKPAEFTIDTKGAGTGGLGLTVEGPCEAKIECSDNGDGTCSVSYLPTKPGEYFVNILFEEVHIPGSPFKADIEMPFDPSKVVASGPGLEHGKVGEAGLLSVDCSEAGPGALGLEAVSDSGTKAEVSIQNNKDGTYAVTYVPLTAGMYTLTMKYGGELVPHFPARVKVEPAVDTSRIKVFGPGIEGKDVFREATTDFTVDSRPLTQVGGDHIKAHIANPSGASTECFVTDNADGTYQVEYTPFEKGLHVVEVTYDDVPIPNSPFKVAVTEGCQPSRVQAQGPGLKEAFTNKPNVFTVVTRGAGIGGLGITVEGPSESKINCRDNKDGSCSAEYIPFAPGDYDVNITYGGAHIPGSPFRVPVKDVVDPSKVKIAGPGLGSGVRARVLQSFTVDSSKAGLAPLEVRVLGPRGLVEPVNVVDNGDGTHTVTYTPSQEGPYMVSVKYADEEIPRSPFKVKVLPTYDASKVTASGPGLSSYGVPASLPVDFAIDARDAGEGLLAVQITDQEGKPKRAIVHDNKDGTYAVTYIPDKTGRYMIGVTYGGDDIPLSPYRIRATQTGDASKCLATGPGIASTVKTGEEVGFVVDAKTAGKGKVTCTVLTPDGTEAEADVIENEDGTYDIFYTAAKPGTYVIYVRFGGVDIPNSPFTVMATDGEVTAVEEAPVNACPPGFRPWVTEEAYVPVSDMNGLGFKPFDLVIPFAVRKGEITGEVHMPSGKTATPEIVDNKDGTVTVRYAPTEVGLHEMHIKYMGSHIPESPLQFYVNYPNSGSVSAYGPGLVYGVANKTATFTIVTEDAGEGGLDLAIEGPSKAEISCIDNKDGTCTVTYLPTLPGDYSILVKYNDKHIPGSPFTAKITDDSRRCSQVKLGSAADFLLDISETDLSSLTASIKAPSGRDEPCLLKRLPNNHIGISFIPREVGEHLVSIKKNGNHVANSPVSIMVVQSEIGDARRAKVYGRGLSEGRTFEMSDFIVDTRDAGYGGISLAVEGPSKVDIQTEDLEDGTCKVSYFPTVPGVYIVSTKFADEHVPGSPFTVKISGEGRVKESITRTSRAPSVATVGSICDLNLKIPEINSSDMSAHVTSPSGRVTEAEIVPMGKNSHCVRFVPQEMGVHTVSVKYRGQHVTGSPFQFTVGPLGEGGAHKVRAGGPGLERGEAGVPAEFSIWTREAGAGGLSIAVEGPSKAEITFDDHKNGSCGVSYIAQEPGNYEVSIKFNDEHIPESPYLVPVIAPSDDARRLTVMSLQESGLKVNQPASFAIRLNGAKGKIDAKVHSPSGAVEECHVSELEPDKYAVRFIPHENGVHTIDVKFNGSHVVGSPFKVRVGEPGQAGNPALVSAYGTGLEGGTTGIQSEFFINTTRAGPGTLSVTIEGPSKVKMDCQETPEGYKVMYTPMAPGNYLISVKYGGPNHIVGSPFKAKVTGQRLVSPGSANETSSILVESVTRSSTETCYSAIPKASSDASKVTSKGAGLSKAFVGQKSSFLVDCSKAGSNMLLIGVHGPTTPCEEVSMKHVGNQQYNVTYVVKERGDYVLAVKWGEEHIPGSPFHVTVP

SEQ ID NO: 15925 - protein, 2578 aa, Homo sapiens
MPVTEKDLAEDAPWKKIQQNTFTRWCNEHLKCVNKRIGNLQTDLSDGLRLIALLEVLSQKRMYRKYHQRPTFRQMQLENVSVALEFLDRESIKLVSIDSKAIVDGNLKLILGLVWTLILHYSISMPVWEDEGDDDAKKQTPKQRLLGWIQNKIPYLPITNFNQNWQDGKALGALVDSCAPGLCPDWESWDPQKPVDNAREAMQQADDWLGVPQVITPEEIIHPDVDEHSVMTYLSQFPKAKLKPGAPLKPKLNPKKARAYGRGIEPTGNMVKQPAKFTVDTISAGQGDVMVFVEDPEGNKEEAQVTPDSDKNKTYSVEYLPKVTGLHKVTVLFAGQHISKSPFEVSVDKAQGDASKVTAKGPGLEAVGNIANKPTYFDIYTAGAGVGDIGVEVEDPQGKNTVELLVEDKGNQVYRCVYKPMQPGPHVVKIFFAGDTIPKSPFVVQVGEACNPNACRASGRGLQPKGVRIRETTDFKVDTKAAGSGELGVTMKGPKGLEELVKQKDFLDGVYAFEYYPSTPGRYSIAITWGGHHIPKSPFEVQVGPEAGMQKVRAWGPGLHGGIVGRSADFVVESIGSEVGSLGFAIEGPSQAKIEYNDQNDGSCDVKYWPKEPGEYAVHIMCDDEDIKDSPYMAFIHPATGGYNPDLVRAYGPGLEKSGCIVNNLAEFTVDPKDAGKAPLKIFAQDGEGQRIDIQMKNRMDGTYACSYTPVKAIKHTIAVVWGGVNIPHSPYRVNIGQGSHPQKVKVFGPGVERSGLKANEPTHFTVDCTEAGEGDVSVGIKCDARVLSEDEEDVDFDIIHNANDTFTVKYVPPAAGRYTIKVLFASQEIPASPFRVKVDPSHDASKVKAEGPGLSKAGVENGKPTHFTVYTKGAGKAPLNVQFNSPLPGDAVKDLDIIDNYDYSHTVKYTPTQQGNMQVLVTYGGDPIPKSPFTVGVAAPLDLSKIKLNGLENRVEVGKDQEFTVDTRGAGGQGKLDVTILSPSRKVVPCLVTPVTGRENSTAKFIPREEGLYAVDVTYDGHPVPGSPYTVEASLPPDPSKVKAHGPGLEGGLVGKPAEFTIDTKGAGTGGLGLTVEGPCEAKIECSDNGDGTCSVSYLPTKPGEYFVNILFEEVHIPGSPFKADIEMPFDPSKVVASGPGLEHGKVGEAGLLSVDCSEAGPGALGLEAVSDSGTKAEVSIQNNKDGTYAVTYVPLTAGMYTLTMKYGGELVPHFPARVKVEPAVDTSRIKVFGPGIEGKDVFREATTDFTVDSRPLTQVGGDHIKAHIANPSGASTECFVTDNADGTYQVEYTPFEKGLHVVEVTYDDVPIPNSPFKVAVTEGCQPSRVQAQGPGLKEAFTNKPNVFTVVTRGAGIGGLGITVEGPSESKINCRDNKDGSCSAEYIPFAPGDYDVNITYGGAHIPGSPFRVPVKDVVDPSKVKIAGPGLGSGVRARVLQSFTVDSSKAGLAPLEVRVLGPRGLVEPVNVVDNGDGTHTVTYTPSQEGPYMVSVKYADEEIPRSPFKVKVLPTYDASKVTASGPGLSSYGVPASLPVDFAIDARDAGEGLLAVQITDQEGKPKRAIVHDNKDGTYAVTYIPDKTGRYMIGVTYGGDDIPLSPYRIRATQTGDASKCLATGPGIASTVKTGEEVGFVVDAKTAGKGKVTCTVLTPDGTEAEADVIENEDGTYDIFYTAAKPGTYVIYVRFGGVDIPNSPFTVMVTEEAYVPVSDMNGLGFKPFDLVIPFAVRKGEITGEVHMPSGKTATPEIVDNKDGTVTVRYAPTEVGLHEMHIKYMGSHIPESPLQFYVNYPNSGSVSAYGPGLVYGVANKTATFTIVTEDAGEGGLDLAIEGPSKAEISCIDNKDGTCTVTYLPTLPGDYSILVKYNDKHIPGSPFTAKITDDSRRCSQVKLGSAADFLLDISETDLSSLTASIKAPSGRDEPCLLKRLPNNHIGISFIPREVGEHLVSIKKNGNHVANSPVSIMVVQSEIGDARRAKVYGRGLSEGRTFEMSDFIVDTRDAGYGGISLAVEGPSKVDIQTEDLEDGTCKVSYFPTVPGVYIVSTKFADEHVPGSPFTVKISGEGRVKESITRTSRAPSVATVGSICDLNLKIPEINSSDMSAHVTSPSGRVTEAEIVPMGKNSHCVRFVPQEMGVHTVSVKYRGQHVTGSPFQFTVGPLGEGGAHKVRAGGPGLERGEAGVPAEFSIWTREAGAGGLSIAVEGPSKAEITFDDHKNGSCGVSYIAQEPGNYEVSIKFNDEHIPESPYLVPVIAPSDDARRLTVMSLQESGLKVNQPASFAIRLNGAKGKIDAKVHSPSGAVEECHVSELEPDKYAVRFIPHENGVHTIDVKFNGSHVVGSPFKVRVGEPGQAGNPALVSAYGTGLEGGTTGIQSEFFINTTRAGPGTLSVTIEGPSKVKMDCQETPEGYKVMYTPMAPGNYLISVKYGGPNHIVGSPFKAKVTGQRLVSPGSANETSSILVESVTRSSTETCYSAIPKASSDASKVTSKGAGLSKAFVGQKSSFLVDCSKAGSNMLLIGVHGPTTPCEEVSMKHVGNQQYNVTYVVKERGDYVLAVKWGEEHIPGSPFHVTVP

SEQ ID NO: 15926 - protein, 2561 aa, Homo sapiens
MPVTEKDLAEDAPWKKIQQNTFTRWCNEHLKCVNKRIGNLQTDLSDGLRLIALLEVLSQKRMYRKYHQRPTFRQMQLENVSVALEFLDRESIKLVSIDSKAIVDGNLKLILGLVWTLILHYSISMPVWEDEGDDDAKKQTPKQRLLGWIQNKIPYLPITNFNQNWQDGKALGALVDSCAPGLCPDWESWDPQKPVDNAREAMQQADDWLGVPQVITPEEIIHPDVDEHSVMTYLSQFPKAKLKPGAPLKPKLNPKKARAYGRGIEPTGNMVKQPAKFTVDTISAGQGDVMVFVEDPEGNKEEAQVTPDSDKNKTYSVEYLPKVTGLHKVTVLFAGQHISKSPFEVSVDKAQGDASKVTAKGPGLEAVGNIANKPTYFDIYTAGAGVGDIGVEVEDPQGKNTVELLVEDKGNQVYRCVYKPMQPGPHVVKIFFAGDTIPKSPFVVQVGEACNPNACRASGRGLQPKGVRIRETTDFKVDTKAAGSGELGVTMKGPKGLEELVKQKDFLDGVYAFEYYPSTPGRYSIAITWGGHHIPKSPFEVQVGPEAGMQKVRAWGPGLHGGIVGRSADFVVESIGSEVGSLGFAIEGPSQAKIEYNDQNDGSCDVKYWPKEPGEYAVHIMCDDEDIKDSPYMAFIHPATGGYNPDLVRAYGPGLEKSGCIVNNLAEFTVDPKDAGKAPLKIFAQDGEGQRIDIQMKNRMDGTYACSYTPVKAIKHTIAVVWGGVNIPHSPYRVNIGQGSHPQKVKVFGPGVERSGLKANEPTHFTVDCTEAGEGDVSVGIKCDARVLSEDEEDVDFDIIHNANDTFTVKYVPPAAGRYTIKVLFASQEIPASPFRVKVDPSHDASKVKAEGPGLSKAGVENGKPTHFTVYTKGAGKAPLNVQFNSPLPGDAVKDLDIIDNYDYSHTVKYTPTQQGNMQVLVTYGGDPIPKSPFTVGVAAPLDLSKIKLNGLENRVEVGKDQEFTVDTRGAGGQGKLDVTILSPSRKVVPCLVTPVTGRENSTAKFIPREEGLYAVDVTYDGHPVPGSPYTVEASLPPDPSKVKAHGPGLEGGLVGKPAEFTIDTKGAGTGGLGLTVEGPCEAKIECSDNGDGTCSVSYLPTKPGEYFVNILFEEVHIPGSPFKADIEMPFDPSKVVASGPGLEHGKVGEAGLLSVDCSEAGPGALGLEAVSDSGTKAEVSIQNNKDGTYAVTYVPLTAGMYTLTMKYGGELVPHFPARVKVEPAVDTSRIKVFGPGIEGKDVFREATTDFTVDSRPLTQVGGDHIKAHIANPSGASTECFVTDNADGTYQVEYTPFEKGLHVVEVTYDDVPIPNSPFKVAVTEGCQPSRVQAQGPGLKEAFTNKPNVFTVVTRGAGIGGLGITVEGPSESKINCRDNKDGSCSAEYIPFAPGDYDVNITYGGAHIPGSPFRVPVKDVVDPSKVKIAGPGLGSGVRARVLQSFTVDSSKAGLAPLEVRVLGPRGLVEPVNVVDNGDGTHTVTYTPSQEGPYMVSVKYADEEIPRSPFKVKVLPTYDASKVTASGPGLSSYGVPASLPVDFAIDARDAGEGLLAVQITDQEGKPKRAIVHDNKDGTYAVTYIPDKTGRYMIGVTYGGDDIPLSPYRIRATQTGDASKCLATGPGIASTVKTGEEVGFVVDAKTAGKGKVTCTVLTPDGTEAEADVIENEDGTYDIFYTAAKPGTYVIYVRFGGVDIPNSPFTVMATDGEVTAVEEAPVNACPPGFRPWVTEEAYVPVSDMNGLGFKPFDLVIPFAVRKGEITGEVHMPSGKTATPEIVDNKDGTVTVRYAPTEVGLHEMHIKYMGSHIPESPLQFYVNYPNSGSVSAYGPGLVYGVANKTATFTIVTEDAGEGGLDLAIEGPSKAEISCIDNKDGTCTVTYLPTLPGDYSILVKYNDKHIPGSPFTAKITDDSRRCSQVKLGSAADFLLDISETDLSSLTASIKAPSGRDEPCLLKRLPNNHIGISFIPREVGEHLVSIKKNGNHVANSPVSIMVVQSEIGDARRAKVYGRGLSEGRTFEMSDFIVDTRDAGYGGISLAVEGPSKVDIQTEDLEDGTCKVSYFPTVPGVYIVSTKFADEHVPEINSSDMSAHVTSPSGRVTEAEIVPMGKNSHCVRFVPQEMGVHTVSVKYRGQHVTGSPFQFTVGPLGEGGAHKVRAGGPGLERGEAGVPAEFSIWTREAGAGGLSIAVEGPSKAEITFDDHKNGSCGVSYIAQEPGNYEVSIKFNDEHIPESPYLVPVIAPSDDARRLTVMSLQESGLKVNQPASFAIRLNGAKGKIDAKVHSPSGAVEECHVSELEPDKYAVRFIPHENGVHTIDVKFNGSHVVGSPFKVRVGEPGQAGNPALVSAYGTGLEGGTTGIQSEFFINTTRAGPGTLSVTIEGPSKVKMDCQETPEGYKVMYTPMAPGNYLISVKYGGPNHIVGSPFKAKVTGQRLVSPGSANETSSILVESVTRSSTETCYSAIPKASSDASKVTSKGAGLSKAFVGQKSSFLVDCSKAGSNMLLIGVHGPTTPCEEVSMKHVGNQQYNVTYVVKERGDYVLAVKWGEEHIPGSPFHVTVP

SEQ ID NO: 15927 - protein, 2422 aa, Homo sapiens
MQEHSTRRRSLSLCPDWESWDPQKPVDNAREAMQQADDWLGVPQVITPEEIIHPDVDEHSVMTYLSQFPKAKLKPGAPLKPKLNPKKARAYGRGIEPTGNMVKQPAKFTVDTISAGQGDVMVFVEDPEGNKEEAQVTPDSDKNKTYSVEYLPKVTGLHKVTVLFAGQHISKSPFEVSVDKAQGDASKVTAKGPGLEAVGNIANKPTYFDIYTAGAGVGDIGVEVEDPQGKNTVELLVEDKGNQVYRCVYKPMQPGPHVVKIFFAGDTIPKSPFVVQVGEACNPNACRASGRGLQPKGVRIRETTDFKVDTKAAGSGELGVTMKGPKGLEELVKQKDFLDGVYAFEYYPSTPGRYSIAITWGGHHIPKSPFEVQVGPEAGMQKVRAWGPGLHGGIVGRSADFVVESIGSEVGSLGFAIEGPSQAKIEYNDQNDGSCDVKYWPKEPGEYAVHIMCDDEDIKDSPYMAFIHPATGGYNPDLVRAYGPGLEKSGCIVNNLAEFTVDPKDAGKAPLKIFAQDGEGQRIDIQMKNRMDGTYACSYTPVKAIKHTIAVVWGGVNIPHSPYRVNIGQGSHPQKVKVFGPGVERSGLKANEPTHFTVDCTEAGEGDVSVGIKCDARVLSEDEEDVDFDIIHNANDTFTVKYVPPAAGRYTIKVLFASQEIPASPFRVKVDPSHDASKVKAEGPGLSKAGVENGKPTHFTVYTKGAGKAPLNVQFNSPLPGDAVKDLDIIDNYDYSHTVKYTPTQQGNMQVLVTYGGDPIPKSPFTVGVAAPLDLSKIKLNGLENRVEVGKDQEFTVDTRGAGGQGKLDVTILSPSRKVVPCLVTPVTGRENSTAKFIPREEGLYAVDVTYDGHPVPGSPYTVEASLPPDPSKVKAHGPGLEGGLVGKPAEFTIDTKGAGTGGLGLTVEGPCEAKIECSDNGDGTCSVSYLPTKPGEYFVNILFEEVHIPGSPFKADIEMPFDPSKVVASGPGLEHGKVGEAGLLSVDCSEAGPGALGLEAVSDSGTKAEVSIQNNKDGTYAVTYVPLTAGMYTLTMKYGGELVPHFPARVKVEPAVDTSRIKVFGPGIEGKDVFREATTDFTVDSRPLTQVGGDHIKAHIANPSGASTECFVTDNADGTYQVEYTPFEKGLHVVEVTYDDVPIPNSPFKVAVTEGCQPSRVQAQGPGLKEAFTNKPNVFTVVTRGAGIGGLGITVEGPSESKINCRDNKDGSCSAEYIPFAPGDYDVNITYGGAHIPGSPFRVPVKDVVDPSKVKIAGPGLGSGVRARVLQSFTVDSSKAGLAPLEVRVLGPRGLVEPVNVVDNGDGTHTVTYTPSQEGPYMVSVKYADEEIPRSPFKVKVLPTYDASKVTASGPGLSSYGVPASLPVDFAIDARDAGEGLLAVQITDQEGKPKRAIVHDNKDGTYAVTYIPDKTGRYMIGVTYGGDDIPLSPYRIRATQTGDASKCLATGPGIASTVKTGEEVGFVVDAKTAGKGKVTCTVLTPDGTEAEADVIENEDGTYDIFYTAAKPGTYVIYVRFGGVDIPNSPFTVMATDGEVTAVEEAPVTEEAYVPVSDMNGLGFKPFDLVIPFAVRKGEITGEVHMPSGKTATPEIVDNKDGTVTVRYAPTEVGLHEMHIKYMGSHIPESPLQFYVNYPNSGSVSAYGPGLVYGVANKTATFTIVTEDAGEGGLDLAIEGPSKAEISCIDNKDGTCTVTYLPTLPGDYSILVKYNDKHIPGSPFTAKITDDSRRCSQVKLGSAADFLLDISETDLSSLTASIKAPSGRDEPCLLKRLPNNHIGISFIPREVGEHLVSIKKNGNHVANSPVSIMVVQSEIGDARRAKVYGRGLSEGRTFEMSDFIVDTRDAGYGGISLAVEGPSKVDIQTEDLEDGTCKVSYFPTVPGVYIVSTKFADEHVPGSPFTVKISGEGRVKESITRTSRAPSVATVGSICDLNLKIPEINSSDMSAHVTSPSGRVTEAEIVPMGKNSHCVRFVPQEMGVHTVSVKYRGQHVTGSPFQFTVGPLGEGGAHKVRAGGPGLERGEAGVPAEFSIWTREAGAGGLSIAVEGPSKAEITFDDHKNGSCGVSYIAQEPGNYEVSIKFNDEHIPESPYLVPVIAPSDDARRLTVMSLQESGLKVNQPASFAIRLNGAKGKIDAKVHSPSGAVEECHVSELEPDKYAVRFIPHENGVHTIDVKFNGSHVVGSPFKVRVGEPGQAGNPALVSAYGTGLEGGTTGIQSEFFINTTRAGPGTLSVTIEGPSKVKMDCQETPEGYKVMYTPMAPGNYLISVKYGGPNHIVGSPFKAKVTGQRLVSPGSANETSSILVESVTRSSTETCYSAIPKASSDASKVTSKGAGLSKAFVGQKSSFLVDCSKAGSNMLLIGVHGPTTPCEEVSMKHVGNQQYNVTYVVKERGDYVLAVKWGEEHIPGSPFHVTVP

SEQ ID NO: 15928 - protein, 2150 aa, Homo sapiens
MPVTEKDLAEDAPWKKIQQNTFTRWCNEHLKCVNKRIGNLQTDLSDGLRLIALLEVLSQKRMYRKYHQRPTFRQMQLENVSVALEFLDRESIKLVSIDSKAIVDGNLKLILGLVWTLILHYSISMPVWEDEGDDDAKKQTPKQRLLGWIQNKIPYLPITNFNQNWQDGKALGALVDSCAPGLCPDWESWDPQKPVDNAREAMQQADDWLGVPQVITPEEIIHPDVDEHSVMTYLSQFPKAKLKPGAPLKPKLNPKKARAYGRGIEPTGNMVKQPAKFTVDTISAGQGDVMVFVEDPEGNKEEAQVTPDSDKNKTYSVEYLPKVTGLHKVTVLFAGQHISKSPFEVSVDKAQGDASKVTAKGPGLEAVGNIANKPTYFDIYTAGAGVGDIGVEVEDPQGKNTVELLVEDKGNQVYRCVYKPMQPGPHVVKIFFAGDTIPKSPFVVQVGEACNPNACRASGRGLQPKGVRIRETTDFKVDTKAAGSGELGVTMKGPKGLEELVKQKDFLDGVYAFEYYPSTPGRYSIAITWGGHHIPKSPFEVQVGPEAGMQKVRAWGPGLHGGIVGRSADFVVESIGSEVGSLGFAIEGPSQAKIEYNDQNDGSCDVKYWPKEPGEYAVHIMCDDEDIKDSPYMAFIHPATGGYNPDLVRAYGPGLEKSGCIVNNLAEFTVDPKDAGKAPLKIFAQDGEGQRIDIQMKNRMDGTYACSYTPVKAIKHTIAVVWGGVNIPHSPYRVNIGQGSHPQKVKVFGPGVERSGLKANEPTHFTVDCTEAGEGDVSVGIKCDARVLSEDEEDVDFDIIHNANDTFTVKYVPPAAGRYTIKVLFASQEIPASPFRVKVDPSHDASKVKAEGPGLSKAGVENGKPTHFTVYTKGAGKAPLNVQFNSPLPGDAVKDLDIIDNYDYSHTVKYTPTQQGNMQVLVTYGGDPIPKSPFTVGVAAPLDLSKIKLNGLENRVEVGKDQEFTVDTRGAGGQGKLDVTILSPSRKVVPCLVTPVTGRENSTAKFIPREEGLYAVDVTYDGHPVPGSPYTVEASLPPDPSKVKAHGPGLEGGLVGKPAEFTIDTKGAGTGGLGLTVEGPCEAKIECSDNGDGTCSVSYLPTKPGEYFVNILFEEVHIPGSPFKADIEMPFDPSKVVASGPGLEHGKVGEAGLLSVDCSEAGPGALGLEAVSDSGTKAEVSIQNNKDGTYAVTYVPLTAGMYTLTMKYGGELVPHFPARVKVEPAVDTSRIKVFGPGIEGKDVFREATTDFTVDSRPLTQVGGDHIKAHIANPSGASTECFVTDNADGTYQVEYTPFEKGLHVVEVTYDDVPIPNSPFKVAVTEGCQPSRVQAQGPGLKEAFTNKPNVFTVVTRGAGIGGLGITVEGPSESKINCRDNKDGSCSAEYIPFAPGDYDVNITYGGAHIPGSPFRVPVKDVVDPSKVKIAGPGLGSGVRARVLQSFTVDSSKAGLAPLEVRVLGPRGLVEPVNVVDNGDGTHTVTYTPSQEGPYMVSVKYADEEIPRSPFKVKVLPTYDASKVTASGPGLSSYGVPASLPVDFAIDARDAGEGLLAVQITDQEGKPKRAIVHDNKDGTYAVTYIPDKTGRYMIGVTYGGDDIPLSPYRIRATQTGDASKCLATGPGIASTVKTGEEVGFVVDAKTAGKGKVTCTVLTPDGTEAEADVIENEDGTYDIFYTAAKPGTYVIYVRFGGVDIPNSPFTVMATDGEVTAVEEAPVNACPPGFRPWVTEEAYVPVSDMNGLGFKPFDLVIPFAVRKGEITGEVHMPSGKTATPEIVDNKDGTVTVRYAPTEVGLHEMHIKYMGSHIPESPLQFYVNYPNSGSVSAYGPGLVYGVANKTATFTIVTEDAGEGGLDLAIEGPSKAEISCIDNKDGTCTVTYLPTLPGDYSILVKYNDKHIPGSPFTAKITDDSRRCSQVKLGSAADFLLDISETDLSSLTASIKAPSGRDEPCLLKRLPNNHIGISFIPREVGEHLVSIKKNGNHVANSPVSIMVVQSEIGDARRAKVYGRGLSEGRTFEMSDFIVDTRDAGYGGISLAVEGPSKVDIQTEDLEDGTCKVSYFPTVPGVYIVSTKFADEHVPGSPFTVKISGEGRVKESITRTSRAPSVATVGSICDLNLKIPGVRVMNCSAQILWGWRVQFHTGSRNQQQ

SEQ ID NO: 15929 - protein, 2146 aa, Homo sapiens
MPVTEKDLAEDAPWKKIQQNTFTRWCNEHLKCVNKRIGNLQTDLSDGLRLIALLEVLSQKRMYRKYHQRPTFRQMQLENVSVALEFLDRESIKLVSIDSKAIVDGNLKLILGLVWTLILHYSISMPVWEDEGDDDAKKQTPKQRLLGWIQNKIPYLPITNFNQNWQDGKALGALVDSCAPGLCPDWESWDPQKPVDNAREAMQQADDWLGVPQVITPEEIIHPDVDEHSVMTYLSQFPKAKLKPGAPLKPKLNPKKARAYGRGIEPTGNMVKQPAKFTVDTISAGQGDVMVFVEDPEGNKEEAQVTPDSDKNKTYSVEYLPKVTGLHKVTVLFAGQHISKSPFEVSVDKAQGDASKVTAKGPGLEAVGNIANKPTYFDIYTAGAGVGDIGVEVEDPQGKNTVELLVEDKGNQVYRCVYKPMQPGPHVVKIFFAGDTIPKSPFVVQVGEACNPNACRASGRGLQPKGVRIRETTDFKVDTKAAGSGELGVTMKGPKGLEELVKQKDFLDGVYAFEYYPSTPGRYSIAITWGGHHIPKSPFEVQVGPEAGMQKVRAWGPGLHGGIVGRSADFVVESIGSEVGSLGFAIEGPSQAKIEYNDQNDGSCDVKYWPKEPGEYAVHIMCDDEDIKDSPYMAFIHPATGGYNPDLVRAYGPGLEKSGCIVNNLAEFTVDPKDAGKAPLKIFAQDGEGQRIDIQMKNRMDGTYACSYTPVKAIKHTIAVVWGGVNIPHSPYRVNIGQGSHPQKVKVFGPGVERSGLKANEPTHFTVDCTEAGEGDVSVGIKCDARVLSEDEEDVDFDIIHNANDTFTVKYVPPAAGRYTIKVLFASQEIPASPFRVKVDPSHDASKVKAEGPGLSKAGVENGKPTHFTVYTKGAGKAPLNVQFNSPLPGDAVKDLDIIDNYDYSHTVKYTPTQQGNMQVLVTYGGDPIPKSPFTVGVAAPLDLSKIKLNGLENRVEVGKDQEFTVDTRGAGGQGKLDVTILSPSRKVVPCLVTPVTGRENSTAKFIPREEGLYAVDVTYDGHPVPGSPYTVEASLPPDPSKVKAHGPGLEGGLVGKPAEFTIDTKGAGTGGLGLTVEGPCEAKIECSDNGDGTCSVSYLPTKPGEYFVNILFEEVHIPGSPFKADIEMPFDPSKVVASGPGLEHGKVGEAGLLSVDCSEAGPGALGLEAVSDSGTKAEVSIQNNKDGTYAVTYVPLTAGMYTLTMKYGGELVPHFPARVKVEPAVDTSRIKVFGPGIEGKDVFREATTDFTVDSRPLTQVGGDHIKAHIANPSGASTECFVTDNADGTYQVEYTPFEKGLHVVEVTYDDVPIPNSPFKVAVTEGCQPSRVQAQGPGLKEAFTNKPNVFTVVTRGAGIGGLGITVEGPSESKINCRDNKDGSCSAEYIPFAPGDYDVNITYGGAHIPGSPFRVPVKDVVDPSKVKIAGPGLGSGVRARVLQSFTVDSSKAGLAPLEVRVLGPRGLVEPVNVVDNGDGTHTVTYTPSQEGPYMVSVKYADEEIPRSPFKVKVLPTYDASKVTASGPGLSSYGVPASLPVDFAIDARDAGEGLLAVQITDQEGKPKRAIVHDNKDGTYAVTYIPDKTGRYMIGVTYGGDDIPLSPYRIRATQTGDASKCLATGPGIASTVKTGEEVGFVVDAKTAGKGKVTCTVLTPDGTEAEADVIENEDGTYDIFYTAAKPGTYVIYVRFGGVDIPNSPFTVMATDGEVTAVEEAPVNACPPGFRPWVTEEAYVPVSDMNGLGFKPFDLVIPFAVRKGEITGEVHMPSGKTATPEIVDNKDGTVTVRYAPTEVGLHEMHIKYMGSHIPESPLQFYVNYPNSGSVSAYGPGLVYGVANKTATFTIVTEDAGEGGLDLAIEGPSKAEISCIDNKDGTCTVTYLPTLPGDYSILVKYNDKHIPGSPFTAKITDDSRRCSQVKLGSAADFLLDISETDLSSLTASIKAPSGRDEPCLLKRLPNNHIGISFIPREVGEHLVSIKKNGNHVANSPVSIMVVQSEIGDARRAKVYGRGLSEGRTFEMSDFIVDTRDAGYGGISLAVEGPSKVDIQTEDLEDGTCKVSYFPTVPGVYIVSTKFADEHVPGSPFTVKISGEGRVKESITRTSRAPSVATVGSICDLNLKIPGVRVMNCSAQILWGWRVQFHTGSR

SEQ ID NO: 15930 - protein, 2537 aa, Homo sapiens
MPVTEKDLAEDAPWKKIQQNTFTRWCNEHLKCVNKRIGNLQTDLSDGLRLIALLEVLSQKRMYRKYHQRPTFRQMQLENVSVALEFLDRESIKLVSIDSKAIVDGNLKLILGLVWTLILHYSISMPVWEDEGDDDAKKQTPKQRLLGWIQNKIPYLPITNFNQNWQDGKALGALVDSCAPGLCPDWESWDPQKPVDNAREAMQQADDWLGVPQVITPEEIIHPDVDEHSVMTYLSQFPKAKLKPGAPLKPKLNPKKARAYGRGIEPTGNMVKQPAKFTVDTISAGQGDVMVFVEDPEGNKEEAQVTPDSDKNKTYSVEYLPKVTGLHKVTVLFAGQHISKSPFEVSVDKAQGDASKVTAKGPGLEAVGNIANKPTYFDIYTAGAGVGDIGVEVEDPQGKNTVELLVEDKGNQVYRCVYKPMQPGPHVVKIFFAGDTIPKSPFVVQVGEACNPNACRASGRGLQPKGVRIRETTDFKVDTKAAGSGELGVTMKGPKGLEELVKQKDFLDGVYAFEYYPSTPGRYSIAITWGGHHIPKSPFEVQVGPEAGMQKVRAWGPGLHGGIVGRSADFVVESIGSEVGSLGFAIEGPSQAKIEYNDQNDGSCDVKYWPKEPGEYAVHIMCDDEDIKDSPYMAFIHPATGGYNPDLVRAYGPGLEKSGCIVNNLAEFTVDPKDAGKAPLKIFAQDGEGQRIDIQMKNRMDGTYACSYTPVKAIKHTIAVVWGGVNIPHSPYRVNIGQGSHPQKVKVFGPGVERSGLKANEPTHFTVDCTEAGEGDVSVGIKCDARVLSEDEEDVDFDIIHNANDTFTVKYVPPAAGRYTIKVLFASQEIPASPFRVKVDPSHDASKVKAEGPGLSKAGVENGKPTHFTVYTKGAGKAPLNVQFNSPLPGDAVKDLDIIDNYDYSHTVKYTPTQQGNMQVLVTYGGDPIPKSPFTVGVAAPLDLSKIKLNGLENRVEVGKDQEFTVDTRGAGGQGKLDVTILSPSRKVVPCLVTPVTGRENSTAKFIPREEGLYAVDVTYDGHPVPGSPYTVEASLPPDPSKVKAHGPGLEGGLVGKPAEFTIDTKGAGTGGLGLTVEGPCEAKIECSDNGDGTCSVSYLPTKPGEYFVNILFEEVHIPGSPFKADIEMPFDPSKVVASGPGLEHGKVGEAGLLSVDCSEAGPGALGLEAVSDSGTKAEVSIQNNKDGTYAVTYVPLTAGMYTLTMKYGGELVPHFPARVKVEPAVDTSRIKVFGPGIEGKDVFREATTDFTVDSRPLTQVGGDHIKAHIANPSGASTECFVTDNADGTYQVEYTPFEKGLHVVEVTYDDVPIPNSPFKVAVTEGCQPSRVQAQGPGLKEAFTNKPNVFTVVTRGAGIGGLGITVEGPSESKINCRDNKDGSCSAEYIPFAPGDYDVNITYGGAHIPGSPFRVPVKDVVDPSKVKIAGPGLGSGVRARVLQSFTVDSSKAGLAPLEVRVLGPRGLVEPVNVVDNGDGTHTVTYTPSQEGPYMVSVKYADEEIPRSPFKVKVLPTYDASKVTASGPGLSSYGVPASLPVDFAIDARDAGEGLLAVQITDQEGKPKRAIVHDNKDGTYAVTYIPDKTGRYMIGVTYGGDDIPLSPYRIRATQTGDASKCLATGPGIASTVKTGEEVGFVVDAKTAGKGKVTCTVLTPDGTEAEADVIENEDGTYDIFYTAAKPGTYVIYVRFGGVDIPNSPFTVMVTEEAYVPVSDMNGLGFKPFDLVIPFAVRKGEITGEVHMPSGKTATPEIVDNKDGTVTVRYAPTEVGLHEMHIKYMGSHIPESPLQFYVNYPNSGSVSAYGPGLVYGVANKTATFTIVTEDAGEGGLDLAIEGPSKAEISCIDNKDGTCTVTYLPTLPGDYSILVKYNDKHIPGSPFTAKITDDSRRCSQVKLGSAADFLLDISETDLSSLTASIKAPSGRDEPCLLKRLPNNHIGISFIPREVGEHLVSIKKNGNHVANSPVSIMVVQSEIGDARRAKVYGRGLSEGRTFEMSDFIVDTRDAGYGGISLAVEGPSKVDIQTEDLEDGTCKVSYFPTVPGVYIVSTKFADEHVPEINSSDMSAHVTSPSGRVTEAEIVPMGKNSHCVRFVPQEMGVHTVSVKYRGQHVTGSPFQFTVGPLGEGGAHKVRAGGPGLERGEAGVPAEFSIWTREAGAGGLSIAVEGPSKAEITFDDHKNGSCGVSYIAQEPGNYEVSIKFNDEHIPESPYLVPVIAPSDDARRLTVMSLQESGLKVNQPASFAIRLNGAKGKIDAKVHSPSGAVEECHVSELEPDKYAVRFIPHENGVHTIDVKFNGSHVVGSPFKVRVGEPGQAGNPALVSAYGTGLEGGTTGIQSEFFINTTRAGPGTLSVTIEGPSKVKMDCQETPEGYKVMYTPMAPGNYLISVKYGGPNHIVGSPFKAKVTGQRLVSPGSANETSSILVESVTRSSTETCYSAIPKASSDASKVTSKGAGLSKAFVGQKSSFLVDCSKAGSNMLLIGVHGPTTPCEEVSMKHVGNQQYNVTYVVKERGDYVLAVKWGEEHIPGSPFHVTVP

SEQ ID NO: 15931 - protein, 2633 aa, Homo sapiens
MPVTEKDLAEDAPWKKIQQNTFTRWCNEHLKCVNKRIGNLQTDLSDGLRLIALLEVLSQKRMYRKYHQRPTFRQMQLENVSVALEFLDRESIKLVSIDSKAIVDGNLKLILGLVWTLILHYSISMPVWEDEGDDDAKKQTPKQRLLGWIQNKIPYLPITNFNQNWQDGKALGALVDSCAPGLCPDWESWDPQKPVDNAREAMQQADDWLGVPQVITPEEIIHPDVDEHSVMTYLSQFPKAKLKPGAPLKPKLNPKKARAYGRGIEPTGNMVKQPAKFTVDTISAGQGDVMVFVEDPEGNKEEAQVTPDSDKNKTYSVEYLPKVTGLHKVTVLFAGQHISKSPFEVSVDKAQGDASKVTAKGPGLEAVGNIANKPTYFDIYTAGAGVGDIGVEVEDPQGKNTVELLVEDKGNQVYRCVYKPMQPGPHVVKIFFAGDTIPKSPFVVQVGEACNPNACRASGRGLQPKGVRIRETTDFKVDTKAAGSGELGVTMKGPKGLEELVKQKDFLDGVYAFEYYPSTPGRYSIAITWGGHHIPKSPFEVQVGPEAGMQKVRAWGPGLHGGIVGRSADFVVESIGSEVGSLGFAIEGPSQAKIEYNDQNDGSCDVKYWPKEPGEYAVHIMCDDEDIKDSPYMAFIHPATGGYNPDLVRAYGPGLEKSGCIVNNLAEFTVDPKDAGKAPLKIFAQDGEGQRIDIQMKNRMDGTYACSYTPVKAIKHTIAVVWGGVNIPHSPYRVNIGQGSHPQKVKVFGPGVERSGLKANEPTHFTVDCTEAGEGDVSVGIKCDARVLSEDEEDVDFDIIHNANDTFTVKYVPPAAGRYTIKVLFASQEIPASPFRVKVDPSHDASKVKAEGPGLSKAGVENGKPTHFTVYTKGAGKAPLNVQFNSPLPGDAVKDLDIIDNYDYSHTVKYTPTQQGNMQVLVTYGGDPIPKSPFTVGVAAPLDLSKIKLNGLENRVEVGKDQEFTVDTRGAGGQGKLDVTILSPSRKVVPCLVTPVTGRENSTAKFIPREEGLYAVDVTYDGHPVPGSPYTVEASLPPDPSKVKAHGPGLEGGLVGKPAEFTIDTKGAGTGGLGLTVEGPCEAKIECSDNGDGTCSVSYLPTKPGEYFVNILFEEVHIPGSPFKADIEMPFDPSKVVASGPGLEHGKVGEAGLLSVDCSEAGPGALGLEAVSDSGTKAEVSIQNNKDGTYAVTYVPLTAGMYTLTMKYGGELVPHFPARVKVEPAVDTSRIKVFGPGIEGKDVFREATTDFTVDSRPLTQVGGDHIKAHIANPSGASTECFVTDNADGTYQVEYTPFEKGLHVVEVTYDDVPIPNSPFKVAVTEGCQPSRVQAQGPGLKEAFTNKPNVFTVVTRGAGIGGLGITVEGPSESKINCRDNKDGSCSAEYIPFAPGDYDVNITYGGAHIPGSPFRVPVKDVVDPSKVKIAGPGLGSGVRARVLQSFTVDSSKAGLAPLEVRVLGPRADDTDSQSWRSPLKALSEFFKGDPKGDFNKTGLVEPVNVVDNGDGTHTVTYTPSQEGPYMVSVKYADEEIPRSPFKVKVLPTYDASKVTASGPGLSSYGVPASLPVDFAIDARDAGEGLLAVQITDQEGKPKRAIVHDNKDGTYAVTYIPDKTGRYMIGVTYGGDDIPLSPYRIRATQTGDASKCLATGPGIASTVKTGEEVGFVVDAKTAGKGKVTCTVLTPDGTEAEADVIENEDGTYDIFYTAAKPGTYVIYVRFGGVDIPNSPFTVMATDGEVTAVEEAPVNACPPGFRPWVTEEAYVPVSDMNGLGFKPFDLVIPFAVRKGEITGEVHMPSGKTATPEIVDNKDGTVTVRYAPTEVGLHEMHIKYMGSHIPESPLQFYVNYPNSGSVSAYGPGLVYGVANKTATFTIVTEDAGEGGLDLAIEGPSKAEISCIDNKDGTCTVTYLPTLPGDYSILVKYNDKHIPGSPFTAKITDDSRRCSQVKLGSAADFLLDISETDLSSLTASIKAPSGRDEPCLLKRLPNNHIGISFIPREVGEHLVSIKKNGNHVANSPVSIMVVQSEIGDARRAKVYGRGLSEGRTFEMSDFIVDTRDAGYGGISLAVEGPSKVDIQTEDLEDGTCKVSYFPTVPGVYIVSTKFADEHVPGSPFTVKISGEGRVKESITRTSRAPSVATVGSICDLNLKIPEINSSDMSAHVTSPSGRVTEAEIVPMGKNSHCVRFVPQEMGVHTVSVKYRGQHVTGSPFQFTVGPLGEGGAHKVRAGGPGLERGEAGVPAEFSIWTREAGAGGLSIAVEGPSKAEITFDDHKNGSCGVSYIAQEPGNYEVSIKFNDEHIPESPYLVPVIAPSDDARRLTVMSLQESGLKVNQPASFAIRLNGAKGKIDAKVHSPSGAVEECHVSELEPDKYAVRFIPHENGVHTIDVKFNGSHVVGSPFKVRVGEPGQAGNPALVSAYGTGLEGGTTGIQSEFFINTTRAGPGTLSVTIEGPSKVKMDCQETPEGYKVMYTPMAPGNYLISVKYGGPNHIVGSPFKAKVTGQRLVSPGSANETSSILVESVTRSSTETCYSAIPKASSDASKVTSKGAGLSKAFVGQKSSFLVDCSKAGSNMLLIGVHGPTTPCEEVSMKHVGNQQYNVTYVVKERGDYVLAVKWGEEHIPGSPFHVTVP

SEQ ID NO: 15932 - protein, 2591 aa, Homo sapiens
MPVTEKDLAEDAPWKKIQQNTFTRWCNEHLKCVNKRIGNLQTDLSDGLRLIALLEVLSQKRMYRKYHQRPTFRQMQLENVSVALEFLDRESIKLVSIDSKAIVDGNLKLILGLVWTLILHYSISMPVWEDEGDDDAKKQTPKQRLLGWIQNKIPYLPITNFNQNWQDGKALGALVDSCAPGLCPDWESWDPQKPVDNAREAMQQADDWLGVPQVITPEEIIHPDVDEHSVMTYLSQFPKAKLKPGAPLKPKLNPKKARAYGRGIEPTGNMVKQPAKFTVDTISAGQGDVMVFVEDPEGNKEEAQVTPDSDKNKTYSVEYLPKVTGLHKVTVLFAGQHISKSPFEVSVDKAQGDASKVTAKGPGLEAVGNIANKPTYFDIYTAGAGVGDIGVEVEDPQGKNTVELLVEDKGNQVYRCVYKPMQPGPHVVKIFFAGDTIPKSPFVVQVGEACNPNACRASGRGLQPKGVRIRETTDFKVDTKAAGSGELGVTMKGPKGLEELVKQKDFLDGVYAFEYYPSTPGRYSIAITWGGHHIPKSPFEVQVGPEAGMQKVRAWGPGLHGGIVGRSADFVVESIGSEVGSLGFAIEGPSQAKIEYNDQNDGSCDVKYWPKEPGEYAVHIMCDDEDIKDSPYMAFIHPATGGYNPDLVRAYGPGLEKSGCIVNNLAEFTVDPKDAGKAPLKIFAQDGEGQRIDIQMKNRMDGTYACSYTPVKAIKHTIAVVWGGVNIPHSPYRVNIGQGSHPQKVKVFGPGVERSGLKANEPTHFTVDCTEAGEGDVSVGIKCDARVLSEDEEDVDFDIIHNANDTFTVKYVPPAAGRYTIKVLFASQEIPASPFRVKVDPSHDASKVKAEGPGLSKAGVENGKPTHFTVYTKGAGKAPLNVQFNSPLPGDAVKDLDIIDNYDYSHTVKYTPTQQGNMQVLVTYGGDPIPKSPFTVGVAAPLDLSKIKLNGLENRVEVGKDQEFTVDTRGAGGQGKLDVTILSPSRKVVPCLVTPVTGRENSTAKFIPREEGLYAVDVTYDGHPVPGSPYTVEASLPPDPSKVKAHGPGLEGGLVGKPAEFTIDTKGAGTGGLGLTVEGPCEAKIECSDNGDGTCSVSYLPTKPGEYFVNILFEEVHIPGSPFKADIEMPFDPSKVVASGPGLEHGKVGEAGLLSVDCSEAGPGALGLEAVSDSGTKAEVSIQNNKDGTYAVTYVPLTAGMYTLTMKYGGELVPHFPARVKVEPAVDTSRIKVFGPGIEGKDVFREATTDFTVDSRPLTQVGGDHIKAHIANPSGASTECFVTDNADGTYQVEYTPFEKGLHVVEVTYDDVPIPNSPFKVAVTEGCQPSRVQAQGPGLKEAFTNKPNVFTVVTRGAGIGGLGITVEGPSESKINCRDNKDGSCSAEYIPFAPGDYDVNITYGGAHIPGSPFRVPVKDVVDPSKVKIAGPGLGSGVRARVLQSFTVDSSKAGLAPLEVRVLGPRGLVEPVNVVDNGDGTHTVTYTPSQEGPYMVSVKYADEEIPRSPFKVKVLPTYDASKVTASGPGLSSYGVPASLPVDFAIDARDAGEGLLAVQITDQEGKPKRAIVHDNKDGTYAVTYIPDKTGRYMIGVTYGGDDIPLSPYRIRATQTGDASKCLATGPGIASTVKTGEEVGFVVDAKTAGKGKVTCTVLTPDGTEAEADVIENEDGTYDIFYTAAKPGTYVIYVRFGGVDIPNSPFTVMATDGEVTAVEEAPVTEEAYVPVSDMNGLGFKPFDLVIPFAVRKGEITGEVHMPSGKTATPEIVDNKDGTVTVRYAPTEVGLHEMHIKYMGSHIPESPLQFYVNYPNSGSVSAYGPGLVYGVANKTATFTIVTEDAGEGGLDLAIEGPSKAEISCIDNKDGTCTVTYLPTLPGDYSILVKYNDKHIPGSPFTAKITDDSRRCSQVKLGSAADFLLDISETDLSSLTASIKAPSGRDEPCLLKRLPNNHIGISFIPREVGEHLVSIKKNGNHVANSPVSIMVVQSEIGDARRAKVYGRGLSEGRTFEMSDFIVDTRDAGYGGISLAVEGPSKVDIQTEDLEDGTCKVSYFPTVPGVYIVSTKFADEHVPGSPFTVKISGEGRVKESITRTSRAPSVATVGSICDLNLKIPEINSSDMSAHVTSPSGRVTEAEIVPMGKNSHCVRFVPQEMGVHTVSVKYRGQHVTGSPFQFTVGPLGEGGAHKVRAGGPGLERGEAGVPAEFSIWTREAGAGGLSIAVEGPSKAEITFDDHKNGSCGVSYIAQEPGNYEVSIKFNDEHIPESPYLVPVIAPSDDARRLTVMSLQESGLKVNQPASFAIRLNGAKGKIDAKVHSPSGAVEECHVSELEPDKYAVRFIPHENGVHTIDVKFNGSHVVGSPFKVRVGEPGQAGNPALVSAYGTGLEGGTTGIQSEFFINTTRAGPGTLSVTIEGPSKVKMDCQETPEGYKVMYTPMAPGNYLISVKYGGPNHIVGSPFKAKVTGQRLVSPGSANETSSILVESVTRSSTETCYSAIPKASSDASKVTSKGAGLSKAFVGQKSSFLVDCSKAGSNMLLIGVHGPTTPCEEVSMKHVGNQQYNVTYVVKERGDYVLAVKWGEEHIPGSPFHVTVP

SEQ ID NO: 15933 - protein, 238 aa, Homo sapiens
MRQSGASQPLLINMYLPDPVGDGLFKDGKNPSWGPLSPAVQKGSGQIQLWQFLLELLADRANAGCIAWEGGHGEFKLTDPDEVARRWGERKSKPNMNYDKLSRALRYYYDKNIMSKVHGKRYAYRFDFQGLAQACQPPPAHAHAAAAAAAAAAAAQDGALYKLPAGLAPLPFPGLSKLNLMAASAGVAPAGFSYWPGPGPAATAAAATAALYPSPSLQPPPGPFGAVAAASHLGGHYH

SEQ ID NO: 15934 - protein, 99 aa, Homo sapiens
MGLFMIIAILLFQKPTVTEQLKKCWNNYVQGHCRKICRVNEVPEALCENGRYCCLNIKELEACKKITKPPRPKPATLALTLQDYVTIIENFPSLKTQST

SEQ ID NO: 15935 - protein, 318 aa, Homo sapiens
MAGLKRRASQVWPEEHGEQEHGLYSLHRMFDIVGTHLTHRDVRVLSFLFVDVIDDHERGLIRNGRDFLLALERQGRCDESNFRQVLQLLRIITRHDLLPYVTLKRRRAVCPDLVDKYLEETSIRYVTPRALSDPEPRPPQPSKTVPPHYPVVCCPTSGPQMCSKRPARGRATLGSQRKRRKSVTPDPKEKQTCDIRLRVRAEYCQHETALQGNVFSNKQDPLERQFERFNQANTILKSRDLGSIICDIKFSELTYLDAFWRDYINGSLLEALKGVFITDSLKQAVGHEAIKLLVNVDEEDYELGRQKLLRNLMLQALP

SEQ ID NO: 15936 - protein, 348 aa, Homo sapiens
MAGLKRRASQVWPEEHGEQEHGLYSLHRMFDIVGTHLTHRDVRVLSFLFVDVIDDHERGLIRNGRDFLLALERQGRCDESNFRQVLQLLRIITRHDLLPYVTLKRRRAVCPDLVDKYLEETSIRYVTPRALSDPEPRPPQPSKTVPPHYPVVCCPTSGPQMCSKRPARGRATLGSQRKRRKSVTPDPKEKQTCGEEIQGFQRWSRLEGEYKELLGHWAVYAIQYIRLRVRAEYCQHETALQGNVFSNKQDPLERQFERFNQANTILKSRDLGSIICDIKFSELTYLDAFWRDYINGSLLEALKGVFITDSLKQAVGHEAIKLLVNVDEEDYELGRQKLLRNLMLQALP

SEQ ID NO: 15937 - protein, 392 aa, Homo sapiens
MEAPLVSLDEEFEDLRPSCSEDPEEKPQCFYGSSPHHLEDPSLSELENFSSEIISFKSMEDLVNEFDEKLNVCFRNYNAKTENLAPVKNQLQIQEEEETLQDEEVWDALTDNYIPSLSEDWRDPNIEALNGNCSDTEIHEKEEEEFNEKSENDSGINEEPLLTADQVIEEIEEMMQNSPDPEEEEEVLEEEDGGETSSQADSVLLQEMQALTQTFNNNWSYEGLRHMSGSELTELLDQVEGAIRDFSEELVQQLARRDELEFEKEVKNSFITVLIEVQNKQKEQRELMKKRRKEKGLSLQSSRIEKGNQMPLKRFSMEGISNILQSGIRQTFGSSGTDKQYLNTVIPYEKKASPPSVEDLQMLTNILFAMKEDNEKVPTLLTDYILKVLCPT

SEQ ID NO: 15938 - protein, 104 aa, Homo sapiens
MEAPLVSLDEEFEDLRPSCSEDPEEKPQCFYGSSPHHLEDPSLSELENFSSEIISFKSMEDLVNEFDEKLNVCFRNYNAKTENLAPVKNQLQIQEEEETLQDEE

SEQ ID NO: 15939 - protein, 820 aa, Homo sapiens
MAGELADKKDRDASPSKEERKRSRTPDRERDRDRDRKSSPSKDRKRHRSRDRRRGGSRSRSRSRSKSAERERRHKERERDKERDRNKKDRDRDKDGHRRDKDRKRSSLSPGRGKDFKSRKDRDSKKDEEDEHGDKKPKAQPLSLEELLAKKKAEEEAEAKPKFLSKAEREAEALKRRQQEVEERQRMLEEERKKRKQFQDLGRKMLEDPQERERRERRERMERETNGNEDEEGRQKIREEKDKSKELHAIKERYLGGIKKRRRTRHLNDRKFVFEWDASEDTSIDYNPLYKERHQVQLLGRGFIAGIDLKQQKREQSRFYGDLMEKRRTLEEKEQEEARLRKLRKKEAKQRWDDRHWSQKKLDEMTDRDWRIFREDYSITTKGGKIPNPIRSWKDSSLPPHILEVIDKCGYKEPTPIQRQAIPIGLQNRDIIGVAETGSGKTAAFLIPLLVWITTLPKIDRIEESDQGPYAIILAPTRELAQQIEEETIKFGKPLGIRTVAVIGGISREDQGFRLRMGCEIVIATPGRLIDVLENRYLVLSRCTYVVLDEADRMIDMGFEPDVQKILEHMPVSNQKPDTDEAEDPEKMLANFESGKHKYRQTVMFTATMPPAVERLARSYLRRPAVVYIGSAGKPHERVEQKVFLMSESEKRKKLLAILEQGFDPPIIIFVNQKKGCDVLAKSLEKMGYNACTLHGGKGQEQREFALSNLKAGAKDILVATDVAGRGIDIQDVSMVVNYDMAKNIEDYIHRIGRTGRAGKSGVAITFLTKEDSAVFYELKQAILESPVSSCPPELANHPDAQHKPGTILTKKRREETIFA

SEQ ID NO: 15940 - protein, 108 aa, Homo sapiens
MAGELADKKDRDASPSKEERKRSRTPDRERDRDRDRKSSPSKDRKRHRSRDRRRGGSRSRSRSRSKSAERERRHKERERDKERDRNKKDRDRDKDGHRRDKDRKRSRH

SEQ ID NO: 15941 - protein, 216 aa, Homo sapiens
MGPRNPSPDHLSESESEEEENISYLNESSGEEWDSSEEEDSMVPNLSPLESLAWQVKCLLKYSTTWKPLNPNSWLYHAKLLDPSTPVHILREIGLRLSHCSHCVPKLEPIPEWPPLASCGVPPFQKPLTSPSRLSRDHATLNGALQFATKQLSRTLSRATPIPEYLKQIPNSCVSGCCCGWLTKTVKETTRTEPINTTYSYTDFQKAVNKLLTASL

SEQ ID NO: 15942 - protein, 619 aa, Homo sapiens
MFVPRSLKIKRNANDDGKSCVAKIIKPDPEDLQLDKSRDVPVDAVATEAATIDRHISESCPFPSPGGQLAEVHSVSPEQGAKDSHPSEEPVKSFSKTQRWAEPGEPICVVCGRYGEYICDKTDEDVCSLECKAKHLLQVKEKEEKSKLSNPQKADSEPESPLNASYVYKEHPFILNLQEDQIENLKQQLGILVQGQEVTRPIIDFEHCSLPEVLNHNLKKSGYEVPTPIQMQMIPVGLLGRDILASADTGSGKTAAFLLPVIMRALFESKTPSALILTPTRELAIQIERQAKELMSGLPRMKTVLLVGGLPLPPQLYRLQQHVKVIIATPGRLLDIIKQSSVELCGVKIVVVDEADTMLKMGFQQQVLDILENIPNDCQTILVSATIPTSIEQLASQLLHNPVRIITGEKNLPCANVRQIILWVEDPAKKKKLFEILNDKKLFKPPVLVFVDCKLGADLLSEAVQKITGLKSISIHSEKSQIERKNILKGLLEGDYEVVVSTGVLGRGLDLISVRLVVNFDMPSSMDEYVHQIGRVGRLGQNGTAITFINNNSKRLFWDIAKRVKPTGSILPPQLLNSPYLHDQKRKEQQKDKQTQNDLVTGANLMDIIRKHDKSNSQK

SEQ ID NO: 15943 - protein, 580 aa, Homo sapiens
MFVPRSLKIKRNANDDGKSCVAKIIKPDPEDLQLDKSRDVPVDAVATEAATIDRHISESCPFPSPGGQLAEVHSVSPEQGAKDSHPSEEPVKSFSKTQRWAEPGEPICVVCGRYGEYICDKTDEDVCSLECKAKHLLQVKEKEEKSKLSNPQKADSEPESPLNASYVYKEHPFILNLQEDQIENLKQQLGILVQGQEVTRPIIDFEHCSLPEVLNHNLKKSGYEVPTPIQMQMIPVGLLGRDILASADTGSGKTAAFLLPVIMRALFESKTPSALILTPTRELAIQIERQAKELMSGLPRMKTVLLVGGLPLPPQLYRLQQHVKVIIATPGRLLDIIKQSSVELCGVKIVVVDEADTMLKMGFQQQVLDILENIPNDCQTILVSATIPTSIEQLASQLLHNPVRIITGEKNLPCANVRQIILWVEDPAKKKKLFEILNDKKLFKPPVLVFVDCKLGADLLSEAVQKITGLKSISIHSEKSQIERKNILKGLLEGDYEVVVSTGVLGRGLDLISVRLVVNFDMPSSMDEYVHQENTYKSTWRNPQHFQQDVRMTLGYVGKAQWEEDNQLKVKLGLKKNCSS

SEQ ID NO: 15944 - protein, 706 aa, Homo sapiens
MDIKHHQNGTRGQRRKQPHTTVQRLLTWGLPVSCSWFLWRQPGEFPVTALLLGAGAGGLLAIGLFQLLVNPMNIYEEQKIMFLYSLVGLGAMGWGTSPHIRCASLLLVPKMLGKEGRLFVLGYALAAIYVGPVANLRHNLNNVIASLGCTVELQINNTRAAWRISTAPLRAMFKDLLSSKELLRAETRNISATFEDLDAQVNSETGYTPEDTMDSGETAQGREARQAPASRLHLSTQKMYELKTKLRCSYVVNQAILSCRRWFDRKHEQCMKHIWVPLLTHLLCLPMKFKFFCGIAKVMEVWCRNRIPVEGNFGQTYDSLNQSIRGLDGEFSANIDFKEEKQAGVLGLNTSWERVSTEVRDYVYRQEARLEWALGLLHVLLSCTFLLVLHASFSYMDSYNHDIRFDNIYISTYFCQIDDRRKKLGKRTLLPLRKAEEKTVIFPCKPTIQASEMSNVVRELLETLPILLLLVVLCGLDWALYSIFDTIRHHSFLQYSFRSSHKLEVKVGGDSMLARLLRKTIGALNTSSETVMESNNMPCLPQPVGLDARAYWRAAVPIGLLVCLCLLQAFGYRLRRVIAAFYFPKREKKRILFLYNDLLKKRAAFTKLRRAAILRRERQQKAPRHPLADILHRGCPLLRRWLCRRCVVCQAPETPESYVCRTLDCEAVYCWSCWDDMRQRCPVCTPREELSSSAFSDSNDDTAYAG

SEQ ID NO: 15945 - protein, 664 aa, Homo sapiens
MDIKHHQNGTRGQRRKQPHTTVQRLLTWGLPVSCSWFLWRQPGEFPVTALLLGAGAGGLLAIGLFQLLVNPMNIYEEQKIMFLYSLVGLGAMGWGTSPHIRCASLLLVPKMLGKEGRLFVLGYALAAIYVGPVANLRHNLNNVIASLGCTVELQINNTRAAWRISTAPLRAMFKDLLSSKELLRAETRNISATFEDLDAQVNSETGYTPEDTMDSGETAQGREARQAPASRLHLSTQKMYELKTKLRCSYVVNQAILSCRRWFDRKHEQCMKHIWVPLLTHLLCLPMKFKFFCGIAKVMEVWCRNRIPVEGNFGQTYDSLNQSIRGLDGEFSANIDFKEEKQAGVLGLNTSWERVSTEVRDYVYRQEARLEWALGLLHVLLSCTFLLVLHASFSYMDSYNHDIRFDNIYISTYFCQIDDRRKKLGKRTLLPLRKAEEKTVIFPCKPTIQASEMSNVVRELLETLPILLLLVVLCGLDWALYSIFDTIRHHSFLQYSFRSSHKLEVKVGGDSMLARLLRKTIGALNTSSETVMESNNMPCLPQPVGLDARAYWRAAVPIGLLVCLCLLQAFGYRLRRVIAAFYFPKREKKRILFLYNDLLKKRAAFTKLRRAAILRRERQQKAPVFTEPQFLPLKNGKTGEICKACSLEISLEWWSGVGLRCQRA

SEQ ID NO: 15946 - protein, 681 aa, Homo sapiens
MDIKHHQNGTRGQRRKQPHTTVQRLLTWGLPVSCSWFLWRQPGEFPVTALLLGAGAGGLLAIGLGAMGWGTSPHIRCASLLLVPKMLGKEGRLFVLGYALAAIYVGPVANLRHNLNNVIASLGCTVELQINNTRAAWRISTAPLRAMFKDLLSSKELLRAETRNISATFEDLDAQVNSETGYTPEDTMDSGETAQGREARQAPASRLHLSTQKMYELKTKLRCSYVVNQAILSCRRWFDRKHEQCMKHIWVPLLTHLLCLPMKFKFFCGIAKVMEVWCRNRIPVEGNFGQTYDSLNQSIRGLDGEFSANIDFKEEKQAGVLGLNTSWERVSTEVRDYVYRQEARLEWALGLLHVLLSCTFLLVLHASFSYMDSYNHDIRFDNIYISTYFCQIDDRRKKLGKRTLLPLRKAEEKTVIFPCKPTIQASEMSNVVRELLETLPILLLLVVLCGLDWALYSIFDTIRHHSFLQYSFRSSHKLEVKVGGDSMLARLLRKTIGALNTSSETVMESNNMPCLPQPVGLDARAYWRAAVPIGLLVCLCLLQAFGYRLRRVIAAFYFPKREKKRILFLYNDLLKKRAAFTKLRRAAILRRERQQKAPRHPLADILHRGCPLLRRWLCRRCVVCQAPETPESYVCRTLDCEAVYCWSCWDDMRQRCPVCTPREELSSSAFSDSNDDTAYAG

SEQ ID NO: 15947 - protein, 1068 aa, Homo sapiens
MAPRKRSHHGLGFLCCFGGSDIPEINLRDNHPLQFMEFSSPIPNAEELNIRFAELVDELDLTDKNREAMFALPPEKKWQIYCSKKKEQEDPNKLATSWPDYYIDRINSMAAMQSLYAFDEEETEMRNQVVEDLKTALRTQPMRFVTRFIELEGLTCLLNFLRSMDHATCESRIHTSLIGCIKALMNNSQGRAHVLAQPEAISTIAQSLRTENSKTKVAVLEILGAVCLVPGGHKKVLQAMLHYQVYAAERTRFQTLLNELDRSLGRYRDEVNLKTAIMSFINAVLNAGAGEDNLEFRLHLRYEFLMLGIQPVIDKLRQHENAILDKHLDFFEMVRNEDDLELARRFDMVHIDTKSASQMFELIHKKLKYTEAYPCLLSVLHHCLQMPYKRNGGYFQQWQLLDRILQQIVLQDERGVDPDLAPLENFNVKNIVNMLINENEVKQWRDQAEKFRKEHMELVSRLERKERECETKTLEKEEMMRTLNKMKDKLARESQELRQARGQVAELVAQLSELSTGPVSSPPPPGGPLTLSSSMTTNDLPPPPPPLPFACCPPPPPPPLPPGGPPTPPGAPPCLGMGLPLPQDPYPSSDVPLRKKRVPQPSHPLKSFNWVKLNEERVPGTVWNEIDDMQVFRILDLEDFEKMFSAYQRHQKELGSTEDIYLASRKVKELSVIDGRRAQNCIILLSKLKLSNEEIRQAILKMDEQEDLAKDMLEQLLKFIPEKSDIDLLEEHKHEIERMARADRFLYEMSRIDHYQQRLQALFFKKKFQERLAEAKPKVEAILLASRELVRSKRLRQMLEVILAIGNFMNKGQRGGAYGFRVASLNKIADTKSSIDRNISLLHYLIMILEKHFPDILNMPSELQHLPEAAKVNLAELEKEVGNLRRGLRAVEVELEYQRRQVREPSDKFVPVMSDFITVSSFSFSELEDQLNEARDKFAKALMHFGEHDSKMQPDEFFGIFDTFLQAFSEARQDLEAMRRRKEEEERRARMEAMLKEQRERERWQRQRKVLAAGSSLEEGGEFDDLVSALRSGEVFDKDLCKLKRSRKRSGSQALEVTRERAINRLNY

SEQ ID NO: 15948 - protein, 1067 aa, Homo sapiens
MAPRKRSHHGLGFLCCFGGSDIPEINLRDNHPLQFMEFSSPIPNAEELNIRFAELVDELDLTDKNREAMFALPPEKKWQIYCSKKKEQEDPNKLATSWPDYYIDRINSMAAMQSLYAFDEEETEMRNQVVEDLKTALRTQPMRFVTRFIELEGLTCLLNFLRSMDHATCESRIHTSLIGCIKALMNNSQGRAHVLAQPEAISTIAQSLRTENSKTKVAVLEILGAVCLVPGGHKKVLQAMLHYQVYAAERTRFQTLLNELDRSLGRYRDEVNLKTAIMSFINAVLNAGAGEDNLEFRLHLRYEFLMLGIQPVIDKLRQHENAILDKHLDFFEMVRNEDDLELARRFDMVHIDTKSASQMFELIHKKLKYTEAYPCLLSVLHHCLQMPYKRNGGYFQQWQLLDRILQQIVLQDERGVDPDLAPLENFNVKNIVNMLINENEVKQWRDQAEKFRKEHMELVSRLERKERECETKTLEKEEMMRTLNKMKDKLARESQELRQARGQVAELVAQLSELSTGPVSSPPPPGGPLTLSSSMTTNDLPPPPPPLPFACCPPPPPPPLPPGGPPTPPGAPPCLGMGLPLPQDPYPSSDVPLRKKRVPQPSHPLKSFNWVKLNEERVPGTVWNEIDDMQVFRILDLEDFEKMFSAYQRHQKELGSTEDIYLASRKVKELSVIDGRRAQNCIILLSKLKLSNEEIRQAILKMDEQEDLAKDMLEQLLKFIPEKSDIDLLEEHKHEIERMARADRFLYEMSRIDHYQQRLQALFFKKKFQERLAEAKPKVEAILLASRELVRSKRLRQMLEVILAIGNFMNKGQRGGAYGFRVASLNKIADTKSSIDRNISLLHYLIMILEKHFPDILNMPSELQHLPEAAKVNLAELEKEVGNLRRGLRAVEVLEYQRRQVREPSDKFVPVMSDFITVSSFSFSELEDQLNEARDKFAKALMHFGEHDSKMQPDEFFGIFDTFLQAFSEARQDLEAMRRRKEEEERRARMEAMLKEQRERERWQRQRKVLAAGSSLEEGGEFDDLVSALRSGEVFDKDLCKLKRSRKRSGSQALEVTRERAINRLNY

SEQ ID NO: 15949 - protein, 393 aa, Homo sapiens
MKRTRDEVDATLQIAKLNAAELLPAVHCLGFGPGASGAAAGDFCLLELEPTLCQQLEDGHSLVIRGDKDEQAVLCSKDKTYDLKIADTSNMLLFIPGCKTPDQLKKEDSHCNIIHTEIFGFSNNYWELRRRRPKLKKLKKLLMENPYEGPDSQKEKDSNSSKYTTEDLLDQIQASEEEIMTQLQVLNACKIGGYWRILEFDYEMKLLNHVTQLVDSESWSFGKVPLNTCLQELGPLEPEEMIEHCLKCYGKKYVDEGEVYFELDADKICRAAARMLLQNAVKFNLAEFQEVWQQSVPEGMVTSLDQLKGLALVDRHSRPEIIFLLKVDDLPEDNQERFNSLFSLREKWTEEDIAPYIQDLCGEKQTIGALLTKYSHSSMQNGVKVYNSRRPIS

SEQ ID NO: 15950 - protein, 1198 aa, Homo sapiens
MAEHPPLLDTTQILSSDISLLSAPIVSADGTQQVILVQVNPGEAFTIRREDGQFQCITGPAQVPMMSPNGSVPPIYVPPGYAPQVIEDNGVRRVVVVPQAPEFHPGSHTVLHRSPHPPLPGFIPVPTMMPPPPRHMYSPVTGAGDMTTQYMPQYQSSQVYGDVDAHSTHGRSNFRDERSSKTYERLQKKLKDRQGTQKDKMSSPPSSPQKCPSPINEHNGLIKGQIAGGINTGSAKIKSGKGKGGTQVDTEIEEKDEETKAFEALLSNIVKPVASDIQARTVVLTWSPPSSLINGETDESSVPELYGYEVLISSTGKDGKYKSVYVGEETNITLNDLKPAMDYHAKVQAEYNSIKGTPSEAEIFTTLSCEPDIPNPPRIANRTKNSLTLQWKAPSDNGSKIQNFVLEWDEGKGNGEFCQCYMGSQKQFKITKLSPAMGCKFRLSARNDYGTSGFSEEVLYYTSGCAPSMPASPVLTKAGITWLSLQWSKPSGTPSDEGISYILEMEEETSGYGFKPKYDGEDLAYTVKNLRRSTKYKFKVIAYNSEGKSNPSEVVEFTTCPDKPGIPVKPSVKGKIHSHSFKITWDPPKDNGGATINKYVVEMAEGSNGNKWEMIYSGATREHLCDRLNPGCFYRLRVYCISDGGQSAVSESLLVQTPAVPPGPCLPPRLQGRPKAKEIQLRWGPPLVDGGSPISCYSVEMSPIEKDEPREVYQGSEVECTVSSLLPGKTYSFRLRAANKMGFGPFSEKCDITTAPGPPDQCKPPQVTCRSATCAQVNWEVPLSNGTDVTEYRLEWGGVEGSMQICYCGPGLSYEIKGLSPATTYYCRVQALSVVGAGPFSEVVACVTPPSVPGIVTCLQEISDDEIENPHYSPSTCLAISWEKPCDHGSEILAYSIDFGDKQSLTVGKVTSYIINNLQPDTTYRIRIQALNSLGAGPFSHMIKLKTKPLPPDPPRLECVAFSHQNLKLKWGEGTPKTLSTDSIQYHLQMEDKNGRFVSLYRGPCHTYKVQRLNESTSYKFCIQACNEAGEGPLSQEYIFTTPKSVPAALKAPKIEKVNDHICEITWECLQPMKGDPVIYSLQVMLGKDSEFKQIYKGPDSSFRYSSLQLNCEYRFRVCAIRQCQDSLGHQDLVGPYSTTVLFISQRTEPPASTNRDTVESTRTRRALSDEQCAAVILVLFAFFSILIAFIIQYFVIK

SEQ ID NO: 15951 - protein, 1142 aa, Homo sapiens
MSGPAQVPMMSPNGSVPPIYVPPGYAPQVIEDNGVRRVVVVPQAPEFHPGSHTVLHRSPHPPLPGFIPVPTMMPPPPRHMYSPVTGAGDMTTQYMPQYQSSQVYGDVDAHSTHGRSNFRDERSSKTYERLQKKLKDRQGTQKDKMSSPPSSPQKCPSPINEHNGLIKGQIAGGINTGSAKIKSGKGKGGTQVDTEIEEKDEETKAFEALLSNIVKPVASDIQARTVVLTWSPPSSLINGETDESSVPELYGYEVLISSTGKDGKYKSVYVGEETNITLNDLKPAMDYHAKVQAEYNSIKGTPSEAEIFTTLSCEPDIPNPPRIANRTKNSLTLQWKAPSDNGSKIQNFVLEWDEGKGNGEFCQCYMGSQKQFKITKLSPAMGCKFRLSARNDYGTSGFSEEVLYYTSGCAPSMPASPVLTKAGITWLSLQWSKPSGTPSDEGISYILEMEEETSGYGFKPKYDGEDLAYTVKNLRRSTKYKFKVIAYNSEGKSNPSEVVEFTTCPDKPGIPVKPSVKGKIHSHSFKITWDPPKDNGGATINKYVVEMAEGSNGNKWEMIYSGATREHLCDRLNPGCFYRLRVYCISDGGQSAVSESLLVQTPAVPPGPCLPPRLQGRPKAKEIQLRWGPPLVDGGSPISCYSVEMSPIEKDEPREVYQGSEVECTVSSLLPGKTYSFRLRAANKMGFGPFSEKCDITTAPGPPDQCKPPQVTCRSATCAQVNWEVPLSNGTDVTEYRLEWGGVEGSMQICYCGPGLSYEIKGLSPATTYYCRVQALSVVGAGPFSEVVACVTPPSVPGIVTCLQEISDDEIENPHYSPSTCLAISWEKPCDHGSEILAYSIDFGDKQSLTVGKVTSYIINNLQPDTTYRIRIQALNSLGAGPFSHMIKLKTKPLPPDPPRLECVAFSHQNLKLKWGEGTPKTLSTDSIQYHLQMEDKNGRFVSLYRGPCHTYKVQRLNESTSYKFCIQACNEAGEGPLSQEYIFTTPKSVPAALKAPKIEKVNDHICEITWECLQPMKGDPVIYSLQVMLGKDSEFKQIYKGPDSSFRYSSLQLNCEYRFRVCAIRQCQDSLGHQDLVGPYSTTVLFISQRTEPPASTNRDTVESTRTRRALSDEQCAAVILVLFAFFSILIAFIIQYFVIK

SEQ ID NO: 15952 - protein, 79 aa, Homo sapiens; identical to SEQ ID NO: 13920

SEQ ID NO: 15953 - protein, 773 aa, Homo sapiens
MPKVMKDVVHPLGGEEPSMARAVVRSVGGFTLGLSLATAYGLLELLVEGHSPWGCLVGTLTLAAFLSLGMGFSRQVRATVLLLLPQAFSRQGRTLLLVAAFGLVLQGPCANTLRNFTRASEAVACGAELALNQTAEVLQRAKQPLVSALNKIKAIARKTKEVADRVRKFFRSIMDGVKHIARALRNVWQWLLHIGDVCNSELGNPYLKCARVFDDAKDSCMMVIPQAYHLCYVLMPFKLALCGLASLVQVFCVIPKYIQPFLRQTIGTPVIQLLNRVRQEFEFNMTATHHFSVDLNASRSLSQVAMDLHEAVSMKLHRVREALALMGFTTPLLLVLLYLQALFYRYCYLNWDHYDNIYITSRFLRMEAVRSTAGLPTVLPLSAHEARRYIPPGSIFLSQWEKFFYILETFNLIRHLLLVLFLVFLDYAVFWVLDLARHQLQGEIVARSPVLVSLTVEGTGYAGNIYRDLVSAFDVLQQGNISILSRRCLLRPSEPDSTGYIVIGVMYGLCFFITLFGSYVSRLRRVICASYYPSREQERISYLYNVLLSRRTNLLAALHRSVRRRAADQGHRSAFLVLASRCPCLGPFVSHFWLHQAYCLGCGQPQDEGDMENTVSCSTPGCQGLYCLTCFRLLDNTCSVCASPLSYQGDLDLELDSSDEEGPQLWLAAAQRKDPEQAWLLQQQLQEVLGRSLSMESTSESSDLDEEKGPQQRKHGQQPLPEAHQPVSILTSPEPHRPPETSSATKGAPTPASEPSVPLSPPSLPDPSHPPPK

SEQ ID NO: 15954 - protein, 639 aa, Homo sapiens
MPKVMKDVVHPLGGEEPSMARAVVRSVGGFTLGLSLATAYGLLELLVEGHSPWGCLVGTLTLAAFLSLGMGFSRQVRATVLLLLPQAFSRQGRTLLLVAAFGLVLQGPCANTLRNFTRASEAVACGAELALNQTAEVLQRAKQPLVSALNKIKAIARKTKEVADRVRKFFRSIMDGVKHIARALRNVWQWLLHIGDVCNSELGNPYLKCARVFDDAKDSCMMVIPQAYHLCYVLMPFKLALCGLASLVQVFCVIPKYIQPFLRQTIGTPVIQLLNRVRQEFEFNMTATHHFSVDLNASRSLSQVAMDLHEAVSMKLHRVREALALMGFTTPLLLVLLYLQALFYRYCYLNWDHYDNIYITSRFLRMEAVRSTAGLPTVLPLSAHEARRYIPPGSIFLSQWEKFFYILETFNLIRHLLLVLFLVFLDYAVFWVLDLARHQLQGEIVARSPVLVSLTVEGTGYAGNIYRDLVSAFDVLQQGNISILSRRCLLRPSEPDSTGYIVIGVMYGLCFFITLFGSYVSRLRRVICASYYPSREQERISYLYNVLLSRRTNLLAALHRSVRRRAADQGHRSAFLVLASRCPCLGPFVSHFWLHQAYCLGCGQPQDEGDMENTVSCSTPGCQGFICKWHCSSSLVCTP

SEQ ID NO: 15955 - protein, 598 aa, Homo sapiens
MDDYSLDEFRRRWQEELAQAQAPKKRRRPEAAERRARRPEVGSGRGEQASGDPALAQRLLEGAGRPPAARATRAEGQDVASRSRSPLAREGAGGGEQLVDQLIRDLNEMNDVPFFDIQLPYELAINIFQYLDRKELGRCAQVSKTWKVIAEDEVLWYRLCQQEGHLPDSSISDYSCWKLIFQECRAKEHMLRTNWKNRKGAVSELEHVPDTVLCDVHSHDGVVIAGYTSGDVRVWDTRTWDYVAPFLESEDEEDEPGMQPNVSFVRINSSLAVAAYEDGFLNIWDLRTGKYPVHRFEHDARIQALALSQDDATVATASAFDVVMLSPNEEGYWQIAAEFEVPKLVQYLEIVPETRRYPVAVAAAGDLMYLLKAEDSARTLLYAHGPPVTCLDVSANQVAFGVQGLGWVYEGSKILVYSLEAGRRLLKLGNVLRDFTCVNLSDSPPNLMVSGNMDGRVRIHDLRSGNIALSLSAHQLRVSAVQMDDWKIVSGGEEGLVSVWDYRMNQKLWEVYSGHPVQHISFSSHSLITANVPYQTVMRNADLDSFTTHRRHRGLIRAYEFAVDQLAFQSPLPVCRSSCDAMATHYYDLALAFPYNHV

SEQ ID NO: 15956 - protein, 532 aa, Homo sapiens
MDDYSLDEFRRRWQEELAQAQAPKKRRRPEAAERRARRPENEMNDVPFFDIQLPYELAINIFQYLDRKELGRCAQVSKTWKVIAEDEVLWYRLCQQEGHLPDSSISDYSCWKLIFQECRAKEHMLRTNWKNRKGAVSELEHVPDTVLCDVHSHDGVVIAGYTSGDVRVWDTRTWDYVAPFLESEDEEDEPGMQPNVSFVRINSSLAVAAYEDGFLNIWDLRTGKYPVHRFEHDARIQALALSQDDATVATASAFDVVMLSPNEEGYWQIAAEFEVPKLVQYLEIVPETRRYPVAVAAAGDLMYLLKAEDSARTLLYAHGPPVTCLDVSANQVAFGVQGLGWVYEGSKILVYSLEAGRRLLKLGNVLRDFTCVNLSDSPPNLMVSGNMDGRVRIHDLRSGNIALSLSAHQLRVSAVQMDDWKIVSGGEEGLVSVWDYRMNQKLWEVYSGHPVQHISFSSHSLITANVPYQTVMRNADLDSFTTHRRHRGLIRAYEFAVDQLAFQSPLPVCRSSCDAMATHYYDLALAFPYNHV

SEQ ID NO: 15957 - protein, 546 aa, Homo sapiens
MGSRNSSSAGSGSGDPSEGLPRRGAGLRRSEEEEEEDEDVDLAQVLAYLLRRGQVRLVQGGGAANLQFIQALLDSEEENDRAWDGRLGDRYNPPVDATPDTRELEFNEIKTQVELATGQLGLRRAAQKHSFPRMLHQRERGLCHRGSFSLGEQSRVISHFLPNDLGFTDSYSQKAFCGIYSKDGQIFMSACQDQTIRLYDCRYGRFRKFKSIKARDVGWSVLDVAFTPDGNHFLYSSWSDYIHICNIYGEGDTHTALDLRPDERRFAVFSIAVSSDGREVLGGANDGCLYVFDREQNRRTLQIESHEDDVNAVAFADISSQILFSGGDDAICKVWDRRTMREDDPKPVGALAGHQDGITFIDSKGDARYLISNSKDQTIKLWDIRRFSSREGMEASRQAATQQNWDYRWQQVPKKAWRKLKLPGDSSLMTYRGHGVLHTLIRCRFSPIHSTGQQFIYSGCSTGKVVVYDLLSGHIVKKLTNHKACVRDVSWHPFEEKIVSSSWDGNLRLWQYRQAEYFQDDMPESEECASAPAPVPQSSTPFSSPQ

SEQ ID NO: 15958 - protein, 520 aa, Homo sapiens
MGSRNSSSAGSGSGDPSEGLPRRGAGLRRSEEEEEEDEDVDLAQALLDSEEENDRAWDGRLGDRYNPPVDATPDTRELEFNEIKTQVELATGQLGLRRAAQKHSFPRMLHQRERGLCHRGSFSLGEQSRVISHFLPNDLGFTDSYSQKAFCGIYSKDGQIFMSACQDQTIRLYDCRYGRFRKFKSIKARDVGWSVLDVAFTPDGNHFLYSSWSDYIHICNIYGEGDTHTALDLRPDERRFAVFSIAVSSDGREVLGGANDGCLYVFDREQNRRTLQIESHEDDVNAVAFADISSQILFSGGDDAICKVWDRRTMREDDPKPVGALAGHQDGITFIDSKGDARYLISNSKDQTIKLWDIRRFSSREGMEASRQAATQQNWDYRWQQVPKKAWRKLKLPGDSSLMTYRGHGVLHTLIRCRFSPIHSTGQQFIYSGCSTGKVVVYDLLSGHIVKKLTNHKACVRDVSWHPFEEKIVSSSWDGNLRLWQYRQAEYFQDDMPESEECASAPAPVPQSSTPFSSPQ

SEQ ID NO: 15959 - protein, 446 aa, Homo sapiens
MTELGMVVLGIDTTHLWMLPLTPGSWNSMRSRHKWNWPQGSWGLGGPPRSTAFLECCTSFLPNDLGFTDSYSQKAFCGIYSKDGQIFMSACQDQTIRLYDCRYGRFRKFKSIKARDVGWSVLDVAFTPDGNHFLYSSWSDYIHICNIYGEGDTHTALDLRPDERRFAVFSIAVSSDGREVLGGANDGCLYVFDREQNRRTLQIESHEDDVNAVAFADISSQILFSGGDDAICKVWDRRTMREDDPKPVGALAGHQDGITFIDSKGDARYLISNSKDQTIKLWDIRRFSSREGMEASRQAATQQNWDYRWQQVPKKAWRKLKLPGDSSLMTYRGHGVLHTLIRCRFSPIHSTGQQFIYSGCSTGKVVVYDLLSGHIVKKLTNHKACVRDVSWHPFEEKIVSSSWDGNLRLWQYRQAEYFQDDMPESEECASAPAPVPQSSTPFSSPQ

SEQ ID NO: 15960 - protein, 300 aa, Homo sapiens
MKFLLDILLLLPLLIVCSLESFVKLFIPKRRKSVTGEIVLITGAGHGIGRLTAYEFAKLKSKLVLWDINKHGLEETAAKCKGLGAKVHTFVVDCSNREDIYSSAKKVKAEIGDVSILVNNAGVVYTSDLFATQDPQIEKTFEVNVLAHFWTTKAFLPAMTKNNHGHIVTVASAAGHVSVPFLLAYCSSKFAAVGFHKTLTDELAALQITGVKTTCLCPNFVNTGFIKNPSTSLGPTLEPEEVVNRLMHGILTEQKMIFIPSSIAFLTTLERILPERFLAVLKQKISVKFDAVIGYKMKAQ

SEQ ID NO: 15961 - protein, 1556 aa, Homo sapiens
MADRSLEGMALPLEVRARLAELELELSEGDITQKGYEKKRSKLIGAYLPQPPRVDQALPQERRAPVTPSSASRYHRRRSSGSRDERYRSDVHTEAVQAALAKHKERKMAVPMPSKRRSLVVQTSMDAYTPPDTSSGSEDEGSVQGDSQGTPTSSQGSINMEHWISQAIHGSTTSTTSSSSTQSGGSGAAHRLADVMAQTHIENHSAPPDVTTYTSEHSIQVERPQGSTGSRTAPKYGNAELMETGDGVPVSSRVSAKIQQLVNTLKRPKRPPLREFFVDDFEELLEVQQPDPNQPKPEGAQMLAMRGEQLGVVTNWPPSLEAALQRWGTISPKAPCLTTMDTNGKPLYILTYGKLWTRSMKVAYSILHKLGTKQEPMVRPGDRVALVFPNNDPAAFMAAFYGCLLAEVVPVPIEVPLTRKDAGSQQIGFLLGSCGVTVALTSDACHKGLPKSPTGEIPQFKGWPKLLWFVTESKHLSKPPRDWFPHIKDANNDTAYIEYKTCKDGSVLGVTVTRTALLTHCQALTQACGYTEAETIVNVLDFKKDVGLWHGILTSVMNMMHVISIPYSLMKVNPLSWIQKVCQYKAKVACVKSRDMHWALVAHRDQRDINLSSLRMLIVADGANPWSISSCDAFLNVFQSKGLRQEVICPCASSPEALTVAIRRPTDDSNQPPGRGVLSMHGLTYGVIRVDSEEKLSVLTVQDVGLVMPGAIMCSVKPDGVPQLCRTDEIGELCVCAVATGTSYYGLSGMTKNTFEVFPMTSSGAPISEYPFIRTGLLGFVGPGGLVFVVGKMDGLMVVSGRRHNADDIVATALAVEPMKFVYRGRIAVFSVTVLHDERIVIVAEQRPDSTEEDSFQWMSRVLQAIDSIHQVGVYCLALVPANTLPKTPLGGIHLSETKQLFLEGSLHPCNVLMCPHTCVTNLPKPRQKQPEIGPASVMVGNLVSGKRIAQASGRDLGQIEDNDQARKFLFLSEVLQWRAQTTPDHILYTLLNCRGAIANSLTCVQLHKRAEKIAVMLMERGHLQDGDHVALVYPPGIDLIAAFYGCLYAGCVPITVRPPHPQNIATTLPTVKMIVEVSRSACLMTTQLICKLLRSREAAAAVDVRTWPLILDTDDLPKKRPAQICKPCNPDTLAYLDFSVSTTGMLAGVKMSHAATSAFCRSIKLQCELYPSREVAICLDPYCGLGFVLWCLCSVYSGHQSILIPPSELETNPALWLLAVSQYKVRDTFCSYSVMELCTKGLGSQTESLKARGLDLSRVRTCVVVAEERPRIALTQSFSKLFKDLGLHPRAVSTSFGCRVNLAICLQGTSGPDPTTVYVDMRALRHDRVRLVERGSPHSLPLMESGKILPGVRIIIANPETKGPLGDSHLGEIWVHSAHNASGYFTIYGDESLQSDHFNSRLSFGDTQTIWARTGYLGFLRRTELTDANGERHDALYVVGALDEAMELRGMRYHPIDIETSVIRAHKSVTECAVFTWTNLLVVVVELDGSEQEALDLVPLVTNVVLEEHYLIVGVVVVVDIGVIPINSRGEKQRMHLRDGFLADQLDPIYVAYNM

SEQ ID NO: 15962 - protein, 371 aa, Homo sapiens
MHGLTYGVIRVDSEEKLSVLTVQDVGLVMPGAIMCSVKPDGVPQLCRTDEIGELCVCAVATGTSYYGLSGMTKNTFEVFPMTSSGAPISEYPFIRTGLLGFVGPGGLVFVVGKMDGLMVVSGRRHNADDIVATALAVEPMKFVYRGRIAVFSVTVLHDERIVIVAEQRPDSTEEDSFQWMSRVLQAIDSIHQVGVYCLALVPANTLPKTPLGGIHLSETKQLFLEGSLHPCNVLMCPHTCVTNLPKPRQKQPEIGPASVMVGNLVSGKRIAQASGRDLGQIEDNDQARKFLFLSEVLQWRAQTTPDHILYTLLNCRVRRGAGLPWLLASRGLAWFLGALLLLSLNPFASVLWEFFLCFAILTETFVPRDCF

SEQ ID NO: 15963 - protein, 486 aa, Homo sapiens
MGPLSPARTLRLWGPRSLGVALGVFMTIGFALQLLGGPFQRRLPGLQLRQPSAPSLRPALPSCPPRQRLVFLKTHKSGSSSVLSLLHRYGDQHGLRFALPARYQFGYPKLFQASRVKGYRPQGGGTQLPFHILCHHMRFNLKEVLQVMPSDSFFFSIVRDPAALARSAFSYYKSTSSAFRKSPSLAAFLANPRGFYRPGARGDHYARNLLWFDFGLPFPPEKRAKRGNIHPPRDPNPPQLQVLPSGAGPRAQTLNPNALIHPVSTVTDHRSQISSPASFDLGSSSFIQWGLAWLDSVFDLVMVAEYFDESLVLLADALCWGLDDVVGFMHNAQAGHKQGLSTVSNSGLTAEDRQLTARARAWNNLDWALYVHFNRSLWARIEKYGQGRLQTAVAELRARREALAKHCLVGGEASDPKYITDRRFRPFQFGSAKVLGYILRSGLSPQDQEECERLATPELQYKDKLDAKQFPPTVSLPLKTSRPLSP

SEQ ID NO: 15964 - protein, 424 aa, Homo sapiens
MTPRSPTSAFRSCTAVSSCLCPSSWPWLHLSVTSPFPVPHGPSLSCQDAAALGTSEPGGGSGSLHDHWLCTPALGRALPEEVLQVMPSDSFFFSIVRDPAALARSAFSYYKSTSSAFRKSPSLAAFLANPRGFYRPGARGDHYARNLLWFDFGLPFPPEKRAKRGNIHPPRDPNPPQLQVLPSGAGPRAQTLNPNALIHPVSTVTDHRSQISSPASFDLGSSSFIQWGLAWLDSVFDLVMVAEYFDESLVLLADALCWGLDDVVGFMHNAQAGHKQGLSTVSNSGLTAEDRQLTARARAWNNLDWALYVHFNRSLWARIEKYGQGRLQTAVAELRARREALAKHCLVGGEASDPKYITDRRFRPFQFGSAKVLGYILRSGLSPQDQEECERLATPELQYKDKLDAKQFPPTVSLPLKTSRPLSP

SEQ ID NO: 15965 - protein, 1576 aa, Homo sapiens
MAERGLEPSPAAVAALPPEVRAQLAELELELSEGDITQKGYEKKRSKLLSPYSPQTQETDSAVQKELRNQTPAPSAAQTSAPSKYHRTRSGGARDERYRSDIHTEAVQAALAKHKEQKMALPMPTKRRSTFVQSPADACTPPDTSSASEDEGSLRRQAALSAALQQSLQNAESWINRSIQGSSTSSSASSTLSHGEVKGTSGSLADVFANTRIENFSAPPDVTTTTSSSSSSSSIRPANIDLPPSGIVKGMHKGSNRSSLMDTADGVPVSSRVSTKIQQLLNTLKRPKRPPLKEFFVDDSEEIVEVPQPDPNQPKPEGRQMTPVKGEPLGVICNWPPALESALQRWGTTQAKCSCLTALDMTGKPVYTLTYGKLWSRSLKLAYTLLNKLGTKNEPVLKPGDRVALVYPNNDPVMFMVAFYGCLLAEVIPVPIEVPLTRKDAGGQQIGFLLGSCGIALALTSEVCLKGLPKTQNGEIVQFKGWPRLKWVVTDSKYLSKPPKDWQPHISPAGTEPAYIEYKTSKEGSVMGVTVSRLAMLSHCQALSQACNYSEGETIVNVLDFKKDAGLWHGMFANVMNKMHTISVPYSVMKTCPLSWVQRVHAHKAKVALVKCRDLHWAMMAHRDQRDVSLSSLRMLIVTDGANPWSVSSCDAFLSLFQSHGLKPEAICPCATSAEAMTVAIRRPGVPGAPLPGRAILSMNGLSYGVIRVNTEDKNSALTVQDVGHVMPGGMMCIVKPDGPPQLCKTDEIGEICVSSRTGGMMYFGLAGVTKNTFEVIPVNSAGSPVGDVPFIRSGLLGFVGPGSLVFVVGKMDGLLMVSGRRHNADDIVATGLAVESIKTVYRGRIAVFSVSVFYDERIVVVAEQRPDASEEDSFQWMSRVLQAIDSIHQVGVYCLALVPANTLPKTPLGGIHISQTKQLFLEGSLHPCNILMCPHTCVTNLPKPRQKQPGVGPASVMVGNLVAGKRIAQAAGRDLGQIEENDLVRKHQFLAEILQWRAQATPDHVLFMLLNAKGTTVCTASCLQLHKRAERIASVLGDKGHLNAGDNVVLLYPPGIELIAAFYGCLYAGCIPVTVRPPHAQNLTATLPTVRMIVDVSKAACILTSQTLMRLLRSREAAAAVDVKTWPTIIDTDDLPRKRLPQLYKPPTPEMLAYLDFSVSTTGMLTGVKMSHSAVNALCRAIKLQCELYSSRQIAICLDPYCGLGFALWCLCSVYSGHQSVLIPPMELENNLFLWLSTVNQYKIRDTFCSYSVMELCTKGLGNQVEVLKTRGINLSCVRTCVVVAEERPRVALQQSFSKLFKDIGLSPRAVSTTFGSRVNVAICLQGTSGPDPTTVYVDLKSLRHDRVRLVERGAPQSLLLSESGKILPGVKVVIVNPETKGPVGDSHLGEIWVNSPHTASGYYTIYDSETLQADHFNTRLSFGDAAQTLWARTGYLGFVRRTELTAATGERHDALYVVGALDETLELRGLRYHPIDIETSVSRIHRSIAECAVFTWTNLLVVVVELCGSEQEALDLVPLVTNVVLEEHYLIVGVVVVVDPGVIPINSRGEKQRMHLRDSFLADQLDPIYVAYNM

SEQ ID NO: 15966 - protein, 504 aa, Homo sapiens
MVAPGSVTSRLGSVFPFLLVLVDLQYEGAECGVNADVEKHLELGKKLLAAGQLADALSQFHAAVDGDPDNYIAYYRRATVFLAMGKSKAALPDLTKVIQLKMDFTAARLQRGHLLLKQGKLDEAEDDFKKVLKSNPSENEEKEAQSQLIKSDEMQRLRSQALNAFGSGDYTAAIAFLDKILEVCVWDAELRELRAECFIKEGEPRKAISDLKAASKLKNDNTEAFYKISTLYYQLGDHELSLSEVRECLKLDQDHKRCFAHYKQVKKLNKLIESAEELIRDGRYTDATSKYESVMKTEPSIAEYTVRSKERICHCFSKDEKPVEAIRVCSEVLQMEPDNVNALKDRAEAYLIEEMYDEAIQDYETAQEHNENDQQIREGLEKAQRLLKQSQKRDYYKILGVKRNAKKQEIIKAYRKLALQWHPDNFQNEEEKKKAEKKFIDIAAAKEVLSDPEMRKKFDDGEDPLDAESQQGGGGNPFHRSWNSWQGFNPFSSGGPFRFKFHFN

SEQ ID NO: 15967 - protein, 300 aa, Homo sapiens
MNIILEILLLLITIIYSYLESLVKFFIPQRRKSVAGEIVLITGAGHGIGRQTTYEFAKRQSILVLWDINKRGVEETAAECRKLGVTAHAYVVDCSNREEIYRSLNQVKKEVGDVTIVVNNAGTVYPADLLSTKDEEITKTFEVNILGHFWITKALLPSMMERNHGHIVTVASVCGHEGIPYLIPYCSSKFAAVGFHRGLTSELQALGKTGIKTSCLCPVFVNTGFTKNPSTRLWPVLETDEVVRSLIDGILTNKKMIFVPSYINIFLRLQKFLPERASAILNRMQNIQFEAVVGHKIKMK

SEQ ID NO: 15968 - protein, 264 aa, Homo sapiens
MNIILEILLLLITIIYSYLESLVKFFIPQRRKSVAGEIVLITGAGHGIGRQTTYEFAKRQSILVLWDINKVKKEVGDVTIVVNNAGTVYPADLLSTKDEEITKTFEVNILGHFWITKALLPSMMERNHGHIVTVASVCGHEGIPYLIPYCSSKFAAVGFHRGLTSELQALGKTGIKTSCLCPVFVNTGFTKNPSTRLWPVLETDEVVRSLIDGILTNKKMIFVPSYINIFLRLQKFLPERASAILNRMQNIQFEAVVGHKIKMK

SEQ ID NO: 15969 - protein, 475 aa, Homo sapiens
MAAKSQPNIPKAKSLDGVTNDRTASQGQWGRAWEVDWFSLASVIFLLLFAPFIVYYFIMACDQYSCALTGPVVDIVTGHARLSDIWAKTPPITRKAAQLYTLWVTFQVLLYTSLPDFCHKFLPGYVGGIQEGAVTPAGVVNKYQINGLQAWLLTHLLWFANAHLLSWFSPTIIFDNWIPLLWCANILGYAVSTFAMVKGYFFPTSARDCKFTGNFFYNYMMGIEFNPRIGKWFDFKLFFNGRPGIVAWTLINLSFAAKQRELHSHVTNAMVLVNVLQAIYVIDFFWNETWYLKTIDICHDHFGWYLGWGDCVWLPYLYTLQGLYLVYHPVQLSTPHAVGVLLLGLVGYYIFRVANHQKDLFRRTDGRCLIWGRKPKVIECSYTSADGQRHHSKLLVSGFWGVARHFNYVGDLMGSLAYCLACGGGHLLPYFYIIYMAILLTHRCLRDEHRCASKYGRDWERYTAAVPYRLLPGIF

SEQ ID NO: 15970 - protein, 110 aa, Homo sapiens
MSWRGRSTYYWPRPRRYVQPPEMIGPMRPEQFSDEVEPATPEEGEPATQRQDPAAAQEGEDEGASAGQGPKPEAHSQEQGHPQTGCECEDGPDGQEMDPPNPEEVKTPEE

SEQ ID NO: 15971 - protein, 732 aa, Homo sapiens
MERQVLLSEPEEAAALYRGLSRQPALSAACLGPEVTTQYGGQYRTVHTEWTQRDLERMENIRFCRQYLVFHDGDSVVFAGPAGNSVETRGELLSRESPSGTMKAVLRKAGGTGPGEEKQFLEVWEKNRKLKSFNLSALEKHGPVYEDDCFGCLSWSHSETHLLYVAEKKRPKAESFFQTKALDVSASDDEIARLKKPDQAIKGDQFVFYEDWGENMVSKSIPVLCVLDVESGNISVLEGVPENVSPGQAFWAPGDAGVVFVGWWHEPFRLGIRFCTNRRSALYYVDLIGGKCELLSDDSLAVSSPRLSPDQCRIVYLQYPSLIPHHQCSQLCLYDWYTKVTSVVVDVVPRQLGENFSGIYCSLLPLGCWSADSQRVVFDSAQRSRQDLFAVDTQVGTVTSLTAGGSGGSWKLLTIDQDLMVAQFSTPSLPPTLKVGFLPSAGKEQSVLWVSLEEAEPIPDIHWGIRVLQPPPEQENVQYAGLDFEAILLQPGSPPDKTQVPMVVMPHGGPHSSFVTAWMLFPAMLCKMGFAVLLVNYRGSTGFGQDSILSLPGNVGHQDVKDVQFAVEQVLQEEHFDASHVALMGGSHGGFISCHLIGQYPETYRACVARNPVINIASMLGSTDIPDWCVVEAGFPFSSDCLPDLSVWAEMLDKSPIRYIPQVKTPLLLMLGQEDRRVPFKQGMEYYRALKTRNVPVRLLLYPKSTHALSEVEVESDSFMNAVLWLRTHLGS

SEQ ID NO: 15972 - protein, 199 aa, Homo sapiens
MEASPASGPRHLMDPHIFTSNFNNGIGRHKTYLCYEVERLDNGTSVKMDQHRGFLHNQAKNLLCGFYGRHAELRFLDLVPSLQLDPAQIYRVTWFISWSPCFSWGCAGEVRAFLQENTHVRLRIFAARIYDYDPLYKEALQMLRDAGAQVSIMTYDEFKHCWDTFVDHQGCPFQPWDGLDEHSQALSGRLRAILQNQGN

SEQ ID NO: 15973 - protein, 187 aa, Homo sapiens
MDPHIFTSNFNNGIGRHKTYLCYEVERLDNGTSVKMDQHRGFLHNQAKNLLCGFYGRHAELRFLDLVPSLQLDPAQIYRVTWFISWSPCFSWGCAGEVRAFLQENTHVRLRIFAARIYDYDPLYKEALQMLRDAGAQVSIMTYDEFKHCWDTFVDHQGCPFQPWDGLDEHSQALSGRLRAILQNQGN

SEQ ID NO: 15974 - protein, 68 aa, Homo sapiens
MPKHEFSVDMTCGGCAEAVSRVLNKLGGVKYDIDLPNKKVCIESEHSMDTLLATLKKTGKTVSYLGLE

SEQ ID NO: 15975 - protein, 2435 aa, Homo sapiens
MGFLHQLQLLLWKNVTLKRRSPWVLAFEIFIPLVLFFILLGLRQKKPTISVKEAFYTAAPLTSAGILPVMQSLCPDGQRDEFGFLQYANSTVTQLLERLDRVVEEGNLFDPARPSLGSELEALRQHLEALSAGPGTSGSHLDRSTVSSFSLDSVARNPQELWRFLTQNLSLPNSTAQALLAARVDPPEVYHLLFGPSSALDSQSGLHKGQEPWSRLGGNPLFRMEELLLAPALLEQLTCTPGSGELGRILTVPESQKGALQGYRDAVCSGQAAARARRFSGLSAELRNQLDVAKVSQQLGLDAPNGSDSSPQAPPPRRLQALLGDLLDAQKVLQDVDVLSALALLLPQGACTGRTPGPPASGAGGAANGTGAGAVMGPNATAEEGAPSAAALATPDTLQGQCSAFVQLWAGLQPILCGNNRTIEPEALRRGNMSSLGFTSKEQRNLGLLVHLMTSNPKILYAPAGSEVDRVILKANETFAFVGNVTHYAQVWLNISAEIRSFLEQGRLQQHLRWLQQYVAELRLHPEALNLSLDELPPALRQDNFSLPSGMALLQQLDTIDNAACGWIQFMSKVSVDIFKGFPDEESIVNYTLNQAYQDNVTVFASVIFQTRKDGSLPPHVHYKIRQNSSFTEKTNEIRRAYWRPGPNTGGRFYFLYGFVWIQDMMERAIIDTFVGHDVVEPGSYVQMFPYPCYTRDDFLFVIEHMMPLCMVISWVYSVAMTIQHIVAEKEHRLKEVMKTMGLNNAVHWVAWFITGFVQLSISVTALTAILKYGQVLMHSHVVIIWLFLAVYAVATIMFCFLVSVLYSKAKLASACGGIIYFLSYVPYMYVAIREEVAHDKITAFEKCIASLMSTTAFGLGSKYFALYEVAGVGIQWHTFSQSPVEGDDFNLLLAVTMLMVDAVVYGILTWYIEAVHPGMYGLPRPWYFPLQKSYWLGSGRTEAWEWSWPWARTPRLSVMEEDQACAMESRRFEETRGMEEEPTHLPLVVCVDKLTKVYKDDKKLALNKLSLNLYENQVVSFLGHNGAGKTTTMSILTGLFPPTSGSATIYGHDIRTEMDEIRKNLGMCPQHNVLFDRLTVEEHLWFYSRLKSMAQEEIRREMDKMIEDLELSNKRHSLVQTLSGGMKRKLSVAIAFVGGSRAIILDEPTAGVDPYARRAIWDLILKYKPGRTILLSTHHMDEADLLGDRIAIISHGKLKCCGSPLFLKGTYGDGYRLTLVKRPAEPGGPQEPGLASSPPGRAPLSSCSELQVSQFIRKHVASCLLVSDTSTELSYILPSEAAKKGAFERLFQHLERSLDALHLSSFGLMDTTLEEVFLKVSEEDQSLENSEADVKESRKDVLPGAEGPASGEGHAGNLARCSELTQSQASLQSASSVGSARGDEGAGYTDVYGDYRPLFDNPQDPDNVSLQEVEAEALSRVGQGSRKLDGGWLKVRQFHGLLVKRFHCARRNSKALFSQILLPAFFVCVAMTVALSVPEIGDLPPLVLSPSQYHNYTQPRGNFIPYANEERREYRLRLSPDASPQQLVSTFRLPSGVGATCVLKSPANGSLGPTLNLSSGESRLLAARFFDSMCLESFTQGLPLSNFVPPPPSPAPSDSPASPDEDLQAWNVSLPPTAGPEMWTSAPSLPRLVREPVRCTCSAQGTGFSCPSSVGGHPPQMRVVTGDILTDITGHNVSEYLLFTSDRFRLHRYGAITFGNVLKSIPASFGTRAPPMVRKIAVRRAAQVFYNNKGYHSMPTYLNSLNNAILRANLPKSKGNPAAYGITVTNHPMNKTSASLSLDYLLQGTDVVIAIFIIVAMSFVPASFVVFLVAEKSTKAKHLQFVSGCNPIIYWLANYVWDMLNYLVPATCCVIILFVFDLPAYTSPTNFPAVLSLFLLYGWSITPIMYPASFWFEVPSSAYVFLIVINLFIGITATVATFLLQLFEHDKDLKVVNSYLKSCFLIFPNYNLGHGLMEMAYNEYINEYYAKIGQFDKMKSPFEWDIVTRGLVAMAVEGVVGFLLTIMCQYNFLRRPQRMPVSTKPVEDDVDVASERQRVLRGDADNDMVKIENLTKVYKSRKIGRILAVDRLCLGVRPGECFGLLGVNGAGKTSTFKMLTGDESTTGGEAFVNGHSVLKELLQVQQSLGYCPQCDALFDELTAREHLQLYTRLRGISWKDEARVVKWALEKLELTKYADKPAGTYSGGNKRKLSTAIALIGYPAFIFLDEPTTGMDPKARRFLWNLILDLIKTGRSVVLTSHSMEECEALCTRLAIMVNGRLRCLGSIQHLKNRFGDGYMITVRTKSSQSVKDVVRFFNRNFPEAMLKERHHTKVQYQLKSEHISLAQVFSKMEQVSGVLGIEDYSVSQTTLDNVFVNFAKKQSDNLEQQETEPPSALQSPLGCLLSLLRPRSAPTELRALVADEPEDLDTEDEGLISFEEERAQLSFNTDTLC

SEQ ID NO: 15976 - protein, 2090 aa, Homo sapiens
MGFLHQLQLLLWKNVTLKRRSPWVLAFEIFIPLVLFFILLGLRQKKPTISVKEAFYTAAPLTSAGILPVMQSLCPDGQRDEFGFLQYANSTVTQLLERLDRVVEEGNLFDPARPSLGSELEALRQHLEALSAGPGTSGSHLDRSTVSSFSLDSVARNPQELWRFLTQNLSLPNSTAQALLAARVDPPEVYHLLFGPSSALDSQSGLHKGQEPWSRLGGNPLFRMEELLLAPALLEQLTCTPGSGELGRILTVPESQKGALQGYRDAVCSGQAAARARRFSGLSAELRNQLDVAKVSQQLGLDAPNGSDSSPQAPPPRRLQALLGDLLDAQKVLQDVDVLSALALLLPQGACTGRTPGPPASGAGGAANGTGAGAVMGPNATAEEGAPSAAALATPDTLQGQCSAFVQLWAGLQPILCGNNRTIEPEALRRGNMSSLGFTSKEQRNLGLLVHLMTSNPKILYAPAGSEVDRVILKANETFAFVGNVTHYAQVWLNISAEIRSFLEQGRLQQHLRWLQQYVAELRLHPEALNLSLDELPPALRQDNFSLPSGMALLQQLDTIDNAACGWIQFMSKVSVDIFKGFPDEESIVNYTLNQAYQDNVTVFASVIFQTRKDGSLPPHVHYKIRQNSSFTEKTNEIRRAYWRPGPNTGGRFYFLYGFVWIQDMMERAIIDTFVGHDVVEPGSYVQMFPYPCYTRDDFLFVIEHMMPLCMVISWVYSVAMTIQHIVAEKEHRLKEVMKTMGLNNAVHWVAWFITGFVQLSISVTALTAILKYGQVLMHSHVVIIWLFLAVYAVATIMFCFLVSVLYSKAKLASACGGIIYFLSYVPYMYVAIREEVAHDKITAFEKCIASLMSTTAFGLGSKYFALYEVAGVGIQWHTFSQSPVEGDDFNLLLAVTMLMVDAVVYGILTWYIEAVHPGMYGLPRPWYFPLQKSYWLGSGRTEAWEWSWPWARTPRLSVMEEDQACAMESRRFEETRGMEEEPTHLPLVVCVDKLTKVYKDDKKLALNKLSLNLYENQVVSFLGHNGAGKTTTMSILTGLFPPTSGSATIYGHDIRTEMDEIRKNLGMCPQHNVLFDRLTVEEHLWFYSRLKSMAQEEIRREMDKMIEDLELSNKRHSLVQTLSGGMKRKLSVAIAFVGGSRAIILDEPTAGVDPYARRAIWDLILKYKPGRTILLSTHHMDEADLLGDRIAIISHGKLKCCGSPLFLKGTYGDGYRLTLVKRPAEPGGPQEPGLASSPPGRAPLSSCSELQVSQFIRKHVASCLLVSDTSTELSYILPSEAAKKGAFERLFQHLERSLDALHLSSFGLMDTTLEEVFLKVSEEDQSLENSEADVKESRKDVLPGAEGPASGEGHAGNLARCSELTQSQASLQSASSVGSARGDEGAGYTDVYGDYRPLFDNPQDPDNVSLQEVEAEALSRVGQGSRKLDGGWLKVRQFHGLLVKRFHCARRNSKALFSQILLPAFFVCVAMTVALSVPEIGDLPPLVLSPSQYHNYTQPRGNFIPYANEERREYRLRLSPDASPQQLVSTFRLPSGVGATCVLKSPANGSLGPTLNLSSGESRLLAARFFDSMCLESFTQGLPLSNFVPPPPSPAPSDSPASPDEDLQAWNVSLPPTAGPEMWTSAPSLPRLVREPVRCTCSAQGTGFSCPSSVGGHPPQMRVVTGDILTDITGHNVSEYLLFTSDRFRLHRYGAITFGNVLKSIPASFGTRAPPMVRKIAVRRAAQVFYNNKGYHSMPTYLNSLNNAILRANLPKSKGNPAAYGITVTNHPMNKTSASLSLDYLLQGTDVVIAIFIIVAMSFVPASFVVFLVAEKSTKAKHLQFVSGCNPIIYWLANYVWDMLNYLVPATCCVIILFVFDLPAYTSPTNFPAVLSLFLLYGWSITPIMYPASFWFEVPSSAYVFLIVINLFIGITATVATFLLQLFEHDKDLKVVNSYLKSCFLIFPNYNLGHGLMEMAYNEYINEYYAKIGQFDKMKSPFEWDIVTRGLVAMAVEGVVGFLLTIMCQYNFLRRPQRMPVSTKPVEDDVDVASERQRVLRGDADNDMVKIENLTKVGSGHVGWGLGGVGQGQGGGAPAVEVEPGWAGP

SEQ ID NO: 15977 - protein, 2436 aa, Homo sapiens
MGFLHQLQLLLWKNVTLKRRSPWVLAFEIFIPLVLFFILLGLRQKKPTISVKEVSFYTAAPLTSAGILPVMQSLCPDGQRDEFGFLQYANSTVTQLLERLDRVVEEGNLFDPARPSLGSELEALRQHLEALSAGPGTSGSHLDRSTVSSFSLDSVARNPQELWRFLTQNLSLPNSTAQALLAARVDPPEVYHLLFGPSSALDSQSGLHKGQEPWSRLGGNPLFRMEELLLAPALLEQLTCTPGSGELGRILTVPESQKGALQGYRDAVCSGQAAARARRFSGLSAELRNQLDVAKVSQQLGLDAPNGSDSSPQAPPPRRLQALLGDLLDAQKVLQDVDVLSALALLLPQGACTGRTPGPPASGAGGAANGTGAGAVMGPNATAEEGAPSAAALATPDTLQGQCSAFVQLWAGLQPILCGNNRTIEPEALRRGNMSSLGFTSKEQRNLGLLVHLMTSNPKILYAPAGSEVDRVILKANETFAFVGNVTHYAQVWLNISAEIRSFLEQGRLQQHLRWLQQYVAELRLHPEALNLSLDELPPALRQDNFSLPSGMALLQQLDTIDNAACGWIQFMSKVSVDIFKGFPDEESIVNYTLNQAYQDNVTVFASVIFQTRKDGSLPPHVHYKIRQNSSFTEKTNEIRRAYWRPGPNTGGRFYFLYGFVWIQDMMERAIIDTFVGHDVVEPGSYVQMFPYPCYTRDDFLFVIEHMMPLCMVISWVYSVAMTIQHIVAEKEHRLKEVMKTMGLNNAVHWVAWFITGFVQLSISVTALTAILKYGQVLMHSHVVIIWLFLAVYAVATIMFCFLVSVLYSKAKLASACGGIIYFLSYVPYMYVAIREEVAHDKITAFEKCIASLMSTTAFGLGSKYFALYEVAGVGIQWHTFSQSPVEGDDFNLLLAVTMLMVDAVVYGILTWYIEAVHPGMYGLPRPWYFPLQKSYWLGSGRTEAWEWSWPWARTPRLSVMEEDQACAMESRRFEETRGMEEEPTHLPLVVCVDKLTKVYKDDKKLALNKLSLNLYENQVVSFLGHNGAGKTTTMSILTGLFPPTSGSATIYGHDIRTEMDEIRKNLGMCPQHNVLFDRLTVEEHLWFYSRLKSMAQEEIRREMDKMIEDLELSNKRHSLVQTLSGGMKRKLSVAIAFVGGSRAIILDEPTAGVDPYARRAIWDLILKYKPGRTILLSTHHMDEADLLGDRIAIISHGKLKCCGSPLFLKGTYGDGYRLTLVKRPAEPGGPQEPGLASSPPGRAPLSSCSELQVSQFIRKHVASCLLVSDTSTELSYILPSEAAKKGAFERLFQHLERSLDALHLSSFGLMDTTLEEVFLKVSEEDQSLENSEADVKESRKDVLPGAEGPASGEGHAGNLARCSELTQSQASLQSASSVGSARGDEGAGYTDVYGDYRPLFDNPQDPDNVSLQEVEAEALSRVGQGSRKLDGGWLKVRQFHGLLVKRFHCARRNSKALFSQILLPAFFVCVAMTVALSVPEIGDLPPLVLSPSQYHNYTQPRGNFIPYANEERREYRLRLSPDASPQQLVSTFRLPSGVGATCVLKSPANGSLGPTLNLSSGESRLLAARFFDSMCLESFTQGLPLSNFVPPPPSPAPSDSPASPDEDLQAWNVSLPPTAGPEMWTSAPSLPRLVREPVRCTCSAQGTGFSCPSSVGGHPPQMRVVTGDILTDITGHNVSEYLLFTSDRFRLHRYGAITFGNVLKSIPASFGTRAPPMVRKIAVRRAAQVFYNNKGYHSMPTYLNSLNNAILRANLPKSKGNPAAYGITVTNHPMNKTSASLSLDYLLQGTDVVIAIFIIVAMSFVPASFVVFLVAEKSTKAKHLQFVSGCNPIIYWLANYVWDMLNYLVPATCCVIILFVFDLPAYTSPTNFPAVLSLFLLYGWSITPIMYPASFWFEVPSSAYVFLIVINLFIGITATVATFLLQLFEHDKDLKVVNSYLKSCFLIFPNYNLGHGLMEMAYNEYINEYYAKIGQFDKMKSPFEWDIVTRGLVAMAVEGVVGFLLTIMCQYNFLRRPQRMPVSTKPVEDDVDVASERQRVLRGDADNDMVKIENLTKVYKSRKIGRILAVDRLCLGVRPGECFGLLGVNGAGKTSTFKMLTGDESTTGGEAFVNGHSVLKELLQVQQSLGYCPQCDALFDELTAREHLQLYTRLRGISWKDEARVVKWALEKLELTKYADKPAGTYSGGNKRKLSTAIALIGYPAFIFLDEPTTGMDPKARRFLWNLILDLIKTGRSVVLTSHSMEECEALCTRLAIMVNGRLRCLGSIQHLKNRFGDGYMITVRTKSSQSVKDVVRFFNRNFPEAMLKERHHTKVQYQLKSEHISLAQVFSKMEQVSGVLGIEDYSVSQTTLDNVFVNFAKKQSDNLEQQETEPPSALQSPLGCLLSLLRPRSAPTELRALVADEPEDLDTEDEGLISFEEERAQLSFNTDTLC

SEQ ID NO: 15978 - protein, 2466 aa, Homo sapiens
MGRKTSRVQQGPPRSPACSAHGERSWGLEFPPFRWLLGIAGRTHLAALPPFQWVLAFEIFIPLVLFFILLGLRQKKPTISVKEVSFYTAAPLTSAGILPVMQSLCPDGQRDEFGFLQYANSTVTQLLERLDRVVEEGNLFDPARPSLGSELEALRQHLEALSAGPGTSGSHLDRSTVSSFSLDSVARNPQELWRFLTQNLSLPNSTAQALLAARVDPPEVYHLLFGPSSALDSQSGLHKGQEPWSRLGGNPLFRMEELLLAPALLEQLTCTPGSGELGRILTVPESQKGALQGYRDAVCSGQAAARARRFSGLSAELRNQLDVAKVSQQLGLDAPNGSDSSPQAPPPRRLQALLGDLLDAQKVLQDVDVLSALALLLPQGACTGRTPGPPASGAGGAANGTGAGAVMGPNATAEEGAPSAAALATPDTLQGQCSAFVQLWAGLQPILCGNNRTIEPEALRRGNMSSLGFTSKEQRNLGLLVHLMTSNPKILYAPAGSEVDRVILKANETFAFVGNVTHYAQVWLNISAEIRSFLEQGRLQQHLRWLQQYVAELRLHPEALNLSLDELPPALRQDNFSLPSGMALLQQLDTIDNAACGWIQFMSKVSVDIFKGFPDEESIVNYTLNQAYQDNVTVFASVIFQTRKDGSLPPHVHYKIRQNSSFTEKTNEIRRAYWRPGPNTGGRFYFLYGFVWIQDMMERAIIDTFVGHDVVEPGSYVQMFPYPCYTRDDFLFVIEHMMPLCMVISWVYSVAMTIQHIVAEKEHRLKEVMKTMGLNNAVHWVAWFITGFVQLSISVTALTAILKYGQVLMHSHVVIIWLFLAVYAVATIMFCFLVSVLYSKAKLASACGGIIYFLSYVPYMYVAIREEVAHDKITAFEKCIASLMSTTAFGLGSKYFALYEVAGVGIQWHTFSQSPVEGDDFNLLLAVTMLMVDAVVYGILTWYIEAVHPGMYGLPRPWYFPLQKSYWLGSGRTEAWEWSWPWARTPRLSVMEEDQACAMESRRFEETRGMEEEPTHLPLVVCVDKLTKVYKDDKKLALNKLSLNLYENQVVSFLGHNGAGKTTTMSILTGLFPPTSGSATIYGHDIRTEMDEIRKNLGMCPQHNVLFDRLTVEEHLWFYSRLKSMAQEEIRREMDKMIEDLELSNKRHSLVQTLSGGMKRKLSVAIAFVGGSRAIILDEPTAGVDPYARRAIWDLILKYKPGRTILLSTHHMDEADLLGDRIAIISHGKLKCCGSPLFLKGTYGDGYRLTLVKRPAEPGGPQEPGLASSPPGRAPLSSCSELQVSQFIRKHVASCLLVSDTSTELSYILPSEAAKKGAFERLFQHLERSLDALHLSSFGLMDTTLEEVFLKVSEEDQSLENSEADVKESRKDVLPGAEGPASGEGHAGNLARCSELTQSQASLQSASSVGSARGDEGAGYTDVYGDYRPLFDNPQDPDNVSLQEVEAEALSRVGQGSRKLDGGWLKVRQFHGLLVKRFHCARRNSKALFSQILLPAFFVCVAMTVALSVPEIGDLPPLVLSPSQYHNYTQPRGNFIPYANEERREYRLRLSPDASPQQLVSTFRLPSGVGATCVLKSPANGSLGPTLNLSSGESRLLAARFFDSMCLESFTQGLPLSNFVPPPPSPAPSDSPASPDEDLQAWNVSLPPTAGPEMWTSAPSLPRLVREPVRCTCSAQGTGFSCPSSVGGHPPQMRVVTGDILTDITGHNVSEYLLFTSDRFRLHRYGAITFGNVLKSIPASFGTRAPPMVRKIAVRRAAQVFYNNKGYHSMPTYLNSLNNAILRANLPKSKGNPAAYGITVTNHPMNKTSASLSLDYLLQGTDVVIAIFIIVAMSFVPASFVVFLVAEKSTKAKHLQFVSGCNPIIYWLANYVWDMLNYLVPATCCVIILFVFDLPAYTSPTNFPAVLSLFLLYGWSITPIMYPASFWFEVPSSAYVFLIVINLFIGITATVATFLLQLFEHDKDLKVVNSYLKSCFLIFPNYNLGHGLMEMAYNEYINEYYAKIGQFDKMKSPFEWDIVTRGLVAMAVEGVVGFLLTIMCQYNFLRRPQRMPVSTKPVEDDVDVASERQRVLRGDADNDMVKIENLTKVYKSRKIGRILAVDRLCLGVRPGECFGLLGVNGAGKTSTFKMLTGDESTTGGEAFVNGHSVLKELLQVQQSLGYCPQCDALFDELTAREHLQLYTRLRGISWKDEARVVKWALEKLELTKYADKPAGTYSGGNKRKLSTAIALIGYPAFIFLDEPTTGMDPKARRFLWNLILDLIKTGRSVVLTSHSMEECEALCTRLAIMVNGRLRCLGSIQHLKNRFGDGYMITVRTKSSQSVKDVVRFFNRNFPEAMLKERHHTKVQYQLKSEHISLAQVFSKMEQVSGVLGIEDYSVSQTTLDNVFVNFAKKQSDNLEQQETEPPSALQSPLGCLLSLLRPRSAPTELRALVADEPEDLDTEDEGLISFEEERAQLSFNTDTLC

SEQ ID NO: 15979 - protein, 859 aa, Homo sapiens
MEPLSHRGLPRLSWIDTLYSNFSYGTDEYDGEGNEEQKGPPEGSETMPYIDESPTMSPQLSARSQGGGDGVSPTPPEGLAPGVEAGKGLEMRKLVLSGFLASEEIYINQLEALLLPMKPLKATATTSQPVLTIQQIETIFYKIQDIYEIHKEFYDNLCPKVQQWDSQVTMGHLFQKLASQLGVYKAFVDNYKVALETAEKCSQSNNQFQKISEELKVKGPKDSKDSHTSVTMEALLYKPIDRVTRSTLVLHDLLKHTPVDHPDYPLLQDALRISQNFLSSINEDIDPRRTAVTTPKGETRQLVKDGFLVEVSESSRKLRHVFLFTDVLLCAKLKKTSAGKHQQYDCKWYIPLADLVFPSPEESEASPQVHPFPDHELEDMKMKISALKSEIQKEKANKGQSRAIERLKKKMFENEFLLLLNSPTIPFRIHNRNGKSYLFLLSSDYERSEWREAIQKLQKKDLQAFVLSSVELQVLTGSCFKLRTVHNIPVTSNKDDDESPGLYGFLHVIVHSAKGFKQSANLYCTLEVDSFGYFVSKAKTRVFRDTAEPKWDEEFEIELEGSQSLRILCYEKCYDKTKVNKDNNEIVDKIMGKGQIQLDPQTVETKNWHTDVIEMNGIKVEFSMKFTSRDMSLKRTPSKKQTGVFGVKISVVTKRERSKVPYIVRQCVEEVEKRGIEEVGIYRISGVATDIQALKAVFDANNKDILLMLSDMDINAIAGTLKLYFRELPEPLLTDRLYPAFMEGIALSDPAAKENCMMHLLRSLPDPNLITFLFLLEHLKRVAEKEPINKMSLHNLATVFGPTLLRPSEVESKAHLTSAADIWSHDVMAQVQVLLYYLQHPPISFAELKRNTLYFSTDV

SEQ ID NO: 15980 - protein, 822 aa, Homo sapiens
MEEEEEAIGLLDKVLEDEDVFLLEECELGTPTSPGSGSPFLVAVKVEAGKGLEMRKLVLSGFLASEEIYINQLEALLLPMKPLKATATTSQPVLTIQQIETIFYKIQDIYEIHKEFYDNLCPKVQQWDSQVTMGHLFQKLASQLGVYKAFVDNYKVALETAEKCSQSNNQFQKISEELKVKGPKDSKDSHTSVTMEALLYKPIDRVTRSTLVLHDLLKHTPVDHPDYPLLQDALRISQNFLSSINEDIDPRRTAVTTPKGETRQLVKDGFLVEVSESSRKLRHVFLFTDVLLCAKLKKTSAGKHQQYDCKWYIPLADLVFPSPEESEASPQVHPFPDHELEDMKMKISALKSEIQKEKANKGQSRAIERLKKKMFENEFLLLLNSPTIPFRIHNRNGKSYLFLLSSDYERSEWREAIQKLQKKDLQAFVLSSVELQVLTGSCFKLRTVHNIPVTSNKDDDESPGLYGFLHVIVHSAKGFKQSANLYCTLEVDSFGYFVSKAKTRVFRDTAEPKWDEEFEIELEGSQSLRILCYEKCYDKTKVNKDNNEIVDKIMGKGQIQLDPQTVETKNWHTDVIEMNGIKVEFSMKFTSRDMSLKRTPSKKQTGVFGVKISVVTKRERSKVPYIVRQCVEEVEKRGIEEVGIYRISGVATDIQALKAVFDANNKDILLMLSDMDINAIAGTLKLYFRELPEPLLTDRLYPAFMEGIALSDPAAKENCMMHLLRSLPDPNLITFLFLLEHLKRVAEKEPINKMSLHNLATVFGPTLLRPSEVESKAHLTSAADIWSHDVMAQVQVLLYYLQHPPISFAELKRNTLYFSTDV

SEQ ID NO: 15981 - protein, 310 aa, Homo sapiens
MTDVLPQPDCSPKAGREPLALEESGSKRPPNTGARLWGRVRNKLLRNKLDPQTVETKNWHTDVIEMNGIKVEFSMKFTSRDMSLKRTPSKKQTGVFGVKISVVTKRERSKVPYIVRQCVEEVEKRGIEEVGIYRISGVATDIQALKAVFDANNKDILLMLSDMDINAIAGTLKLYFRELPEPLLTDRLYPAFMEGIALSDPAAKENCMMHLLRSLPDPNLITFLFLLEHLKRVAEKEPINKMSLHNLATVFGPTLLRPSEVESKAHLTSAADIWSHDVMAQVQVLLYYLQHPPISFAELKRNTLYFSTDV

SEQ ID NO: 15982 - protein, 813 aa, Homo sapiens
MPYIDESPTMSPQLSARSQGGGDGVSPTPPEGLAPGVEAGKGLEMRKLVLSGFLASEEIYINQLEALLLPMKPLKATATTSQPVLTIQQIETIFYKIQDIYEIHKEFYDNLCPKVQQWDSQVTMGHLFQKLASQLGVYKAFVDNYKVALETAEKCSQSNNQFQKISEELKVKGPKDSKDSHTSVTMEALLYKPIDRVTRSTLVLHDLLKHTPVDHPDYPLLQDALRISQNFLSSINEDIDPRRTAVTTPKGETRQLVKDGFLVEVSESSRKLRHVFLFTDVLLCAKLKKTSAGKHQQYDCKWYIPLADLVFPSPEESEASPQVHPFPDHELEDMKMKISALKSEIQKEKANKGQSRAIERLKKKMFENEFLLLLNSPTIPFRIHNRNGKSYLFLLSSDYERSEWREAIQKLQKKDLQAFVLSSVELQVLTGSCFKLRTVHNIPVTSNKDDDESPGLYGFLHVIVHSAKGFKQSANLYCTLEVDSFGYFVSKAKTRVFRDTAEPKWDEEFEIELEGSQSLRILCYEKCYDKTKVNKDNNEIVDKIMGKGQIQLDPQTVETKNWHTDVIEMNGIKVEFSMKFTSRDMSLKRTPSKKQTGVFGVKISVVTKRERSKVPYIVRQCVEEVEKRGIEEVGIYRISGVATDIQALKAVFDANNKDILLMLSDMDINAIAGTLKLYFRELPEPLLTDRLYPAFMEGIALSDPAAKENCMMHLLRSLPDPNLITFLFLLEHLKRVAEKEPINKMSLHNLATVFGPTLLRPSEVESKAHLTSAADIWSHDVMAQVQVLLYYLQHPPISFAELKRNTLYFSTDV

SEQ ID NO: 15983 - protein, 337 aa, Homo sapiens
MDLDVVNMFVIAGGTLAIPILAFVASFLLWPSALIRIYYWYWRRTLGMQVRYVHHEDYQFCYSFRGRPGHKPSILMLHGFSAHKDMWLSVVKFLPKNLHLVCVDMPGHEGTTRSSLDDLSIDGQVKRIHQFVECLKLNKKPFHLVGTSMGGQVAGVYAAYYPSDVSSLCLVCPAGLQYSTDNQFVQRLKELQGSAAVEKIPLIPSTPEEMSEMLQLCSYVRFKVPQQILQGLVDVRIPHNNFYRKLFLEIVSEKSRYSLHQNMDKIKVPTQIIWGKQDQVLDVSGADMLAKSIANCQVELLENCGHSVVMERPRKTAKLIIDFLASVHNTDNNKKLD

SEQ ID NO: 15984 - protein, 558 aa, Homo sapiens
MAKLLSCVLGPRLYKIYRERDSERAPASVPETPTAVTAPHSSSWDTYYQPRALEKHADSILALASVFWSISYYSSPFAFFYLYRKGYLSLSKVVPFSHYAGTLLLLLAGVACLRGIGRWTNPQYRQFITILEATHRNQSSENKRQLANYNFDFRSWPVDFHWEEPSSRKESRGGPSRRGVALLRPEPLHRGTADTLLNRVKKLPCQITSYLVAHTLGRRMLYPGSVYLLQKALMPVLLQGQARLVEECNGRRAKLLACDGNEIDTMFVDRRGTAEPQGQKLVICCEGNAGFYEVGCVSTPLEAGYSVLGWNHPGFAGSTGVPFPQNEANAMDVVVQFAIHRLGFQPQDIIIYAWSIGGFTATWAAMSYPDVSAMILDASFDDLVPLALKVMPDSWRGLVTRTVRQHLNLNNAEQLCRYQGPVLLIRRTKDEIITTTVPEDIMSNRGNDLLLKLLQHRYPRVMAEEGLRVVRQWLEASSQLEEASIYSRWEVEEDWCLSVLRSYQAEHGPDFPWSVGEDMSADGRRQLALFLARKHLHNFEATHCTPLPAQNFQMPWHL

SEQ ID NO: 15985 - protein, 525 aa, Homo sapiens
MPPPALFLSSLYPRLEFQNDFYRSCIRRSSPQPPPNLAWRPESLYSGELAGGGYLSLSKVVPFSHYAGTLLLLLAGVACLRGIGRWTNPQYRQFITILEATHRNQSSENKRQLANYNFDFRSWPVDFHWEEPSSRKESRGGPSRRGVALLRPEPLHRGTADTLLNRVKKLPCQITSYLVAHTLGRRMLYPGSVYLLQKALMPVLLQGQARLVEECNGRRAKLLACDGNEIDTMFVDRRGTAEPQGQKLVICCEGNAGFYEVGCVSTPLEAGYSVLGWNHPGFAGSTGVPFPQNEANAMDVVVQFAIHRLGFQPQDIIIYAWSIGGFTATWAAMSYPDVSAMILDASFDDLVPLALKVMPDSWRGLVTRTVRQHLNLNNAEQLCRYQGPVLLIRRTKDEIITTTVPEDIMSNRGNDLLLKLLQHRYPRVMAEEGLRVVRQWLEASSQLEEASIYSRWEVEEDWCLSVLRSYQAEHGPDFPWSVGEDMSADGRRQLALFLARKHLHNFEATHCTPLPAQNFQMPWHL

SEQ ID NO: 15986 - protein, 590 aa, Homo sapiens
MTLHNNSTTSPLFPNISSSWIHSPSDAGLPPGTVTHFGSYNVSRAAGNFSSPDGTTDDPLGGHTVWQVVFIAFLTGILALVTIIGNILVIVSFKVNKQLKTVNNYFLLSLACADLIIGVISMNLFTTYIIMNRWALGNLACDLWLAIDYVASNASVMNLLVISFDRYFSITRPLTYRAKRTTKRAGVMIGLAWVISFVLWAPAILFWQYFVGKRTVPPGECFIQFLSEPTITFGTAIAAFYMPVTIMTILYWRIYKETEKRTKELAGLQASGTEAETENFVHPTGSSRSCSSYELQQQSMKRSNRRKYGRCHFWFTTKSWKPSSEQMDQDHSSSDSWNNNDAAASLENSASSDEEDIGSETRAIYSIVLKLPGHSTILNSTKLPSSDNLQVPEEELGMVDLERKADKLQAQKSVDDGGSFPKSFSKLPIQLESAVDTAKTSDVNSSVGKSTATLPLSFKEATLAKRFALKTRSQITKRKRMSLVKEKKAAQTLSAILLAFIITWTPYNIMVLVNTFCDSCIPKTFWNLGYWLCYINSTVNPVCYALCNKTFRTTFKMLLLCQCDKKKRRKQQYQQRQSVIFHKRAPEQAL

SEQ ID NO: 15987 - protein, 501 aa, Homo sapiens
MFTLPQKDFRAPTTCLGPTCMQDLGSSHGEDLEGECSRKLDQKLPELRGVGDPAMISSDTSYLSSRGRMIKWFWDSAEEGYRTYHMDEYDEDKNPSGIINLGTSENKLCFDLLSWRLSQRDMQRVEPSLLQYADWRGHLFLREEVAKFLSFYCKSPVPLRPENVVVLNGGASLFSALATVLCEAGEAFLIPTPYYGAITQHVCLYGNIRLAYVYLDSEVTGLDTRPFQLTVEKLEMALREAHSEGVKVKGLILISPQNPLGDVYSPEELQEYLVFAKRHRLHVIVDEVYMLSVFEKSVGYRSVLSLERLPDPQRTHVMWATSKDFGMSGLRFGTLYTENQDVATAVASLCRYHGLSGLVQYQMAQLLRDRDWINQVYLPENHARLKAAHTYVSEELRALGIPFLSRGAGFFIWVDLRKYLPKGTFEEEMLLWRRFLDNKVLLSFGKAFECKEPGWFRFVFSDQVHRLCLGMQRVQQVLAGKSQVAEDPRPSQSQEPSDQRR

SEQ ID NO: 15988 - protein, 158 aa, Homo sapiens
MFTLPQKDFRAPTTCLGPTCMQDLGSSHGEDLEGECSRKLDQKLPELRGVGDPAMISSDTSYLSSRGRMIKWFWDSAEEGYRTYHMDEYDEDKNPSGIINLGTSENKLCFDLLSWRPPGGSGQVPVFLLQEPSTPQTRECGCPEWWCLALLCSGHGAV

SEQ ID NO: 15989 - protein, 738 aa, Homo sapiens
MRGPPAWPLRLLEPPSPAEPGRLLPVACVWAAASRVPGSLSPFTGLRPARLWGAGPALLWGVGAARRWRSGCRGGGPGASRGVLGLARLLGLWARGPGSCRCGAFAGPGAPRLPRARFPGGPAAAAWAGDEAWRRGPAAPPGDKGRLRPAAAGLPEARKLLGLAYPERRRLAAAVGFLTMSSVISMSAPFFLGKIIDVIYTNPTVDYSDNLTRLCLGLSAVFLCGAAANAIRVYLMQTSGQRIVNRLRTSLFSSILRQEVAFFDKTRTGELINRLSSDTALLGRSVTENLSDGLRAGAQASVGISMMFFVSPNLATFVLSVVPPVSIIAVIYGRYLRKLTKVTQDSLAQATQLAEERIGNVRTVRAFGKEMTEIEKYASKVDHVMQLARKEAFARAGFFGATGLSGNLIVLSVLYKGGLLMGSAHMTVGELSSFLMYAFWVGISIGGLSSFYSELMKGLGAGGRLWELLEREPKLPFNEGVILNEKSFQGALEFKNVHFAYPARPEVPIFQDFSLSIPSGSVTALVGPSGSGKSTVLSLLLRLYDPASGTISLDGHDIRQLNPVWLRSKIGTVSQEPILFSCSIAENIAYGADDPSSVTAEEIQRVAEVANAVAFIRNFPQGFNTVVGEKGVLLSGGQKQRIAIARALLKNPKILLLDEATSALDAENEYLVQEALDRLMDGRTVLVIAHRLSTIKNANMVAVLDQGKITEYGKHEELLSKPNGIYRKLMNKQSFISA

SEQ ID NO: 15990 - protein, 298 aa, Homo sapiens
MVTPALQMKKPKQFCRRMGQKKQRPARAGQPHSSSDAAQAPAEQPHSSSDAAQAPCPRERCLGPPTTPGPYRSIYFSSPKGHLTRLGLEFFDQPAVPLARAFLGQVLVRRLPNGTELRGRIVETEAYLGPEDEAAHSRGGRQTPRNRGMFMKPGTLYVYIIYGMYFCMNISSQGDGACVLLRALEPLEGLETMRQLRSTLRKGTASRVLKDRELCSGPSKLCQALAINKSFDQRDLAQDEAVWLERGPLEPSEPAVVAAARVGVGHAGEWARKPLRFYVRGSPWVSVVDRVAEQDTQA

SEQ ID NO: 15991 - protein, 293 aa, Homo sapiens
MPARSGAQFCRRMGQKKQRPARAGQPHSSSDAAQAPAEQPHSSSDAAQAPCPRERCLGPPTTPGPYRSIYFSSPKGHLTRLGLEFFDQPAVPLARAFLGQVLVRRLPNGTELRGRIVETEAYLGPEDEAAHSRGGRQTPRNRGMFMKPGTLYVYIIYGMYFCMNISSQGDGACVLLRALEPLEGLETMRHVRSTLRKGTASRVLKDRELCSGPSKLCQALAINKSFDQRDLAQDEAVWLERGPLEPSEPAVVAAARVGVGHAGEWARKPLRFYVRGSPWVSVVDRVAEQDTQA

SEQ ID NO: 15992 - protein, 293 aa, Homo sapiens
MPARSGAQFCRRMGQKKQRPARAGQPHSSSDAAQAPAEQPHSSSDAAQAPCPRERCLGPPTTPGPYRSIYFSSPKGHLTRLGLEFFDQPAVPLARAFLGQVLVRRLPNGTELRGRIVETEAYLGPEDEAAHSRGGRQTPRNRGMFMKPGTLYVYIIYGMYFCMNISSQGDGACVLLRALEPLEGLETMRQLRSTLRKGTASRVLKDRELCSGPSKLCQALAINKSFDQRDLAQDEAVWLERGPLEPSEPAVVAAARVGVGHAGEWARKPLRFYVRGSPWVSVVDRVAEQDTQA

SEQ ID NO: 15993 - protein, 281 aa, Homo sapiens
MGQKKQRPARAGQPHSSSDAAQAPAEQPHSSSDAAQAPCPRERCLGPPTTPGPYRSIYFSSPKGHLTRLGLEFFDQPAVPLARAFLGQVLVRRLPNGTELRGRIVETEAYLGPEDEAAHSRGGRQTPRNRGMFMKPGTLYVYIIYGMYFCMNISSQGDGACVLLRALEPLEGLETMRQLRSTLRKGTASRVLKDRELCSGPSKLCQALAINKSFDQRDLAQDEAVWLERGPLEPSEPAVVAAARVGVGHAGEWARKPLRFYVRGSPWVSVVDRVAEQDTQA

SEQ ID NO: 15994 - protein, 387 aa, Homo sapiens
MTMEGASGSSFGIDTILSSASSGSPGMMNGDFRPLGEARTADFRSQATPSPCSEIDTVGTAPSSPISVTMEPPEPHLVADATQHHHHLHHSQQPPPPAAAPTQSLQPLPQQQQPLPPQQPPPPPPQQLGSAASAPRTSTSSFLIKDILGDSKPLAACAPYSTSVSSPHHTPKQESNAVHESFRPKLEQEDSKTKLDKREDSQSDIKCHGTKEEGDREITSSRESPPVRAKKPRKARTAFSDHQLNQLERSFERQKYLSVQDRMDLAAALNLTDTQVKTWYQNRRTKWKRQTAVGLELLAEAGNYSALQRMFPSPYFYHPSLLGSMDSTTAAAAAAAMYSSMYRTPPAPHPQLQRPLVPRVLIHGLGPGGQPALNPLSSPIPGTPHPR

SEQ ID NO: 15995 - protein, 334 aa, Homo sapiens
MPKRRDILAIVLIVLPWTLLITVWHQSTLAPLLAVHKDEGSDPRRETPPGADPREYCTSDRDIVEVVRTEYVYTRPPPWSDTLPTIHVVTPTYSRPVQKAELTRMANTLLHVPNLHWLVVEDAPRRTPLTARLLRDTGLNYTHLHVETPRNYKLRGDARDPRIPRGTMQRNLALRWLRETFPRNSSQPGVVYFADDDNTYSLELFEEMRSTRRVSVWPVAFVGGLRYEAPRVNGAGKVVGWKTVFDPHRPFAIDMAGFAVNLRLILQRSQAYFKLRGVKGGYQESSLLRELVTLNDLEPKAANCTKILVWHTRTEKPVLVNEGKKGFTDPSVEI

SEQ ID NO: 15996 - protein, 347 aa, Homo sapiens
MGNEEPWVQPALEMPKRRDILAIVLIVLPWTLLITVWHQSTLAPLLAVHKDEGSDPRRETPPGADPREYCTSDRDIVEVVRTEYVYTRPPPWSDTLPTIHVVTPTYSRPVQKAELTRMANTLLHVPNLHWLVVEDAPRRTPLTARLLRDTGLNYTHLHVETPRNYKLRGDARDPRIPRGTMQRNLALRWLRETFPRNSSQPGVVYFADDDNTYSLELFEEMRSTRRVSVWPVAFVGGLRYEAPRVNGAGKVVGWKTVFDPHRPFAIDMAGFAVNLRLILQRSQAYFKLRGVKGGYQESSLLRELVTLNDLEPKAANCTKILVWHTRTEKPVLVNEGKKGFTDPSVEI

SEQ ID NO: 15997 - protein, 584 aa, Homo sapiens
MKMASSLAFLLLNFHVSLFLVQLLTPCSAQFSVLGPSGPILAMVGEDADLPCHLFPTMSAETMELRWVSSSLRQVVNVYADGKEVEDRQSAPYRGRTSILRDGITAGKAALRIHNVTASDSGKYLCYFQDGDFYEKALVELKVAALGSDLHIEVKGYEDGGIHLECRSTGWYPQPQIKWSDTKGENIPAVEAPVVADGVGLYAVAASVIMRGSSGGGVSCIIRNSLLGLEKTASISIADPFFRSAQPWIAALAGTLPISLLLLAGASYFLWRQQKEKIALSRETEREREMKEMGYAATEQEISLREKLQEELKWRKIQYMARGEKSLAYHEWKMALFKPADVILDPDTANAILLVSEDQRSVQRAEEPRDLPDNPERFEWRYCVLGCENFTSGRHYWEVEVGDRKEWHIGVCSKNVERKKGWVKMTPENGYWTMGLTDGNKYRALTEPRTNLKLPEPPRKVGIFLDYETGEISFYNATDGSHIYTFPHASFSEPLYPVFRILTLEPTALTICPIPKEVESSPDPDLVPDHSLETPLTPGLANESGEPQAEVTSLLLPAHPGAEVSPSATTNQNHKLQARTEALY

SEQ ID NO: 15998 - protein, 535 aa, Homo sapiens
MVGEDADLPCHLFPTMSAETMELRWVSSSLRQVVNVYADGKEVEDRQSAPYRGRTSILRDGITAGKAALRIHNVTASDSGKYLCYFQDGDFYEKALVELKVAALGSDLHIEVKGYEDGGIHLECRSTGWYPQPQIKWSDTKGENIPAVEAPVVADGVGLYAVAASVIMRGSSGGGVSCIIRNSLLGLEKTASISIADPFFRSAQPWIAALAGTLPISLLLLAGASYFLWRQQKEKIALSRETEREREMKEMGYAATEQEISLREWRKIQYMARGEKSLAYHEWKMALFKPADVILDPDTANAILLVSEDQRSVQRAEEPRDLPDNPERFEWRYCVLGCENFTSGRHYWEVEVGDRKEWHIGVCSKNVERKKGWVKMTPENGYWTMGLTDGNKYRALTEPRTNLKLPEPPRKVGIFLDYETGEISFYNATDGSHIYTFPHASFSEPLYPVFRILTLEPTALTICPIPKEVESSPDPDLVPDHSLETPLTPGLANESGEPQAEVTSLLLPAHPGAEVSPSATTNQNHKLQARTEALY

SEQ ID NO: 15999 - protein, 430 aa, Homo sapiens [sequence omitted]

SEQ ID NO: 16000 - protein, 513 aa, Homo sapiens
MAELQMLLEEEIPGGRRALFDSYTNLERVADYCENNYIQSADKQRALEETKAYTTQSLASVAYLINTLANNVLQMLDIQASQLRRMESSINHISQTVDIHKEKVARREIGILTTNKNTSRTHKIIAPANLERPVRYIRKPIDYTILDDIGHGVKWLLRFKVSTQNMKMGGLPRTTPPTQKPPSPPMSGKGTLGRHSPYRTLEPVRPPVVPNDYVPSPTRNMAPSQQSPVRTASVNQRNRTYSSSGSSGGSHPSSRSSSRENSGSGSVGVPIAVPTPSPPSVFPAPAGSAGTPPLPATSASAPAPLVPATVPSSTAPNAAAGGAPNLADGFTSPTPPVVSSTPPTGHPVQFYSMNRPASRHTPPTIGGSLPYRRPPSITSQTSLQNQMNGGPFYSQNPVSDTPPPPPPVEEPVFDESPPPPPPPEDYEEEEAAVVEYSDPYAEEDPPWAPRSYLEKVVAIYDYTKDKEDELSFQEGAIIYVIKKNDDGWYEGVMNGVTGLFPGNYVESIMHYSE

SEQ ID NO: 16001 - protein, 475 aa, Homo sapiens
MAELQMLLEEEIPGGRRALFDSYTNLERVADYCENNYIQSADKQRALEETKAYTTQSLASVAYLINTLANNVLQMLDIQASQLRRMESSINHISQTVDIHKEKVARREIGILTTNKNTSRTHKIIAPANLERPVRYIRKPIDYTILDDIGHGVKVSTQNMKMGGLPRTTPPTQKPPSPPMSGKGTLGRHSPYRTLEPVRPPVVPNDYVPSPTRNMAPSQQSPVRTASVNQRNRTYSSSGSSGGSHPSSRSSSRENSGSGSVGVPIAVPTPSPPSVFPGHPVQFYSMNRPASRHTPPTIGGSLPYRRPPSITSQTSLQNQMNGGPFYSQNPVSLAPPPPSILQVTPQLPLMGFVARVQENISDTPPPPPPVEEPVFDESPPPPPPPEDYEEEEAAVVEYSDPYAEEDPPWAPRSYLEKVVAIYDYTKDKEDELSFQEGAIIYVIKKNDDGWYEGVMNGVTGLFPGNYVESIMHYSE

SEQ ID NO: 16002 - protein, 401 aa, Homo sapiens
MSCRCWISRHPSYEGWNLQSIIFHKQIRGVDLESTFVTKFGNNCSLRLNETVDIHKEKVARREIGILTTNKNTSRTHKIIAPANLERPVRYIRKPIDYTILDDIGHGVKVSTQNMKMGGLPRTTPPTQKPPSPPMSGKGTLGRHSPYRTLEPVRPPVVPNDYVPSPTRNMAPSQQSPVRTASVNQRNRTYSSSGSSGGSHPSSRSSSRENSGSGSVGVPIAVPTPSPPSVFPGHPVQFYSMNRPASRHTPPTIGGSLPYRRPPSITSQTSLQNQMNGGPFYSQNPVSDTPPPPPPVEEPVFDESPPPPPPPEDYEEEEAAVVEYSDPYAEEDPPWAPRSYLEKVVAIYDYTKDKEDELSFQEGAIIYVIKKNDDGWYEGVMNGVTGLFPGNYVESIMHYSE

SEQ ID NO: 16003 - protein, 507 aa, Homo sapiens
MAELQMLLEEEIPGGRRALFDSYTNLERVADYCENNYIQSADKQRALEETKAYTTQSLASVAYLINTLANNVLQMLDIQASQLRRMESSINHISQTVDIHKEKVARREIGILTTNKNTSRTHKIIAPANLERPVRYIRKPIDYTILDDIGHGVKVSTQNMKMGGLPRTTPPTQKPPSPPMSGKGTLGRHSPYRTLEPVRPPVVPNDYVPSPTRNMAPSQQSPVRTASVNQRNRTYSSSGSSGGSHPSSRSSSRENSGSGSVGVPIAVPTPSPPSVFPAPAGSAGTPPLPATSASAPAPLVPATVPSSTAPNAAAGGAPNLADGFTSPTPPVVSSTPPTGHPVQFYSMNRPASRHTPPTIGGSLPYRRPPSITSQTSLQNQMNGGPFYSQNPVSDTPPPPPPVEEPVFDESPPPPPPPEDYEEEEAAVVEYSDPYAEEDPPWAPRSYLEKVVAIYDYTKDKEDELSFQEGAIIYVIKKNDDGWYEGVMNGVTGLFPGNYVESIMHYSE

SEQ ID NO: 16004 - protein, 254 aa, Homo sapiens
MQRPGEPGAARFGPPEGCADHRPHRYRSFMIEEILTEPPGPKGAAPAAAAAAAGELLKFGVQALLAARPFHSHLAVLKAEQAAVFKFPLAPLGCSGLSSALLAAGPGLPGAAGAPHLPLELQLRGKLEAAGPGEPGTKAKKGRRSRTVFTELQLMGLEKRFEKQKYLSTPDRIDLAESLGLSQLQVKTWYQNRRMKWKKIVLQGGGLESPTKPKGRPKKNSIPTSEQLTEQERAKDAEKPAEVPGEPSDRSRED

SEQ ID NO: 16005 - protein, 100 aa, Homo sapiens
MGLEKRFEKQKYLSTPDRIDLAESLGLSQLQVKTWYQNRRMKWKKIVLQGGGLESPTKPKGRPKKNSIPTSEQLTEQERAKDAEKPAEVPGEPSDRSRED

SEQ ID NO: 16006 - protein, 823 aa, Homo sapiens
MKLFGFGSRRGQTAQGSIDHVYTGSGYRIRDSELQKIHRAAVKGDAAEVERCLARRSGDLDALDKQHRTALHLACASGHVQVVTLLVNRKCQIDVCDKENRTPLIQAVHCQEEACAVILLEHGANPNLKDIYGNTALHYAVYSESTSLAEKLLSHGAHIEALDKDNNTPLLFAIICKKEKMVEFLLKRKASSHAVDRLRRSALMLAVYYDSPGIVNILLKQNIDVFAQDMCGRDAEDYAISHHLTKIQQQILEHKKKILKKEKSDVGSSDESAVSIFHELRVDSLPASDDKDLNVATKQCVPEKVSEPLPGSSHEKGNRIVNGQGEGPPAKHPSLKPSTEVEDPAVKGAVQRKNVQTLRAEQALPVASEEEQERHERSEKKQPQVKEGNNTNKSEKIQLSENICDSTSSAAAGRLTQQRKIGKTYPQQFPKKLKEEHDRCTLKQENEEKTNVNMLYKKNREELERKEKQYKKEVEAKQLEPTVQSLEMKSKTARNTPNRDFHNHEEMKGLMDENCILKADIAILRQEICTMKNDNLEKENKYLKDIKIVKETNAALEKYIKLNEEMITETAFRYQQELNDLKAENTRLNAELLKEKESKKRLEADIESYQSRLAAAISKHSESVKTERNLKLALERTRDVSVQVEMSSAISKVKDENEFLTEQLSETQIKFNALKDKFRKTRDSLRKKSLALETVQNDLSQTQQQTQEMKEMYQNAEAKVNNSTGKWNCVEERICHLQRENAWLVQQLDDVHQKEDHKEIVTNIQRGFIESGKKDLVLEEKSKKLMNECDHLKESLFQYEREKTEGVVSIKEDKYFQTSRKKI

SEQ ID NO: 16007 - protein, 421 aa, Homo sapiens
MAAGFGRCCRVLRSISRFHWRSQHTKANRQREPGLGFSFEFTEQQKEFQATARKFAREEIIPVAAEYDKTGEYPVPLIRRAWELGLMNTHIPENCGGLGLGTFDACLISEELAYGCTGVQTAIEGNSLGQMPIIIAGNDQQKKKYLGRMTEEPLMCAYCVTEPGAGSDVAGIKTKAEKKGDEYIINGQKMWITNGGKANWYFLLARSDPDPKAPANKAFTGFIVEADTPGIQIGRKELNMGQRCSDTRGIVFEDVKVPKENVLIGDGAGFKVAMGAFDKTRPVVAAGAVGLAQRALDEATKYALERKTFGKLLVEHQAISFMLAEMAMKVELARMSYQRAAWEVDSGRRNTYYASIAKAFAGDIANQLATDAVQILGGNGFNTEYPVEKLMRDAKIYQIYEGTSQIQRLIVAREHIDKYKN

SEQ ID NO: 16008 - protein, 425 aa, Homo sapiens
MAAGFGRCCRCSLQVLRSISRFHWRSQHTKANRQREPGLGFSFEFTEQQKEFQATARKFAREEIIPVAAEYDKTGEYPVPLIRRAWELGLMNTHIPENCGGLGLGTFDACLISEELAYGCTGVQTAIEGNSLGQMPIIIAGNDQQKKKYLGRMTEEPLMCAYCVTEPGAGSDVAGIKTKAEKKGDEYIINGQKMWITNGGKANWYFLLARSDPDPKAPANKAFTGFIVEADTPGIQIGRKELNMGQRCSDTRGIVFEDVKVPKENVLIGDGAGFKVAMGAFDKTRPVVAAGAVGLAQRALDEATKYALERKTFGKLLVEHQAISFMLAEMAMKVELARMSYQRAAWEVDSGRRNTYYASIAKAFAGDIANQLATDAVQILGGNGFNTEYPVEKLMRDAKIYQIYEGTSQIQRLIVAREHIDKYKN

SEQ ID NO: 16009 - protein, 823 aa, Homo sapiens
MKLFGFGSRRGQTAQGSIDHVYTGSGYRIRDSELQKIHRAAVKGDAAEVERCLARRSGELDALDKQHRTALHLACASGHVQVVTLLVNRKCQIDVCDKENRTPLIQAVHCQEEACAVILLEHGANPNLKDIYGNTALHYAVYSESTSLAEKLLSHGAHIEALDKDNNTPLLFAIICKKEKMVEFLLKKKASSHAVDRLRRSALMLAVYYDSPGIVNILLKQNIDVFAQDMCGRDAEDYAISHHLTKIQQQILEHKKKILKKEKSDVGSSDESAVSIFHELRVDSLPASDDKDLNVATKQCVPEKVSEPLPGSSHEKGNRIVNGQGEGPPAKHPSLKPSTEVEDPAVKGAVQRKNVQTLRAEQALPVASEEEQQRHERSEKKQPQVKEGNNTNKSEKIQLSENICDSTSSAAAGRLTQQRKIGKTYPQQFPKKLKEEHDRCTLKQENEEKTNVNMLYKKNREELERKEKQYKKEVEAKQLEPTVQSLEMKSKTARNTPNWDFHNHEEMKGLMDENCILKADIAILRQEICTMKNDNLEKENKYLKDIKIVKETNAALEKYIKLNEEMITETAFRYQQELNDLKAENTRLNAELLKEKESKKRLEADIESYQSRLAAAISKHSESVKTERNLKLALERTQDVSVQVEMSSAISKVKDENEFLTEQLSETQIKFNALKDKFRKTRDSLRKKSLALETVQNNLSQTQQQTQEMKEMYQNAEAKVNNSTGKWNCVEERICHLQRENAWLVQQLDDVHQKEDHKEIVTNIQRGFIESGKKDFVLEEKSKKLMNECDHLKESLFQYEREKTEVVVSIKEDKYFQTSRKKI

SEQ ID NO: 16010 - protein, 165 aa, Homo sapiens
MKLFGFRSRRGQTVLGSIDHLYTGSGYRIRYSELQKIHKAAVKGDAAEMERCLARRSGDLDALDKQHRTALHLACASGHVKVVTLLVNRKCQIDIYDKENRTPLIQAVHCQEEACAVILLEHGANPNLKDIYGNTALHYAVYSESTSLAEKLLFHGENIEALDKV

SEQ ID NO: 16011 - protein, 375 aa, Homo sapiens [sequence omitted]

SEQ ID NO: 16012 - protein, 335 aa, Homo sapiens [sequence omitted]

SEQ ID NO: 16013 - protein, 397 aa, Homo sapiens
MSVGRRRIKLLGILMMANVFIYFIMEVSKSSSQEKNGKGEVIIPKEKFWKISTPPEAYWNREQEKLNRQYNPILSMLTNQTGEAGRLSNISHLNYCEPDLRVTSVVTGFNNLPDRFKDFLLYLRCRNYSLLIDQPDKCAKKPFLLLAIKSLTPHFARRQAIRESWGQESNAGNQTVVRVFLLGQTPPEDNHPDLSDMLKFESEKHQDILMWNYRDTFFNLSLKEVLFLRWVSTSCPDTEFVFKGDDDVFVNTHHILNYLNSLSKTKAKDLFIGDVIHNAGPHRDKKLKYYIPEVVYSGLYPPYAGGGGFLYSGHLALRLYHITDQVHLYPIDDVYTGMCLQKLGLVPEKHKGFRTFDIEEKNKNNICSYVDLMLVHSRKPQEMIDIWSQLQSAHLKC

SEQ ID NO: 16014 - protein, 393 aa, Homo sapiens
MVSRSLVGILMMANVFIYFIMEVSKSSSQEKNGKGEVIIPKEKFWKISTPPEAYWNREQEKLNRQYNPILSMLTNQTGEAGRLSNISHLNYCEPDLRVTSVVTGFNNLPDRFKDFLLYLRCRNYSLLIDQPDKCAKKPFLLLAIKSLTPHFARRQAIRESWGQESNAGNQTVVRVFLLGQTPPEDNHPDLSDMLKFESEKHQDILMWNYRDTFFNLSLKEVLFLRWVSTSCPDTEFVFKGDDDVFVNTHHILNYLNSLSKTKAKDLFIGDVIHNAGPHRDKKLKYYIPEVVYSGLYPPYAGGGGFLYSGHLALRLYHITDQVHLYPIDDVYTGMCLQKLGLVPEKHKGFRTFDIEEKNKNNICSYVDLMLVHSRKPQEMIDIWSQLQSAHLKC

SEQ ID NO: 16015 - protein, 1549 aa, Homo sapiens
MSLSFCGNNISSYNINDGVLQNSCFVDALNLVPHVFLLFITFPILFIGWGSQSSKVQIHHNTWLHFPGHNLRWILTFALLFVHVCEIAEGIVSDSRRESRHLHLFMPAVMGFVATTTSIVYYHNIETSNFPKLLLALFLYWVMAFITKTIKLVKYCQSGLDISNLRFCITGMMVILNGLLMAVEINVIRVRRYVFFMNPQKVKPPEDLQDLGVRFLQPFVNLLSKATYWWMNTLIISAHKKPIDLKAIGKLPIAMRAVTNYVCLKDAYEEQKKKVADHPNRTPSIWLAMYRAFGRPILLSSTFRYLADLLGFAGPLCISGIVQRVNETQNGTNNTTGISETLSSKEFLENAYVLAVLLFLALILQRTFLQASYYVTIETGINLRGALLAMIYNKILRLSTSNLSMGEMTLGQINNLVAIETNQLMWFLFLCPNLWAMPVQIIMGVILLYNLLGSSALVGAAVIVLLAPIQYFIATKLAEAQKSTLDYSTERLKKTNEILKGIKLLKLYAWEHIFCKSVEETRMKELSSLKTFALYTSLSIFMNAAIPIAAVLATFVTHAYASGNNLKPAEAFASLSLFHILVTPLFLLSTVVRFAVKAIISVQKLNEFLLSDEIGDDSWRTGESSLPFESCKKHTGVQPKTINRKQPGRYHLDSYEQSTRRLRPAETEDIAIKVTNGYFSWGSGLATLSNIDIRIPTGQLTMIVGQVGCGKSSLLLAILGEMQTLEGKVHWSNVNESEPSFEATRSRNRYSVAYAAQKPWLLNATVEENITFGSPFNKQRYKAVTDACSLQPDIDLLPFGDQTEIGERGINLSGGQRQRICVARALYQNTNIVFLDDPFSALDIHLSDHLMQEGILKFLQDDKRTLVLVTHKLQYLTHADWIIAMKDGSVLREGTLKDIQTKDVELYEHWKTLMNRQDQELEKDMEADQTTLERKTLRRAMYSREAKAQMEDEDEEEEEEEDEDDNMSTVMRLRTKMPWKTCWRYLTSGGFFLLILMIFSKLLKHSVIVAIDYWLATWTSEYSINNTGKADQTYYVAGFSILCGAGIFLCLVTSLTVEWMGLTAAKNLHHNLLNKIILGPIRFFDTTPLGLILNRFSADTNIIDQHIPPTLESLTRSTLLCLSAIGMISYATPVFLVALLPLGVAFYFIQKYFRVASKDLQELDDSTQLPLLCHFSETAEGLTTIRAFRHETRFKQRMLELTDTNNIAYLFLSAANRWLEVRTDYLGACIVLTASIASISGSSNSGLVGLGLLYALTITNYLNWVVRNLADLEVQMGAVKKVNSFLTMESENYEGTMDPSQVPEHWPQEGEIKIHDLCVRYENNLKPVLKHVKAYIKPGQKVGICGRTGSGKSSLSLAFFRMVDIFDGKIVIDGIDISKLPLHTLRSRLSIILQDPILFSGSIRFNLDPECKCTDDRLWEALEIAQLKNMVKSLPGGLDAVVTEGGENFSVGQRQLFCLARAFVRKSSILIMDEATASIDMATENILQKVVMTAFADRTVVTIAHRVSSIMDAGLVLVFSEGILVECDTVPNLLAHKNGLFSTLVMTNK

SEQ ID NO: 16016 - protein, 1549 aa, Homo sapiens
MSLSFCGNNISSYNINDGVLQNSCFVDALNLVPHVFLLFITFPILFIGWGSQSSKVQIHHNTWLHFPGHNLRWILTFALLFVHVCEIAEGIVSDSRRESRHLHLFMPAVMGFVATTTSIVYYHNIETSNFPKLLLALFLYWVMAFITKTIKLVKYCQSGLDISNLRFCITGMMVILNGLLMAVEINVIRVRRYVFFMNPQKVKPPEDLQDLGVRFLQPFVNLLSKATYWWMNTLIISAHKKPIDLKAIGKLPIAMRAVTNYVCLKDAYEEQKKKVADHPNRTPSIWLAMYRAFGRPILLSSTFRYLADLLGFAGPLCISGIVQRVNETQNGTNNTTGISETLSSKEFLENAYVLAVLLFLALILQRTFLQASYYVTIETGINLRGALLAMIYNKILRLSTSNLSMGEMTLGQINNLVAIETNQLMWFLFLCPNLWAMPVQIIMGVILLYNLLGSSALVGAAVIVLLAPIQYFIATKLAEAQKSTLDYSTERLKKTNEILKGIKLLKLYAWEHIFCKSVEETRMKELSSLKTFALYTSLSIFMNAAIPIAAVLATFVTHAYASGNNLKPAEAFASLSLFHILVTPLFLLSTVVRFAVKAIISVQKLNEFLLSDEIGDDSWRTGESSLPFESCKKHTGVQPKTINRKQPGRYHLDSYEQSTRRLRPAETEDIAIKVTNGYFSWGSGLATLSNIDIRIPTGQLTMIVGQVGCGKSSLLLAILGEMQTLEGKVHWSNVNESEPSFEATRSRNRYSVAYAAQKPWLLNATVEENITFGSPFNKQRYKAVTDACSLQPDIDLLPFGDQTEIGERGINLSGGQRQRICVARALYQNTNIVFLDDPFSALDIHLSDHLMQEGILKFLQDDKRTLVLVTHKLQYLTHADWIIAMKDGSVLREGTLKDIQTKDVELYEHWKTLMNRQDQELEKDMEADQTTLERKTLRRAMYSREAKAQMEDEDEEEEEEEDEDDNMSTVMRLRTKMPWKTCWRYLTSGGFFLLILMIFSKLLKHSVIVAIDYWLATWTSEYSINNTGKADQTYYVAGFSILCGAGIFLCLVTSLTVEWMGLTAAKNLHHNLLNKIILGPIRFFDTTPLGLILNRFSADTNIIDQHIPPTLESLTRSTLLCLSAIGMISYATPVFLVALLPLGVAFYFIQKYFRVASKDLQELDDSTQLPLLCHFSETAEGLTTIRAFRHETRFKQRMLELTDTNNIAYLFLSAANRWLEVRTDYLGACIVLTASIASISGSSNSGLVGLGLLYALTITNYLNWVVRNLADLEVQMGAVKKVNSFLTMESENYEGTMDPSQVPEHWPQEGEIKIHDLCVRYENNLKPVLKHVKAYIKPGQKVGICGRTGSGKSSLSLAFFRMVDIFDGKIVIDGIDISKLPLHTLRSRLSIILQDPILFSGSIRFNLDPECKCTDDRLWEALEIAQLKNMVKSLPGGLDAVVTEGGENFSVGQRQLFCLARAFVRKSSILIMDEATASIDMATENILQKVVMTAFADRTVVTIAHRVHTILTADLVIVMKRGNILEYDTPESLLAQENGVFASFVRADM

SEQ ID NO: 16017 - protein, 372 aa, Homo sapiens
MKYLRHRRPNATLILAIGAFTLLLFSLLVSPPTCKVQEQPPAIPEALAWPTPPTRPAPAPCHANTSMVTHPDFATQPQHVQNFLLYRHCRHFPLLQDVPPSKCAQPVFLLLVIKSSPSNYVRRELLRRTWGRERKVRGLQLRLLFLVGTASNPHEARKVNRLLELEAQTHGDILQWDFHDSFFNLTLKQVLFLQWQETRCANASFVLNGDDDVFAHTDNMVFYLQDHDPGRHLFVGQLIQNVGPIRAFWSKYYVPEVVTQNERYPPYCGGGGFLLSRFTAAALRRAAHVLDIFPIDDVFLGMCLELEGLKPASHSGIRTSGVRAPSQRLSSFDPCFYRDLLLVHRFLPYEMLLMWDALNQPNLTCGNQTQIY

SEQ ID NO: 16018 - protein, 316 aa, Homo sapiens
MAVQVVQAVQAVHLESDAFLVCLNHALSTEKEEVMGLCIGELNDDTRSDSKFAYTGTEMRTVAEKVDAVRIVHIHSVIILRRSDKRKDRVEISPEQLSAASTEAERLAELTGRPMRVVGWYHSHPHITVWPSHVDVRTQAMYQMMDQGFVGLIFSCFIEDKNTKTGRVLYTCFQSIQAQKSSESLHGPRDFWSSSQHISIEGQKEEERYERIEIPIHIVPHVTIGKVCLESAVELPKILCQEEQDAYRRIHSLTHLDSVTKIHNGSVFTKNLCSQMSAVSGPLLQWLEDRLEQNQQHLQELQQEKEELMQELSSLE

SEQ ID NO: 16019 - protein, 291 aa, Homo sapiens
MAVQVVQAVQAVHLESDAFLVCLNHALSTEKEEVMGLCIGELNDDTRSDSKFAYTGTEMRTVAEKVDAVRIVHIHSVIILRRSDKRKDRVEISPEQLSAASTEAERLAELTGRPMRVVGWYHSHPHITVWPSHVDVRTQAMYQMMDQGFVGLIFSCFIEDKNTKTGRVLYTCFQSIQAQKSSEYERIEIPIHIVPHVTIGKVCLESAVELPKILCQEEQDAYRRIHSLTHLDSVTKIHNGSVFTKNLCSQMSAVSGPLLQWLEDRLEQNQQHLQELQQEKEELMQELSSLE

SEQ ID NO: 16020 - protein, 292 aa, Homo sapiens
MAVQVVQAVQAVHLESDAFLVCLNHALSTEKEEVMGLCIGELNDDTSRSDSKFAYTGTEMRTVAEKVDAVRIVHIHSVIILRRSDKRKDRVEISPEQLSAASTEAERLAELTGRPMRVVGWYHSHPHITVWPSHVDVRTQAMYQMMDQGFVGLIFSCFIEDKNTKTGRVLYTCFQSIQAQKSSEYERIEIPIHIVPHVTIGKVCLESAVELPKILCQEEQDAYRRIHSLTHLDSVTKIHNGSVFTKNLCSQMSAVSGPLLQWLEDRLEQNQQHLQELQQEKEELMQELSSLE

SEQ ID NO: 16021 - protein, 202 aa, Homo sapiens
MRVVGWYHSHPHITVWPSHVDVRTQAMYQMMDQGFVGLIFSCFIEDKNTKTGRVLYTCFQSIQAQKSSESLHGPRDFWSSSQHISIEGQKEEERYERIEIPIHIVPHVTIGKVCLESAVELPKILCQEEQDAYRRIHSLTHLDSVTKIHNGSVFTKNLCSQMSAVSGPLLQWLEDRLEQNQQHLQELQQEKEELMQELSSLE

SEQ ID NO: 16022 - protein, 247 aa, Homo sapiens
MAVQVVQAVQAVHLESDAFLVCLNHALSTEKEEVMGLCIGELNDDTRSDSKFAYTGTEMRTVAEKVDAVRIVHIHSVIILRRSDKRKDRVEISPEQLSAASTEAERLAELTGRPMRVVGWYHSHPHITVWPSHVDVRTQAMYQMMDQGFVGLIFSCFIEDKNTKTGRVLYTCFQSIQAQKSSDLTHLDSVTKIHNGSVFTKNLCSQMSAVSGPLLQWLEDRLEQNQQHLQELQQEKEELMQELSSLE

SEQ ID NO: 16023 - protein, 655 aa, Homo sapiens
MQAARMAASLGRQLLRLGGGSSRLTALLGQPRPGPARRPYAGGAAQLALDKSDSHPSDALTRKKPAKAESKSFAVGMFKGQLTTDQVFPYPSVLNEEQTQFLKELVEPVSRFFEEVNDPAKNDALEMVEETTWQGLKELGAFGLQVPSELGGVGLCNTQYARLVEIVGMHDLGVGITLGAHQSIGFKGILLFGTKAQKEKYLPKLASGETVAAFCLTEPSSGSDAASIRTSAVPSPCGKYYTLNGSKLWISNGGLADIFTVFAKTPVTDPATGAVKEKITAFVVERGFGGITHGPPEKKMGIKASNTAEVFFDGVRVPSENVLGEVGSGFKVAMHILNNGRFGMAAALAGTMRGIIAKAVDHATNRTQFGEKIHNFGLIQEKLARMVMLQYVTESMAYMVSANMDQGATDFQIEAAISKIFGSEAAWKVTDECIQIMGGMGFMKEPGVERVLRDLRIFRIFEGTNDILRLFVALQGCMDKGKELSGLGSALKNPFGNAGLLLGEAGKQLRRRAGLGSGLSLSGLVHPELSRSGELAVRALEQFATVVEAKLIKHKKGIVNEQFLLQRLADGAIDLYAMVVVLSRASRSLSEGHPTAQHEKMLCDTWCIEAAARIREGMAALQSDPWQQELYRNFKSISKALVERGGVVTSNPLGF

SEQ ID NO: 16024 - protein, 633 aa, Homo sapiens
MQAARMAASLGRQLLRLGGGSSRLTALLGQPRPGPARRPYAGGAAQESKSFAVGMFKGQLTTDQVFPYPSVLNEEQTQFLKELVEPVSRFFEEVNDPAKNDALEMVEETTWQGLKELGAFGLQVPSELGGVGLCNTQYARLVEIVGMHDLGVGITLGAHQSIGFKGILLFGTKAQKEKYLPKLASGETVAAFCLTEPSSGSDAASIRTSAVPSPCGKYYTLNGSKLWISNGGLADIFTVFAKTPVTDPATGAVKEKITAFVVERGFGGITHGPPEKKMGIKASNTAEVFFDGVRVPSENVLGEVGSGFKVAMHILNNGRFGMAAALAGTMRGIIAKAVDHATNRTQFGEKIHNFGLIQEKLARMVMLQYVTESMAYMVSANMDQGATDFQIEAAISKIFGSEAAWKVTDECIQIMGGMGFMKEPGVERVLRDLRIFRIFEGTNDILRLFVALQGCMDKGKELSGLGSALKNPFGNAGLLLGEAGKQLRRRAGLGSGLSLSGLVHPELSRSGELAVRALEQFATVVEAKLIKHKKGIVNEQFLLQRLADGAIDLYAMVVVLSRASRSLSEGHPTAQHEKMLCDTWCIEAAARIREGMAALQSDPWQQELYRNFKSISKALVERGGVVTSNPLGF

SEQ ID NO: 16025 - protein, 678 aa, Homo sapiens
MLGGLAAAAGTRIMGKEIEAEAQRPLRQTWRPGQPPAMTAKTMSSRLTALLGQPRPGPARRPYAGGAAQLALDKSDSHPSDALTRKKPAKAESKSFAVGMFKGQLTTDQVFPYPSVLNEEQTQFLKELVEPVSRFFEEVNDPAKNDALEMVEETTWQGLKELGAFGLQVPSELGGVGLCNTQYARLVEIVGMHDLGVGITLGAHQSIGFKGILLFGTKAQKEKYLPKLASGETVAAFCLTEPSSGSDAASIRTSAVPSPCGKYYTLNGSKLWISNGGLADIFTVFAKTPVTDPATGAVKEKITAFVVERGFGGITHGPPEKKMGIKASNTAEVFFDGVRVPSENVLGEVGSGFKVAMHILNNGRFGMAAALAGTMRGIIAKAVDHATNRTQFGEKIHNFGLIQEKLARMVMLQYVTESMAYMVSANMDQGATDFQIEAAISKIFGSEAAWKVTDECIQIMGGMGFMKEPGVERVLRDLRIFRIFEGTNDILRLFVALQGCMDKGKELSGLGSALKNPFGNAGLLLGEAGKQLRRRAGLGSGLSLSGLVHPELSRSGELAVRALEQFATVVEAKLIKHKKGIVNEQFLLQRLADGAIDLYAMVVVLSRASRSLSEGHPTAQHEKMLCDTWCIEAAARIREGMAALQSDPWQQELYRNFKSISKALVERGGVVTSNPLGF

SEQ ID NO: 16026 - protein, 181 aa, Homo sapiens
MATEPEAAEPVVPSLVDRYFTRWYKPDVKGKFCEDHCILQHSNRICVITLAESHPVLQSGKTIKSISYQISTNCSRLQNKVSGKFKRGAQFLTELAPLCKIYCSDGEEYTVSSCVRGRLMEVNENILHKPSILQEKPSTEGYIAVVLPKFEESKSITEGLLTQKQYEEVMVKRINATTATS

SEQ ID NO: 16027 - protein, 486 aa, Homo sapiens
MSSSSPPAGAASAAISASEKVDGFTRKSVRKAQRQKRSQGSSQFRSQGSQAELHPLPQLKDATSNEQQELFCQKLQQCCILFDFMDSVSDLKSKEIKRATLNELVEYVSTNRGVIVESAYSDIVKMISANIFRTLPPSDNPDFDPEEDEPTLEASWPHIQLVYEFFLRFLESPDFQPSIAKRYIDQKFVQQLLELFDSEDPRERDFLKTVLHRIYGKFLGLRAFIRKQINNIFLRFIYETEHFNGVAELLEILGSIINGFALPLKAEHKQFLMKVLIPMHTAKGLALFHAQLAYCVVQFLEKDTTLTEPVIRGLLKFWPKTCSQKEVMFLGEIEEILDVIEPTQFKKIEEPLFKQISKCVSSSHFQVAERALYFWNNEYILSLIEENIDKILPIMFASLYKISKEHWNPTIVALVYNVLKTLMEMNGKLFDDLTSSYKAERQREKKKELEREELWKKLEELKLKKALEKQNSAYNMHSILSNTSAE

SEQ ID NO: 16028 - protein, 429 aa, Homo sapiens
MIMNATSNEQQELFCQKLQQCCILFDFMDSVSDLKSKEIKRATLNELVEYVSTNRGVIVESAYSDIVKMISANIFRTLPPSDNPDFDPEEDEPTLEASWPHIQLVYEFFLRFLESPDFQPSIAKRYIDQKFVQQLLELFDSEDPRERDFLKTVLHRIYGKFLGLRAFIRKQINNIFLRFIYETEHFNGVAELLEILGSIINGFALPLKAEHKQFLMKVLIPMHTAKGLALFHAQLAYCVVQFLEKDTTLTEPVIRGLLKFWPKTCSQKEVMFLGEIEEILDVIEPTQFKKIEEPLFKQISKCVSSSHFQVAERALYFWNNEYILSLIEENIDKILPIMFASLYKISKEHWNPTIVALVYNVLKTLMEMNGKLFDDLTSSYKAERQREKKKELEREELWKKLEELKLKKALEKQNSAYNMHSILSNTSAE

SEQ ID NO: 16029 - protein, 740 aa, Homo sapiens
MTVKLDFEECLKDSPRFRASIELVEAEVSELETRLEKLLKLGTGLLESGRHYLAASRAFVVGICDLARLGPPEPMMAECLEKFTVSLNHKLDSHAELLDATQHTLQQQIQTLVKEGLRGFREARRDFWRGAESLEAALTHNAEVPRRRAQEAEEAGAALRTARAGYRGRALDYALQINVIEDKRKFDIMEFVLRLVEAQATHFQQGHEELSRLSQYRKELGAQLHQLVLNSAREKRDMEQRHVLLKQKELGGEEPEPSLREGPGGLVMEGHLFKRASNAFKTWSRRWFTIQSNQLVYQKKYKDPVTVVVDDLRLCTVKLCPDSERRFCFEVVSTSKSCLLQADSERLLQLWVSAVQSSIASAFSQARLDDSPRGPGQGSGHLAIGSAATLGSGGMARGREPGGVGHVVAQVQSVDGNAQCCDCREPAPEWASINLGVTLCIQCSGIHRSLGVHFSKVRSLTLDSWEPELVKLMCELGNVIINQIYEARVEAMAVKKPGPSCSRQEKEAWIHAKYVEKKFLTKLPEIRGRRGGRGRPRGQPPVPPKPSIRPRPGSLRSKPEPPSEDLGSLHPGALLFRASGHPPSLPTMADALAHGADVNWVNGGQDNATPLIQATAANSLLACEFLLQNGANVNQADSAGRGPLHHATILGHTGLACLFLKRGADLGARDSEGRDPLTIAMETANADIVTLLRLAKMREAEAAQGQAGDETYLDIFRDFSLMASDDPEKLSRRSHDLHTL

SEQ ID NO: 16030 - protein, 497 aa, Homo sapiens
METKLPPASTPTSPSSPGLSPVPPPDKVDGFSRRSLRRARPRRSHSSSQFRYQSNQQELTPLPLLKDVPASELHELLSRKLAQCGVMFDFLDCVADLKGKEVKRAALNELVECVGSTRGVLIEPVYPDIIRMISVNIFRTLPPSENPEFDPEEDEPNLEPSWPHLQLVYEFFLRFLESPDFQPSVAKRYVDQKFVLMLLELFDSEDPREREYLKTILHRVYGKFLGLRAYIRKQCNHIFLRFIYEFEHFNGVAELLEILGSIINGFALPLKTEHKQFLVRVLIPLHSVKSLSVFHAQLAYCVVQFLEKDATLTEHVIRGLLKYWPKTCTQKEVMFLGEMEEILDVIEPSQFVKIQEPLFKQVARCVSSPHFQVAERALYFWNNEYILSLIEDNCHTVLPAVFGTLYQVSKEHWNQTIVSLIYNVLKTFMEMNGKLFDELTASYKLEKQQEQQKAQERQELWQGLEELRLRRLQGTQGAKEAPLQRLTPQVAASGGQS

SEQ ID NO: 16031 - protein, 494 aa, Homo sapiens
MITVNPPLPQDTVNLFSPVPPPDKVDGFSRRSLRRARPRRSHSSSQFRYQSNQQELTPLPLLKDVPASELHELLSRKLAQCGVMFDFLDCVADLKGKEVKRAALNELVECVGSTRGVLIEPVYPDIIRMISVNIFRTLPPSENPEFDPEEDEPNLEPSWPHLQLVYEFFLRFLESPDFQPSVAKRYVDQKFVLMLLELFDSEDPREREYLKTILHRVYGKFLGLRAYIRKQCNHIFLRFIYEFEHFNGVAELLEILGSIINGFALPLKTEHKQFLVRVLIPLHSVKSLSVFHAQLAYCVVQFLEKDATLTEHVIRGLLKYWPKTCTQKEVMFLGEMEEILDVIEPSQFVKIQEPLFKQVARCVSSPHFQVAERALYFWNNEYILSLIEDNCHTVLPAVFGTLYQVSKEHWNQTIVSLIYNVLKTFMEMNGKLFDELTASYKLEKQQEQQKAQERQELWQGLEELRLRRLQGTQGAKEAPLQRLTPQVAASGGQS

SEQ ID NO: 16032 - protein, 778 aa, Homo sapiens
MKMTVDFEECLKDSPRFRAALEEVEGDVAELELKLDKLVKLCIAMIDTGKAFCVANKQFMNGIRDLAQYSSNDAVVETSLTKFSDSLQEMINFHTILFDQTQRSIKAQLQNFVKEDLRKFKDAKKQFEKVSEEKENALVKNAQVQRNKQHEVEEATNILTATRKCFRHIALDYVLQINVLQSKRRSEILKSMLSFMYAHLAFFHQGYDLFSELGPYMKDLGAQLDRLVVDAAKEKREMEQKHSTIQQKDFSSDDSKLEYNVDAANGIVMEGYLFKRASNAFKTWNRRWFSIQNNQLVYQKKFKDNPTVVVEDLRLCTVKHCEDIERRFCFEVVSPTKSCMLQADSEKLRQAWIKAVQTSIATAYREKGDESEKLDKKSSPSTGSLDSGNESKEKLLKGESALQRVQCIPGNASCCDCGLADPRWASINLGITLCIECSGIHRSLGVHFSKVRSLTLDTWEPELLKLMCELGNDVINRVYEANVEKMGIKKPQPGQRQEKEAYIRAKYVERKFVDKYSISLSPPEQQKKFVSKSSEEKRLSISKFGPGDQVRASAQSSVRSNDSGIQQSSDDGRESLPSTVSANSLYEPEGERQDSSMFLDSKHLNPGLQLYRASYEKNLPKMAEALAHGADVNWANSEENKATPLIQAVLGGSLVTCEFLLQNGANVNQRDVQGRGPLHHATVLGHTGQVCLFLKRGANQHATDEEGKDPLSIAVEAANADIVTLLRLARMNEEMRESEGLYGQPGDETYQDIFRDFSQMASNNPEKLNRFQQDSQKF

SEQ ID NO: 16033 - protein, 491 aa, Homo sapiens
MALLWGLLVLSWSCLQGPCSVFSPVSAMEPLGRQLTSGPNQEQVSPLTLLKLGNQEPGGQTALKSPPGVCSRDPTPEQTHRLARAMMAFTADLFSLVAQTSTCPNLILSPLSVALALSHLALGAQNHTLQRLQQVLHAGSGPCLPHLLSRLCQDLGPGAFRLAARMYLQKGFPIKEDFLEQSEQLFGAKPVSLTGKQEDDLANINQWVKEATEGKIQEFLSGLPEDTVLLLLNAIHFQGFWRNKFDPSLTQRDSFHLDEQFTVPVEMMQARTYPLRWFLLEQPEIQVAHFPFKNNMSFVVLVPTHFEWNVSQVLANLSWDTLHPPLVWERPTKVRLPKLYLKHQMDLVATLSQLGLQELFQAPDLRGISEQSLVVSGVQHQSTLELSEVGVEAAAATSIAMSRMSLSSFSVNRPFLFFIFEDTTGLPLFVGSVRNPNPSAPRELKEQQDSPGNKDFLQSLKGFPRGDKLFGPDLKLVPPMEEDYPQFGSPK

SEQ ID NO: 16034 - protein, 427 aa, Homo sapiens
MALLWGLLVLSWSCLQGPCSVFSPVSAMEPLGRQLTSGPNQEQVSPLTLLKLGNQVQPGAQNHTLQRLQQVLHAGSGPCLPHLLSRLCQDLGPGAFRLAARMYLQKGFPIKEDFLEQSEQLFGAKPVSLTGKQEDDLANINQWVKEATEGKIQEFLSGLPEDTVLLLLNAIHFQGFWRNKFDPSLTQRDSFHLDEQFTVPVEMMQARTYPLRWFLLEQPEIQVAHFPFKNNMSFVVLVPTHFEWNVSQVLANLSWDTLHPPLVWERPTKVRLPKLYLKHQMDLVATLSQLGLQELFQAPDLRGISEQSLVVSGVQHQSTLELSEVGVEAAAATSIAMSRMSLSSFSVNRPFLFFIFEDTTGLPLFVGSVRNPNPSAPRELKEQQDSPGNKDFLQSLKGFPRGDKLFGPDLKLVPPMEEDYPQFGSPK

SEQ ID NO: 16035 - protein, 627 aa, Homo sapiens
MELGGPGAPRLLPPLLLLLGTGLLRASSHVETRAHAEERLLKKLFSGYNKWSRPVANISDVVLVRFGLSIAQLIDVDEKNQMMTTNVWVKQEWHDYKLRWDPADYENVTSIRIPSELIWRPDIVLYNNADGDFAVTHLTKAHLFHDGRVQWTPPAIYKSSCSIDVTFFPFDQQNCTMKFGSWTYDKAKIDLVNMHSRVDQLDFWESGEWVIVDAVGTYNTRKYECCAEIYPDITYAFVIRRLPLFYTINLIIPCLLISCLTVLVFYLPSECGEKITLCISVLLSLTVFLLLITEIIPSTSLVIPLIGEYLLFTMIFVTLSIVITVFVLNVHHRSPRTHTMPTWVRRVFLDIVPRLLLMKRPSVVKDNCRRLIESMHKMASAPRFWPEPEGEPPATSGTQSLHPPSPSFCVPLDVPAEPGPSCKSPSDQLPPQQPLEAEKASPHPSPGPCRPPHGTQAPGLAKARSLSVQHMSSPGEAVEGGVRCRSRSIQYCVPRDDAAPEADGQAAGALASRNTHSAELPPPDQPSPCKCTCKKEPSSVSPSATVKTRSTKAPPPHLPLSPALTRAVEGVQYIADHLKAEDTDFSVKEDWKYVAMVIDRIFLWMFIIVCLLGTVGLFLPPWLAGMI

SEQ ID NO: 16036 - protein, 556 aa, Homo sapiens
MRMSPPSASPPSSSGGRTSSSTTTAGEPFWAGVLFAIRPHPGLSGRIVWTAGCPGEGADGDFAVTHLTKAHLFHDGRVQWTPPAIYKSSCSIDVTFFPFDQQNCTMKFGSWTYDKAKIDLVNMHSRVDQLDFWESGEWVIVDAVGTYNTRKYECCAEIYPDITYAFVIRRLPLFYTINLIIPCLLISCLTVLVFYLPSECGEKITLCISVLLSLTVFLLLITEIIPSTSLVIPLIGEYLLFTMIFVTLSIVITVFVLNVHHRSPRTHTMPTWVRRVFLDIVPRLLLMKRPSVVKDNCRRLIESMHKMASAPRFWPEPEGEPPATSGTQSLHPPSPSFCVPLDVPAEPGPSCKSPSDQLPPQQPLEAEKASPHPSPGPCRPPHGTQAPGLAKARSLSVQHMSSPGEAVEGGVRCRSRSIQYCVPRDDAAPEADGQAAGALASRNTHSAELPPPDQPSPCKCTCKKEPSSVSPSATVKTRSTKAPPPHLPLSPALTRAVEGVQYIADHLKAEDTDFSVKEDWKYVAMVIDRIFLWMFIIVCLLGTVGLFLPPWLAGMI

SEQ ID NO: 16037 - protein, 740 aa, Homo sapiens
MTHMLNAAADRVKWTRSSAAKRAACLVAAAYALKTLYPIIGKRLKQSGHGKKKAAAYPAAENTEILHCTETICEKPSPGVNADFFKQLLELRKILFPKLVTTETGWLCLHSVALISRTFLSIYVAGLDGKIVKSIVEKKPRTFIIKLIKWLMIAIPATFVNSAIRYLECKLALAFRTRLVDHAYETYFTNQTYYKVINMDGRLANPDQSLTEDIMMFSQSVAHLYSNLTKPILDVMLTSYTLIQTATSRGASPIGPTLLAGLVVYATAKVLKACSPKFGKLVAEEAHRKGYLRYVHSRIIANVEEIAFYRGHKVEMKQLQKSYKALADQMNLILSKRLWYIMIEQFLMKYVWSSSGLIMVAIPIITATGFADGEDGQKQVMVSERTEAFTTARNLLASGADAIERIMSSYKEVTELAGYTARVYNMFWVFDEVKRGIYKRTAVIQESESHSKNGAKVELPLSDTLAIKGKVIDVDHGIICENVPIITPAGEVVASRLNFKVEEGMHLLITGPNGCGKSSLFRILSGLWPVYEGVLYKPPPQHMFYIPQRPYMSLGSLRDQVIYPDSVDDMHDKGYTDQDLERILHNVHLYHIVQREGGWDAVMDWKDVLSGGEKQRMGMARMFYHKPKYALLDECTSAVSIDVEGKIFQAAKGAGISLLSITHRPSLWKYHTHLLQFDGEGGWRFEQLDTAIRLTLSEEKQKLESQLAGIPKMQQRLNELCKILGEDSVLKTIKNEDETS

SEQ ID NO: 16038 - protein, 155 aa, Homo sapiens
MGPGDFRRCRERISQGLQGLPGRAELWFPPRPACDFFGDGRSTDIQEEALAASPLLEDLRRRLTRAFQWAVQRAISRRVQEAAAAAAAREEQSWTGVEATLARLRAELVEMHFQNHQLARTLLDLNMKVQQLKKEYELEITSDSQSPKDDAANPE

SEQ ID NO: 16039 - protein, 326 aa, Homo sapiens
MASKVSCLYVLTVVCWASALWYLSITRPTSSYTGSKPFSHLTVARKNFTFGNIRTRPINPHSFEFLINEPNKCEKNIPFLVILISTTHKEFDARQAIRETWGDENNFKGIKIATLFLLGKNADPVLNQMVEQESQIFHDIIVEDFIDSYHNLTLKTLMGMRWVATFCSKAKYVMKTDSDIFVNMDNLIYKLLKPSTKPRRRYFTGYVINGGPIRDVRSKWYMPRDLYPDSNYPPFCSGTGYIFSADVAELIYKTSLHTRLLHLEDVYVGLCLRKLGIHPFQNSGFNHWKMAYSLCRYRRVITVHQISPEEMHRIWNDMSSKKHLRC

SEQ ID NO: 16040 - protein, 602 aa, Homo sapiens
MPYKLKKEKEPPKVAKCTAKPSSSGKDGGGENTEEAQPQPQPQPQPQAQSQPPSSNKRPSNSTPPPTQLSKIKYSGGPQIVKKERRQSSSRFNLSKNRELQKLPALKDSPTQEREELFIQKLRQCCVLFDFVSDPLSDLKFKEVKRAGLNEMVEYITHSRDVVTEAIYPEAVTMFSVNLFRTLPPSSNPTGAEFDPEEDEPTLEAAWPHLQLVYEFFLRFLESPDFQPNIAKKYIDQKFVLALLDLFDSEDPRERDFLKTILHRIYGKFLGLRAYIRRQINHIFYRFIYETEHHNGIAELLEILGSIINGFALPLKEEHKMFLIRVLLPLHKVKSLSVYHPQLAYCVVQFLEKESSLTEPVIVGLLKFWPKTHSPKEVMFLNELEEILDVIEPSEFSKVMEPLFRQLAKCVSSPHFQVAERALYYWNNEYIMSLISDNAARVLPIMFPALYRNSKSHWNKTIHGLIYNALKLFMEMNQKLFDDCTQQYKAEKQKGRFRMKEREEMWQKIEELARLNPQYPMFRAPPPLPPVYSMETETPTAEDIQLLKRTVETEAVQMLKDIKKEKVLLRRKSELPQDVYTIKALEAHKRAEEFLTASQEAL

SEQ ID NO: 16041 - protein, 570 aa, Homo sapiens
MPYKLKKEKEPPKVAKCTAKPSSSGKDGGGENTEEAQPQPQPQPQPQAQSQPPSSNKRPSNSTPPPTQLSKIKYSGGPQIVKKELFIQKLRQCCVLFDFVSDPLSDLKFKEVKRAGLNEMVEYITHSRDVVTEAIYPEAVTMFSVNLFRTLPPSSNPTGAEFDPEEDEPTLEAAWPHLQLVYEFFLRFLESPDFQPNIAKKYIDQKFVLALLDLFDSEDPRERDFLKTILHRIYGKFLGLRAYIRRQINHIFYRFIYETEHHNGIAELLEILGSIINGFALPLKEEHKMFLIRVLLPLHKVKSLSVYHPQLAYCVVQFLEKESSLTEPVIVGLLKFWPKTHSPKEVMFLNELEEILDVIEPSEFSKVMEPLFRQLAKCVSSPHFQVAERALYYWNNEYIMSLISDNAARVLPIMFPALYRNSKSHWNKTIHGLIYNALKLFMEMNQKLFDDCTQQYKAEKQKGRFRMKEREEMWQKIEELARLNPQYPMFRAPPPLPPVYSMETETPTAEDIQLLKRTVETEAVQMLKDIKKEKVLLRRKSELPQDVYTIKALEAHKRAEEFLTASQEAL

SEQ ID NO: 16042 - protein, 496 aa, Homo sapiens
MPYKLKKEKELFIQKLRQCCVLFDFVSDPLSDLKFKEVKRAGLNEMVEYITHSRDVVTEAIYPEAVTMFSVNLFRTLPPSSNPTGAEFDPEEDEPTLEAAWPHLQLVYEFFLRFLESPDFQPNIAKKYIDQKFVLALLDLFDSEDPRERDFLKTILHRIYGKFLGLRAYIRRQINHIFYRFIYETEHHNGIAELLEILGSIINGFALPLKEEHKMFLIRVLLPLHKVKSLSVYHPQLAYCVVQFLEKESSLTEPVIVGLLKFWPKTHSPKEVMFLNELEEILDVIEPSEFSKVMEPLFRQLAKCVSSPHFQVAERALYYWNNEYIMSLISDNAARVLPIMFPALYRNSKSHWNKTIHGLIYNALKLFMEMNQKLFDDCTQQYKAEKQKGRFRMKEREEMWQKIEELARLNPQYPMFRAPPPLPPVYSMETETPTAEDIQLLKRTVETEAVQMLKDIKKEKVLLRRKSELPQDVYTIKALEAHKRAEEFLTASQEAL

SEQ ID NO: 16043 - protein, 1474 aa, Homo sapiens
MGKNKLLHPSLVLLLLVLLPTDASVSGKPQYMVLVPSLLHTETTEKGCVLLSYLNETVTVSASLESVRGNRSLFTDLEAENDVLHCVAFAVPKSSSNEEVMFLTVQVKGPTQEFKKRTTVMVKNEDSLVFVQTDKSIYKPGQTVKFRVVSMDENFHPLNELIPLVYIQDPKGNRIAQWQSFQLEGGLKQFSFPLSSEPFQGSYKVVVQKKSGGRTEHPFTVEEFVLPKFEVQVTVPKIITILEEEMNVSVCGLYTYGKPVPGHVTVSICRKYSDASDCHGEDSQAFCEKFSGQLNSHGCFYQQVKTKVFQLKRKEYEMKLHTEAQIQEEGTVVELTGRQSSEITRTITKLSFVKVDSHFRQGIPFFGQVRLVDGKGVPIPNKVIFIRGNEANYYSNATTDEHGLVQFSINTTNVMGTSLTVRVNYKDRSPCYGYQWVSEEHEEAHHTAYLVFSPSKSFVHLEPMSHELPCGHTQTVQAHYILNGGTLLGLKKLSFYYLIMAKGGIVRTGTHGLLVKQEDMKGHFSISIPVKSDIAPVARLLIYAVLPTGDVIGDSAKYDVENCLANKVDLSFSPSQSLPASHAHLRVTAAPQSVCALRAVDQSVLLMKPDAELSASSVYNLLPEKDLTGFPGPLNDQDNEDCINRHNVYINGITYTPVSSTNEKDMYSFLEDMGLKAFTNSKIRKPKMCPQLQQYEMHGPEGLRVGFYESDVMGRGHARLVHVEEPHTETVRKYFPETWIWDLVVVNSAGVAEVGVTVPDTITEWKAGAFCLSEDAGLGISSTASLRAFQPFFVELTMPYSVIRGEAFTLKATVLNYLPKCIRVSVQLEASPAFLAVPVEKEQAPHCICANGRQTVSWAVTPKSLGNVNFTVSAEALESQELCGTEVPSVPEHGRKDTVIKPLLVEPEGLEKETTFNSLLCPSGGEVSEELSLKLPPNVVEESARASVSVLGDILGSAMQNTQNLLQMPYGCGEQNMVLFAPNIYVLDYLNETQQLTPEIKSKAIGYLNTGYQRQLNYKHYDGSYSTFGERYGRNQGNTWLTAFVLKTFAQARAYIFIDEAHITQALIWLSQRQKDNGCFRSSGSLLNNAIKGGVEDEVTLSAYITIALLEIPLTVTHPVVRNALFCLESAWKTAQEGDHGSHVYTKALLAYAFALAGNQDKRKEVLKSLNEEAVKKDNSVHWERPQKPKAPVGHFYEPQAPSAEVEMTSYVLLAYLTAQPAPTSEDLTSATNIVKWITKQQNAQGGFSSTQDTVVALHALSKYGAATFTRTGKAAQVTIQSSGTFSSKFQVDNNNRLLLQQVSLPELPGEYSMKVTGEGCVYLQTSLKYNILPEKEEFPFALGVQTLPQTCDEPKAHTSFQISLSVSYTGSRSASNMAIVDVKMVSGFIPLKPTVKMLERSNHVSRTEVSSNHVLIYLDKVSNQTLSLFFTVLQDVPVRDLKPAIVKVYDYYETDEFAIAEYNAPCSKDLGNA

SEQ ID NO: 16044 - protein, 140 aa, Homo sapiens
MTSMTQSLREVIKAMTKARNFERVLGKITLVSAAPGKVICEMKVEEEHTNAIGTLHGGLTATLVDNISTMALLCTERGAPGVSVDMNITYMSPAKLGEDIVITAHVLKQGKTLAFTSVDLTNKATGKLIAQGRHTKHLGN

SEQ ID NO: 16045 - protein, 117 aa, Homo sapiens
MVRKITLVSAAPGKVICEMKVEEEHTNAIGTLHGGLTATLVDNISTMALLCTERGAPGVSVDMNITYMSPAKLGEDIVITAHVLKQGKTLAFTSVDLTNKATGKLIAQGRHTKHLGN

SEQ ID NO: 16046 - protein, 178 aa, Homo sapiens
MDRAARCSGASSLPLLLALALGLVILHCVVADGNSTRSPETNGLLCGDPEENCAATTTQSKRKGHFSRCPKQYKHYCIKGRCRFVVAEQTPSCVCDEGYIGARCERVDLFYLRGDRGQILVICLIAVMVVFIILVIGVCTCCHPLRKRRKRKKKEEEMETLGKDITPINEDIEETNIA

SEQ ID NO: 16047 - protein, 549 aa, Homo sapiens
MSPTISHKDSSRQRRPGNFSHSLDMKSGPLPPGGWDDSHLDSAGREGDREALLGDTGTGDFLKAPQSFRAELSSILLLLFLYVLQGIPLGLAGSIPLILQSKNVSYTDQAFFSFVFWPFSLKLLWAPLVDAVYVKNFGRRKSWLVPTQYILGLFMIYLSTQVDRLLGNTDDRTPDVIALTVAFFLFEFLAATQDIAVDGWALTMLSRENVGYASTCNSVGQTAGYFLGNVLFLALESADFCNKYLRFQPQPRGIVTLSDFLFFWGTVFLITTTLVALLKKENEVSVVKEETQGITDTYKLLFAIIKMPAVLTFCLLILTAKIGFSAADAVTGLKLVEEGVPKEHLALLAVPMVPLQIILPLIISKYTAGPQPLNTFYKAMPYRLLLGLEYALLVWWTPKVEHQGGFPIYYYIVVLLSYALHQVTVYSMYVSIMAFNAKVSDPLIGGTYMTLLNTVSNLGGNWPSTVALWLVDPLTVKECVGASNQNCRTPDAVELCKKLGGSCVTALDGYYVESIICVFIGFGWWFFLGPKFKKLQDEGSSSWKCKRNN

SEQ ID NO: 16048 - protein, 282 aa, Homo sapiens
MASSFLPAGAITGDSGGELSSGDDSGEVEFPHSPEIEETSCLAELFEKAAAHLQGLIQVASREQLLYLYARYKQVKVGNCNTPKPSFFDFEGKQKWEAWKALGDSSPSQAMQEYIAVVKKLDPGWNPQIPEKKGKEANTGFGGPVISSLYHEETIREEDKNIFDYCRENNIDHITKAIKSKNVDVNVKDEEGRALLHWACDRGHKELVTVLLQHRADINCQDNEGQTALHYASACEFLDIVELLLQSGADPTLRDQDGCLPEEVTGCKTVSLVLQRHTTGKA

SEQ ID NO: 16049 - protein, 724 aa, Homo sapiens
MPRNSGAGYGCPHGDPSMLDSRETPQESRQDMIVRTTQEKLKTSSLTDRQPLSKESLNHALELSVPEKVNNAQWDAPEEALWTTRADGRVRLRIDPSCPQLPYTVHRMFYEALDKYGDLIALGFKRQDKWEHISYSQYYLLARRAAKGFLKLGLKQAHSVAILGFNSPEWFFSAVGTVFAGGIVTGIYTTSSPEACQYIAYDCCANVIMVDTQKQLEKILKIWKQLPHLKAVVIYKEPPPNKMANVYTMEEFMELGNEVPEEALDAIIDTQQPNQCCVLVYTSGTTGNPKGVMLSQDNITWTARYGSQAGDIRPAEVQQEVVVSYLPLSHIAAQIYDLWTGIQWGAQVCFAEPDALKGSLVNTLREVEPTSHMGVPRVWEKIMERIQEVAAQSGFIRRKMLLWAMSVTLEQNLTCPGSDLKPFTTRLADYLVLAKVRQALGFAKCQKNFYGAAPMMAETQHFFLGLNIRLYAGYGLSETSGPHFMSSPYNYRLYSSGKLVPGCRVKLVNQDAEGIGEICLWGRTIFMGYLNMEDKTCEAIDEEGWLHTGDAGRLDADGFLYITGRLKELIITAGGENVPPVPIEEAVKMELPIISNAMLIGDQRKFLSMLLTLKCTLDPDTSDQTDNLTEQAMEFCQRVGSRATTVSEIIEKKDEAVYQAIEEGIRRVNMNAAARPYHIQKWAILERDFSISGGELGPTMKLKRLTVLEKYKGIIDSFYQEQKM

SEQ ID NO: 16050 - protein, 709 aa, Homo sapiens
MATCAEILRSEFPEIDGQVFDYVTGVLHSGSADFESVDDLVEAVGELLQEVSGDSKDDAGIRAVCQRMYNTLRLAEPQSQGNSQVLLDAPIQLSKITENYDCGTKLPGLLKREQSSTVNAKKLEKAEARLKAKQEKRSEKDTLKTSNPLVLEEASASQAGSRKESRLESSGKNKSYDVRIENFDVSFGDRVLLAGADVNLAWGRRYGLVGRNGLGKTTLLKMLATRSLRVPAHISLLHVEQEVAGDDTPALQSVLESDSVREDLLRRERELTAQIAAGRAEGSEAAELAEIYAKLEEIEADKAPARASVILAGLGFTPKMQQQPTREFSGGWRMRLALARALFARPDLLLLDEPTNMLDVRAILWLENYLQTWPSTILVVSHDRNFLNAIATDIIHLHSQRLDGYRGDFETFIKSKQERLLNQQREYEAQQQYRQHIQVFIDRFRYNANRASQVQSKLKMLEKLPELKPVDKESEVVMKFPDGFEKFSPPILQLDEVDFYYDPKHVIFSRLSVSADLESRICVVGENGAGKSTMLKLLLGDLAPVRGIRHAHRNLKIGYFSQHHVEQLDLNVSAVELLARKFPGRPEEEYRHQLGRYGISGELAMRPLASLSGGQKSRVAFAQMTMPCPNFYILDEPTNHLDMETIEALGRALNNFRGGVILVSHDERFIRLVCRELWVCEGGGVTRVEGGFDQYRALLQEQFRREGFL

SEQ ID NO: 16051 - protein, 703 aa, Homo sapiens
MATCAEILRSEFPEIDGQVFDYVTGVLHSGSADFESVDDLVEAVGELLQEVSGDSKDDAGIRAVCQRMAEPQSQGNSQVLLDAPIQLSKITENYDCGTKLPGLLKREQSSTVNAKKLEKAEARLKAKQEKRSEKDTLKTSNPLVLEEASASQAGSRKESRLESSGKNKSYDVRIENFDVSFGDRVLLAGADVNLAWGRRYGLVGRNGLGKTTLLKMLATRSLRVPAHISLLHVEQEVAGDDTPALQSVLESDSVREDLLRRERELTAQIAAGRAEGSEAAELAEIYAKLEEIEADKAPARASVILAGLGFTPKMQQQPTREFSGGWRMRLALARALFARPDLLLLDEPTNMLDVRAILWLENYLQTWPSTILVVSHDRNFLNAIATDIIHLHSQRLDGYRGDFETFIKSKQERLLNQQREYEAQQQYRQHIQVFIDRFRYNANRASQVQSKLKMLEKLPELKPVDKESEVVMKFPDGFEKFSPPILQLDEVDFYYDPKHVIFSRLSVSADLESRICVVGENGAGKSTMLKLLLGDLAPVRGIRHAHRNLKIGYFSQHHVEQLDLNVSAVELLARKFPGRPEEEYRHQLGRYGISGELAMRPLASLSGGQKSRVAFAQMTMPCPNFYILDEPTNHLDMETIEALGRALNNFRGGVILVSHDERFIRLVCRELWVCEGGGVTRVEGGFDQYRALLQEQFRREGFL

SEQ ID NO: 16052 - protein, 415 aa, Homo sapiens
MQMSYAIRCAFYQLLLAALMLVAMLQLLYLSLLSGLHGQEEQDQYFEFFPPSPRSVDQVKAQLRTALASGGVLDASGDYRVYRGLLKTTMDPNDVILATHASVDNLLHLSGLLERWEGPLSVSVFAATKEEAQLATVLAYALSSHCPDMRARVAMHLVCPSRYEAAVPDPREPGEFALLRSCQEVFDKLARVAQPGINYALGTNVSYPNNLLRNLAREGANYALVIDVDMVPSEGLWRGLREMLDQSNQWGGTALVVPAFEIRRARRMPMNKNELVQLYQVGEVRPFYYGLCTPCQAPTNYSRWVNLPEESLLRPAYVVPWQDPWEPFYVAGGKVPTFDERFRQYGFNRISQACELHVAGFDFEVLNEGFLVHKGFKEALKFHPQKEAENQHNKILYRQFKQELKAKYPNSPRRC

SEQ ID NO: 16053 - protein, 601 aa, Homo sapiens
MAGASELGTGPGAAGGDGDDSLYPIAVLIDELRNEDVQLRLNSIKKLSTIALALGVERTRSELLPFLTDTIYDEDEVLLALAEQLGNFTGLVGGPDFAHCLLPPLENLATVEETVVRDKAVESLRQISQEHTPVALEAYFVPLVKRLASGDWFTSRTSACGLFSVCYPRASNAVKAEIRQQFRSLCSDDTPMVRRAAASKLGEFAKVLELDSVKSEIVPLFTSLASDEQDSVRLLAVEACVSIAQLLSQDDLETLVMPTLRQAAEDKSWRVRYMVADRFSELQKAMGPKITLNDLIPAFQNLLKDCEAEVRAAAAHKVKELGENLPIEDRETIIMNQILPYIKELVSDTNQHVKSALASVIMGLSTILGKENTIEHLLPLFLAQLKDECPDVRLNIISNLDCVNEVIGIRQLSQSLLPAIVELAEDAKWRVRLAIIEYMPLLAGQLGVEFFDEKLNSLCMAWLVDHVYAIREAATNNLMKLVQKFGTEWAQNTIVPKVLVMANDPNYLHRMTTLFCINALSEACGQEITTKQMLPIVLKMAGDQVANVRFNVAKSLQKIGPILDTNALQGEVKPVLQKLGQDEDMDVKYFAQEAISVLALA

SEQ ID NO: 16054 - protein, 667 aa, Homo sapiens
MAGASELGTGPGAAGGDGDDSLYPIAVLIDELRNEDVQLRLNSIKKLSTIALALGVERTRSELLPFLTDTIYDEDEVLLALAEQLGNFTGLVGGPDFAHCLLPPLENLATVEETVVRDKAVESLRQISQEHTPVALEAYFVPLVKRLASGDWFTSRTSACGLFSVCYPRASNAVKAEIRQQFRSLCSDDTPMVRRAAASKLGEFAKVLELDSVKSEIVPLFTSLASDEQDSVRLLAVEACVSIAQLLSQDDLETLVMPTLRQAAEDKSWRVRYMVADRFSELQKAMGPKITLNDLIPAFQNLLKDCEAEVRAAAAHKVKELGENLPIEDRETIIMNQILPYIKELVSDTNQHVKSALASVIMGLSTILGKENTIEHLLPLFLAQLKDECPDVRLNIISNLDCVNEVIGIRQLSQSLLPAIVELAEDAKWRVRLAIIEYMPLLAGQLGVEFFDEKLNSLCMAWLVDHVYAIREAATNNLMKLVQKFGTEWAQNTIVPKVLVMANDPNYLHRMTTLFCINALSEACGQEITTKQMLPIVLKMAGDQVANVRFNVAKSLQKIGPILDTNALQGEVKPVLQKLGQDEDMDVKYFAQEAISVVAQRLRKLEFPVKDSGEPSVPRADKNHFPRPTVPGEDMGKGPVYQLRGDTRDTLAQLGIAELVHFSQSTD

SEQ ID NO: 16055 - protein, 603 aa, Homo sapiens
MAGASELGTGPGAAGGDGDDSLYPIAVLIDELRNEDVQPPLENLATVEETVVRDKAVESLRQISQEHTPVALEAYFVPLVKRLASGDWFTSRTSACGLFSVCYPRASNAVKAEIRQQFRSLCSDDTPMVRRAAASKLGEFAKVLELDSVKSEIVPLFTSLASDEQDSVRLLAVEACVSIAQLLSQDDLETLVMPTLRQAAEDKSWRVRYMVADRFSELQKAMGPKITLNDLIPAFQNLLKDCEAEVRAAAAHKVKELGENLPIEDRETIIMNQILPYIKELVSDTNQHVKSALASVIMGLSTILGKENTIEHLLPLFLAQLKDECPDVRLNIISNLDCVNEVIGIRQLSQSLLPAIVELAEDAKWRVRLAIIEYMPLLAGQLGVEFFDEKLNSLCMAWLVDHVYAIREAATNNLMKLVQKFGTEWAQNTIVPKVLVMANDPNYLHRMTTLFCINALSEACGQEITTKQMLPIVLKMAGDQVANVRFNVAKSLQKIGPILDTNALQGEVKPVLQKLGQDEDMDVKYFAQEAISVVAQRLRKLEFPVKDSGEPSVPRADKNHFPRPTVPGEDMGKGPVYQLRGDTRDTLAQLGIAELVHFSQSTD

SEQ ID NO: 16056 - protein, 556 aa, Homo sapiens
MAGASELGTGPGAAGGDGDDSLYPIAVLIDELRNEDVQLRLNSIKKLSTIALALGVERTRSELLPFLTDTIYDEDEVLLALAEQLGNFTGLVGGPDFAHCLLPPLENLATVEETVVRDKAVESLRQISQEHTPVALEAYFVPLVKRLASGDWFTSRTSACGLFSVCYPRASNAVKAEIRQQFRSLCSDDTPMVRRAAASKLGEFAKVLELDSVKSEIVPLFTSLASDEQDSVRLLAVEACVSIAQLLSQDDLETLVMPTLRQAAEDKSWRVRYMVADRFSELQKAMGPKITLNDLIPAFQNLLKDCEAEVRAAAAHKVKELGENLPIEDRETIIMNQILPYIKCPDVRLNIISNLDCVNEVIGIRQLSQSLLPAIVELAEDAKWRVRLAIIEYMPLLAGQLGVEFFDEKLNSLCMAWLVDHVYAIREAATNNLMKLVQKFGTEWAQNTIVPKVLVMANDPNYLHRMTTLFCINALSEACGQEITTKQMLPIVLKMAGDQVANVRFNVAKSLQKIGPILDTNALQGEVKPVLQKLGQDEDMDVKYFAQEAISVLALA

SEQ ID NO: 16057 - protein, 474 aa, Homo sapiens
MAGASELGTGPGAAGGDGDDSLYPIAVLIDELRNEDVQLRLNSIKKLSTIALALGVERTRSELLPFLTDTIYDEDEVLLALAEQLGNFTGLVGGPDFAHCLLDSVRLLAVEACVSIAQLLSQDDLETLVMPTLRQAAEDKSWRVRYMVADRFSELQKAMGPKITLNDLIPAFQNLLKDCEAEVRAAAAHKVKELGENLPIEDRETIIMNQILPYIKELVSDTNQHVKSALASVIMGLSTILGKENTIEHLLPLFLAQLKDECPDVRLNIISNLDCVNEVIGIRQLSQSLLPAIVELAEDAKWRVRLAIIEYMPLLAGQLGVEFFDEKLNSLCMAWLVDHVYAIREAATNNLMKLVQKFGTEWAQNTIVPKVLVMANDPNYLHRMTTLFCINALSEACGQEITTKQMLPIVLKMAGDQVANVRFNVAKSLQKIGPILDTNALQGEVKPVLQKLGQDEDMDVKYFAQEAISVLALA

SEQ ID NO: 16058 - protein, 597 aa, Homo sapiens
MGKKHKKHKAEWRSSYEDYADKPLEKPLKLVLKVGGSEVTELSGSGHDSSYYDDRSDHERERHKEKKKKKKKKSEKEKHLDDEERRKRKEEKKRKREREHCDTEGEADDFDPGKKVEVEPPPDRPVRACRTQPAENESTPIQQLLEHFLRQLQRKDPHGFFAFPVTDAIAPGYSMIIKHPMDFGTMKDKIVANEYKSVTEFKADFKLMCDNAMTYNRPDTVYYKLAKKILHAGFKMMSKQAALLGNEDTAVEEPVPEVVPVQVETAKKSKKPSREVISCMFEPEGNACSLTDSTAEEHVLALVEHAADEARDRINRFLPGGKMGYLKRNGDGSLLYSVVNTAEPDADEEETHPVDLSSLSSKLLPGFTTLGFKDERRNKVTFLSSATTALSMQNNSVFGDLKSDEMELLYSAYGDETGVQCALSLQEFVKDAGSYSKKVVDDLLDQITGGDHSRTLFQLKQRRNVPMKPPDEAKVGDTLGDSSSSVLEFMSMKSYPDVSVDISMLSSLGKVKKELDPDDSHLNLDETTKLLQDLHEAQAERGGSRPSSNLSSLSNASERDQHHLGSPSRLSVGEQPDVTHDPYEFLQSPEPAASAKT

SEQ ID NO: 16059 - protein, 206 aa, Homo sapiens
MQNNSVFGDLKSDEMELLYSAYGDETGVQCALSLQEFVKDAGSYSKKVVDDLLDQITGGDHSRTLFQLKQRRNVPMKPPDEAKVGDTLGDSSSSVLEFMSMKSYPDVSVDISMLSSLGKVKKELDPDDSHLNLDETTKLLQDLHEAQAERGGSRPSSNLSSLSNASERDQHHLGSPSRLSVGEQPDVTHDPYEFLQSPEPAASAKT

SEQ ID NO: 16060 - protein, 481 aa, Homo sapiens
MKGYQSLVFNFFFLKLSAENESTPIQQLLEHFLRQLQRKDPHGFFAFPVTDAIAPGYSMIIKHPMDFGTMKDKIVANEYKSVTEFKADFKLMCDNAMTYNRPDTVYYKLAKKILHAGFKMMSKQAALLGNEDTAVEEPVPEVVPVQVETAKKSKKPSREVISCMFEPEGNACSLTDSTAEEHVLALVEHAADEARDRINRFLPGGKMGYLKRNGDGSLLYSVVNTAEPDADEEETHPVDLSSLSSKLLPGFTTLGFKDERRNKVTFLSSATTALSMQNNSVFGDLKSDEMELLYSAYGDETGVQCALSLQEFVKDAGSYSKKVVDDLLDQITGGDHSRTLFQLKQRRNVPMKPPDEAKVGDTLGDSSSSVLEFMSMKSYPDVSVDISMLSSLGKVKKELDPDDSHLNLDETTKLLQDLHEAQAERGGSRPSSNLSSLSNASERDQHHLGSPSRLSVGEQPDVTHDPYEFLQSPEPAASAKT

SEQ ID NO: 16061 - protein, 233 aa, Homo sapiens
MKGYQSLVFNFFFLKLSAENESTPIQQLLEHFLRQLQRKDPHGFFAFPVTDAIAPGYSMIIKHPMDFGTMKDKIVANEYKSVTEFKADFKLMCDNAMTYNRPDTVYYKLAKKILHAGFKMMSKQAALLGNEDTAVEEPVPEVVPVQVETAKKSKKPSREVISCMFEPEGNACSLTDSTAEEHVLALVEHAADEARDRINRFLPGGKVVLCGHRERVPRGPRLSVCLSFWVGAV

SEQ ID NO: 16062 - protein, 501 aa, Homo sapiens
MKGYQSLVFNFFFLKLSAENESTPIQQLLEHFLRQLQRKDPHGFFAFPVTDAIAPGYSMIIKHPMDFGTMKDKIVANEYKSVTEFKADFKLMCDNAMTYNRPDTVYYKLAKKILHAGFKMMSKERLLALKRSMSFMQDMDFSQQAALLGNEDTAVEEPVPEVVPVQVETAKKSKKPSREVISCMFEPEGNACSLTDSTAEEHVLALVEHAADEARDRINRFLPGGKMGYLKRNGDGSLLYSVVNTAEPDADEEETHPVDLSSLSSKLLPGFTTLGFKDERRNKVTFLSSATTALSMQNNSVFGDLKSDEMELLYSAYGDETGVQCALSLQEFVKDAGSYSKKVVDDLLDQITGGDHSRTLFQLKQRRNVPMKPPDEAKVGDTLGDSSSSVLEFMSMKSYPDVSVDISMLSSLGKVKKELDPDDSHLNLDETTKLLQDLHEAQAERGGSRPSSNLSSLSNASERDQHHLGSPSRLSVGEQPDVTHDPYEFLQSPEPAASAKT

SEQ ID NO: 16063 - protein, 544 aa, Homo sapiens
MMTGQTMSERGTKKRKRRRRRSPRRRSIWTMRKEGSERKRRSGSERGSTVTRRERLTTLILGRRWRWSRPQIGQSERAGHSQPKMRAHLFSNSWNTSSASFRDPHGFFAFPVTDAIAPGYSMIIKHPMDFGTMKDKIVANEYKSVTEFKADFKLMCDNAMTYNRPDTVYYKLAKKILHAGFKMMSKQAALLGNEDTAVEEPVPEVVPVQVETAKKSKKPSREVISCMFEPEGNACSLTDSTAEEHVLALVEHAADEARDRINRFLPGGKMGYLKRNGDGSLLYSVVNTAEPDADEEETHPVDLSSLSSKLLPGFTTLGFKDERRNKVTFLSSATTALSMQNNSVFGDLKSDEMELLYSAYGDETGVQCALSLQEFVKDAGSYSKKVVDDLLDQITGGDHSRTLFQLKQRRNVPMKPPDEAKVGDTLGDSSSSVLEFMSMKSYPDVSVDISMLSSLGKVKKELDPDDSHLNLDETTKLLQDLHEAQAERGGSRPSSNLSSLSNASERDQHHLGSPSRLSVGEQPDVTHDPYEFLQSPEPAASAKT

SEQ ID NO: 16064 - protein, 447 aa, Homo sapiens
MAGAGGGNDIQWCFSQVKGAVDDDVAEADIISTVEFNHSGELLATGDKGGRVVIFQQEQENKIQSHSRGEYNVYSTFQSHEPEFDYLKSLEIEEKINKIRWLPQKNAAQFLLSTNDKTIKLWKISERDKRPEGYNLKEEDGRYRDPTTVTTLRVPVFRPMDLMVEASPRRIFANAHTYHINSISINSDYETYLSADDLRINLWHLEITDRSFNIVDIKPANMEELTEVITAAEFHPNSCNTFVYSSSKGTIRLCDMRASALCDRHSKLFEEPEDPSNRSFFSEIISSISDVKFSHSGRYMMTRDYLSVKIWDLNMENRPVETYQVHEYLRSKLCSLYENDCIFDKFECCWNGSDSVVMTGSYNNFFRMFDRNTKRDITLEASRENNKPRTVLKPRKVCASGKRKKDEISVDSLDFNKKILHTAWHPKENIIAVATTNNLYIFQDKVN

SEQ ID NO: 16065 - protein, 457 aa, Homo sapiens
MFPKFSLRSMFHGAGGGNDIQWCFSQVKGAVDDDVAEADIISTVEFNHSGELLATGDKGGRVVIFQQEQENKIQSHSRGEYNVYSTFQSHEPEFDYLKSLEIEEKINKIRWLPQKNAAQFLLSTNDKTIKLWKISERDKRPEGYNLKEEDGRYRDPTTVTTLRVPVFRPMDLMVEASPRRIFANAHTYHINSISINSDYETYLSADDLRINLWHLEITDRSFNIVDIKPANMEELTEVITAAEFHPNSCNTFVYSSSKGTIRLCDMRASALCDRHSKLFEEPEDPSNRSFFSEIISSISDVKFSHSGRYMMTRDYLSVKIWDLNMENRPVETYQVHEYLRSKLCSLYENDCIFDKFECCWNGSDSVVMTGSYNNFFRMFDRNTKRDITLEASRENNKPRTVLKPRKVCASGKRKKDEISVDSLDFNKKILHTAWHPKENIIAVATTNNLYIFQDKVN

SEQ ID NO: 16066 - protein, 655 aa, Homo sapiens
MSSSNVEVFIPVSQGNTNGFPATASNDLKAFTEGAVLSFHNICYRVKLKSGFLPCRKPVEKEILSNINGIMKPGLNAILGPTGGGKSSLLDVLAARKDPSGLSGDVLINGAPRPANFKCNSGYVVQDDVVMGTLTVRENLQFSAALRLATTMTNHEKNERINRVIQELGLDKVADSKVGTQFIRGVSGGERKRTSIGMELITDPSILFLDEPTTGLDSSTANAVLLLLKRMSKQGRTIIFSIHQPRYSIFKLFDSLTLLASGRLMFHGPAQEALGYFESAGYHCEAYNNPADFFLDIINGDSTAVALNREEDFKATEIIEPSKQDKPLIEKLAEIYVNSSFYKETKAELHQLSGGEKKKKITVFKEISYTTSFCHQLRWVSKRSFKNLLGNPQASIAQIIVTVVLGLVIGAIYFGLKNDSTGIQNRAGVLFFLTTNQCFSSVSAVELFVVEKKLFIHEYISGYYRVSSYFLGKLLSDLLPMRMLPSIIFTCIVYFMLGLKPKADAFFVMMFTLMMVAYSASSMALAIAAGQSVVSVATLLMTICFVFMMIFSGLLVNLTTIASWLSWLQYFSIPRYGFTALQHNEFLGQNFCPGLNATGNNPCNYATCTGEEYLVKQGIDLSPWGLWKNHVALACMIVIFLTIAYLKLLFLKKYS

SEQ ID NO: 16067 - protein, 611 aa, Homo sapiens
MSSSNVEVFIPVSQGNTNGFPATASNDLKAFTEGAVLSFHNICYRVKLKSGFLPCRKPVEKEILSNINGIMKPGLNAILGPTGGGKSSLLDVLAARKDPSGLSGDVLINGAPRPANFKCNSGYVVQDDVVMGTLTVRENLQFSAALRLATTMTNHEKNERINRVIQELGLDKVADSKVGTQFIRGVSGGERKRTSIGMELITDPSILFLDEPTTGLDSSTANAVLLLLKRMSKQGRTIIFSIHQPRYSIFKLFDSLTLLASGRLMFHGPAQEALGYFESAGYHCEAYNNPADFFLDIINGDSTAVALNREEDFKATEIIEPSKQDKPLIEKLAEIYVNSSFYKETKAELHQLSGGEKKKKITVFKEISYTTSFCHQLRWVSKRSFKNLLGNPQASIAQIIVTVVLGLVIGAIYFGLKNDSTGIQNRAGVLFFLTTNQCFSSVSAVELFVVEKKLFIHEYISGYYRVSSYFLGKLLSDLLPMRMLPSIIFTCIVYFMLGLKPKADAFFVMMFTLMMVAYSASSMALAIAAGQSVVSVATLLMTICFVFMMVCWSISQPLHLGCHGFSTSAFHDMDLRLCSIMNFWDKTSAQDSMQQETILVTMQHVLAKNIW

SEQ ID NO: 16068 - protein, 340 aa, Homo sapiens
MALKEGLRAWKRIFWRQILLTLGLLGLFLYGLPKFRHLEALIPMGVCPSATMSQLRDNFTGALRPWARPEVLTCTPWGAPIIWDGSFDPDVAKQEARQQNLTIGLTIFAVGRYLEKYLERFLETAEQHFMAGQSVMYYVFTELPGAVPRVALGPGRRLPVERVARERRWQDVSMARMRTLHAALGGLPGREAHFMFCMDVDQHFSGTFGPEALAESVAQLHSWHYHWPSWLLPFERDAHSAAAMAWGQGDFYNHAAVFGGSVAALRGLTAHCAGGLDWDRARGLEARWHDESHLNKFFWLHKPAKVLSPEFCWSPDIGPRAEIRRPRLLWAPKGYRLLRN

SEQ ID NO: 16069 - protein, 398 aa, Homo sapiens
MRLREPLLSGSAAMPGASLQRACRLLVAVCALHLGVTLVYYLAGRDLSRLPQLVGVSTPLQGGSNSAAAIGQSSGELRTGGARPPPPLGASSQPRPGGDSSPVVDSGPGPASNLTSVPVPHTTALSLPACPEESPLLVGPMLIEFNMPVDLELVAKQNPNVKMGGRYAPRDCVSPHKVAIIIPFRNRQEHLKYWLYYLHPVLQRQQLDYGIYVINQAGDTIFNRAKLLNVGFQEALKDYDYTCFVFSDVDLIPMNDHNAYRCFSQPRHISVAMDKFGFSLPYVQYFGGVSALSKQQFLTINGFPNNYWGWGGEDDDIFNRLVFRGMSISRPNAVVGRCRMIRHSRDKKNEPNPQRFDRIAHTKETMLSDGLNSLTYQVLDVQRYPLYTQITVDIGTPS

SEQ ID NO: 16070 - protein, 385 aa, Homo sapiens
MPGASLQRACRLLVAVCALHLGVTLVYYLAGRDLSRLPQLVGVSTPLQGGSNSAAAIGQSSGELRTGGARPPPPLGASSQPRPGGDSSPVVDSGPGPASNLTSVPVPHTTALSLPACPEESPLLVGPMLIEFNMPVDLELVAKQNPNVKMGGRYAPRDCVSPHKVAIIIPFRNRQEHLKYWLYYLHPVLQRQQLDYGIYVINQAGDTIFNRAKLLNVGFQEALKDYDYTCFVFSDVDLIPMNDHNAYRCFSQPRHISVAMDKFGFSLPYVQYFGGVSALSKQQFLTINGFPNNYWGWGGEDDDIFNRLVFRGMSISRPNAVVGRCRMIRHSRDKKNEPNPQRFDRIAHTKETMLSDGLNSLTYQVLDVQRYPLYTQITVDIGTPS

SEQ ID NO: 16071 - protein, 778 aa, Homo sapiens
MPAFLGLKCLGKLCSSEKSKVTSSERTSARGSNRKRLIVEDRRVSGTSFTAHRRATITHLLYLCPKDYCPRGRVCNSVDPFVAHPQDPHHPSEKPVIHCHKCGEPCKGEVLRVQTKHFHIKCFTCKVCGCDLAQGGFFIKNGEYLCTLDYQRMYGTRCHGCGEFVEGEVVTALGKTYHPNCFACTICKRPFPPGDRVTFNGRDCLCQLCAQPMSSSPKETTFSSNCAGCGRDIKNGQALLALDKQWHLGCFKCKSCGKVLTGEYISKDGAPYCEKDYQGLFGVKCEACHQFITGKVLEAGDKHYHPSCARCSRCNQMFTEGEEMYLQGSTVWHPDCKQSTKTEEKLRPTRTSSESIYSRPGSSIPGSPGHTIYAKVDNEILDYKDLAAIPKVKAIYDIERPDLITYEPFYTSGYDDKQERQSLGESPRTLSPTPSAEGYQDVRDRMIHRSTSQGSINSPVYSRHSYTPTTSRSPQHFHRPGNEPSSGRNSPLPYRPDSRPLTPTYAQAPKHFHVPDQGINIYRKPPIYKQHAALAAQSKSSEDIIKFSKFPAAQAPDPSETPKIETDHWPGPPSFAVVGPDMKRRSSGREEDDEELLRRRQLQEEQLMKLNSGLGQLILKEEMEKESRERSSLLASRYDSPINSASHIPSSKTASLPGYGRNGLHRPVSTDFAQYNSYGDVSGGVRDYQTLPDGHMPAMRMDRGVSMPNMLEPKIFPYEMLMVTNRGRNKILREVDRTRLERHLAPEVFREIFGMSIQEFDRLPLWRRNDMKKKAKLF

SEQ ID NO: 16072 - protein, 718 aa, Homo sapiens
MLMTLEMTELTDPHHTMGDYKVAHPQDPHHPSEKPVIHCHKCGEPCKGEVLRVQTKHFHIKCFTCKVCGCDLAQGGFFIKNGEYLCTLDYQRMYGTRCHGCGEFVEGEVVTALGKTYHPNCFACTICKRPFPPGDRVTFNGRDCLCQLCAQPMSSSPKETTFSSNCAGCGRDIKNGQALLALDKQWHLGCFKCKSCGKVLTGEYISKDGAPYCEKDYQGLFGVKCEACHQFITGKVLEAGDKHYHPSCARCSRCNQMFTEGEEMYLQGSTVWHPDCKQSTKTEEKLRPTRTSSESIYSRPGSSIPGSPGHTIYAKVDNEILDYKDLAAIPKVKAIYDIERPDLITYEPFYTSGYDDKQERQSLGESPRTLSPTPSAEGYQDVRDRMIHRSTSQGSINSPVYSRHSYTPTTSRSPQHFHRPGNEPSSGRNSPLPYRPDSRPLTPTYAQAPKHFHVPDQGINIYRKPPIYKQHAALAAQSKSSEDIIKFSKFPAAQAPDPSETPKIETDHWPGPPSFAVVGPDMKRRSSGREEDDEELLRRRQLQEEQLMKLNSGLGQLILKEEMEKESRERSSLLASRYDSPINSASHIPSSKTASLPGYGRNGLHRPVSTDFAQYNSYGDVSGGVRDYQTLPDGHMPAMRMDRGVSMPNMLEPKIFPYEMLMVTNRGRNKILREVDRTRLERHLAPEVFREIFGMSIQEFDRLPLWRRNDMKKKAKLF

SEQ ID NO: 16073 - protein, 427 aa, Homo sapiens
MFTEGEEMYLQGSTVWHPDCKQSTKTEEKLRPTRTSSESIYSRPGSSIPGSPGHTIYAKVDNEILDYKDLAAIPKVKAIYDIERPDLITYEPFYTSGYDDKQERQSLGESPRTLSPTPSAEGYQDVRDRMIHRSTSQGSINSPVYSRHSYTPTTSRSPQHFHRPDQGINIYRKPPIYKQHAALAAQSKSSEDIIKFSKFPAAQAPDPSETPKIETDHWPGPPSFAVVGPDMKRRSSGREEDDEELLRRRQLQEEQLMKLNSGLGQLILKEEMEKESRERSSLLASRYDSPINSASHIPSSKTASLPGYGRNGLHRPVSTDFAQYNSYGDVSGGVRDYQTLPDGHMPAMRMDRGVSMPNMLEPKIFPYEMLMVTNRGRNKILREVDRTRLERHLAPEVFREIFGMSIQEFDRLPLWRRNDMKKKAKLF

SEQ ID NO: 16074 - protein, 401 aa, Homo sapiens
MFTEGEEMYLQGSTVWHPDCKQSTKTEEKLRAKVDNEILDYKDLAAIPKVKAIYDIERPDLITYEPFYTSGYDDKQERQSLGESPRTLSPTPSAEGYQDVRDRMIHRSTSQGSINSPVYSRHSYTPTTSRSPQHFHRPDQGINIYRKPPIYKQHAALAAQSKSSEDIIKFSKFPAAQAPDPSETPKIETDHWPGPPSFAVVGPDMKRRSSGREEDDEELLRRRQLQEEQLMKLNSGLGQLILKEEMEKESRERSSLLASRYDSPINSASHIPSSKTASLPGYGRNGLHRPVSTDFAQYNSYGDVSGGVRDYQTLPDGHMPAMRMDRGVSMPNMLEPKIFPYEMLMVTNRGRNKILREVDRTRLERHLAPEVFREIFGMSIQEFDRLPLWRRNDMKKKAKLF

SEQ ID NO: 16075 - protein, 455 aa, Homo sapiens
MFTEGEEMYLQGSTVWHPDCKQSTKTEEKLRLPNIRRSSSDFFYSKSLIRRTGRSPSLQPTRTSSESIYSRPGSSIPGSPGHTIYAKVDNEILDYKDLAAIPKVKAIYDIERPDLITYEPFYTSGYDDKQERQSLGESPRTLSPTPSAEGYQDVRDRMIHRSTSQGSINSPVYSRHSYTPTTSRSPQHFHRPDQGINIYRKPPIYKQHAALAAQSKSSEDIIKFSKFPAAQAPDPSETPKIETDHWPGPPSFAVVGPDMKRRSSGREEDDEELLRRRQLQEEQLMKLNSGLGQLILKEEMEKESRERSSLLASRYDSPINSASHIPSSKTASLPGYGRNGLHRPVSTDFAQYNSYGDVSGGVRDYQTLPDGHMPAMRMDRGVSMPNMLEPKIFPYEMLMVTNRGRNKILREVDRTRLERHLAPEVFREIFGMSIQEFDRLPLWRRNDMKKKAKLF

SEQ ID NO: 16076 - protein, 748 aa, Homo sapiens
MLMTLEMTELTDPHHTMGDYKVAHPQDPHHPSEKPVIHCHKCGEPCKGEVLRVQTKHFHIKCFTCKVCGCDLAQGGFFIKNGEYLCTLDYQRMYGTRCHGCGEFVEGEVVTALGKTYHPNCFACTICKRPFPPGDRVTFNGRDCLCQLCAQPMSSSPKETTFSSNCAGCGRDIKNGQALLALDKQWHLGCFKCKSCGKVLTGEYISKDGAPYCEKDYQGLFGVKCEACHQFITGKVLEAGDKHYHPSCARCSRCNQMFTEGEEMYLQGSTVWHPDCKQSTKTEEKLRLPNIRRSSSDFFYSKSLIRRTGRSPSLQPTRTSSESIYSRPGSSIPGSPGHTIYAKVDNEILDYKDLAAIPKVKAIYDIERPDLITYEPFYTSGYDDKQERQSLGESPRTLSPTPSAEGYQDVRDRMIHRSTSQGSINSPVYSRHSYTPTTSRSPQHFHRPGNEPSSGRNSPLPYRPDSRPLTPTYAQAPKHFHVPDQGINIYRKPPIYKQHDAAALAAQSKSSEDIIKFSKFPAAQAPDPSETPKIETDHWPGPPSFAVVGPDMKRRSSGREEDDEELLRRRQLQEEQLMKLNSGLGQLILKEEMEKESRERSSLLASRYDSPINSASHIPSSKTASLPGYGRNGLHRPVSTDFAQYNSYGDVSGGVRDYQTLPDGHMPAMRMDRGVSMPNMLEPKIFPYEMLMVTNRGRNKILREVDRTRLERHLAPEVFREIFGMSIQEFDRLPLWRRNDMKKKAKLF

SEQ ID NO: 16077 - protein, 482 aa, Homo sapiens
MEPWPLLLLFSLCSAGLVLGSEHETRLVAKLFKDYSSVVRPVEDHRQVVEVTVGLQLIQLINVDEVNQIVTTNVRLKQGDMVDLPRPSCVTLGVPLFSHLQNEQWVDYNLKWNPDDYGGVKKIHIPSEKIWRPDLVLYNNADGDFAIVKFTKVLLQYTGHITWTPPAIFKSYCEIIVTHFPFDEQNCSMKLGTWTYDGSVVAINPESDQPDLSNFMESGEWVIKESRGWKHSVTYSCCPDTPYLDITYHFVMQRLPLYFIVNVIIPCLLFSFLTGLVFYLPTDSGEKMTLSISVLLSLTVFLLVIVELIPSTSSAVPLIGKYMLFTMVFVIASIIITVIVINTHHRSPSTHVMPNWVRKVFIDTIPNIMFFSTMKRPSREKQDKKIFTEDIDISDISGKPGPPPMGFHSPLIKHPEVKSAIEGIKYIAETMKSDQESNNAAAEWKYVAMVMDHILLGVFMLVCIIGTLAVFAGRLIELNQQG

SEQ ID NO: 16078 - protein, 457 aa, Homo sapiens
MEPWPLLLLFSLCSAGLVLGSEHETRLVAKLFKDYSSVVRPVEDHRQVVEVTVGLQLIQLINVDEVNQIVTTNVRLKQQWVDYNLKWNPDDYGGVKKIHIPSEKIWRPDLVLYNNADGDFAIVKFTKVLLQYTGHITWTPPAIFKSYCEIIVTHFPFDEQNCSMKLGTWTYDGSVVAINPESDQPDLSNFMESGEWVIKESRGWKHSVTYSCCPDTPYLDITYHFVMQRLPLYFIVNVIIPCLLFSFLTGLVFYLPTDSGEKMTLSISVLLSLTVFLLVIVELIPSTSSAVPLIGKYMLFTMVFVIASIIITVIVINTHHRSPSTHVMPNWVRKVFIDTIPNIMFFSTMKRPSREKQDKKIFTEDIDISDISGKPGPPPMGFHSPLIKHPEVKSAIEGIKYIAETMKSDQESNNAAAEWKYVAMVMDHILLGVFMLVCIIGTLAVFAGRLIELNQQG

SEQ ID NO: 16079 - protein, 393 aa, Homo sapiens
MLRRLLERPCTLALLVGSQLAVMMYLSLGGFRSLSALFGRDQGPTFDYSHPRDVYSNLSHLPGAPGGPPAPQGLPYCPERSPLLVGPVSVSFSPVPSLAEIVERNPRVEPGGRYRPAGCEPRSRTAIIVPHRAREHHLRLLLYHLHPFLQRQQLAYGIYVIHQAGNGTFNRAKLLNVGVREALRDEEWDCLFLHDVDLLPENDHNLYVCDPRGPRHVAVAMNKFGYSLPYPQYFGGVSALTPDQYLKMNGFPNEYWGWGGEDDDIATRVRLAGMKISRPPTSVGHYKMVKHRGDKGNEENPHRFDLLVRTQNSWTQDGMNSLTYQLLARELGPLYTNITADIGTDPRGPRAPSGPRYPPGSSQAFRQEMLQRRPPARPGPLSTANHTALRGSH

SEQ ID NO: 16080 - protein, 145 aa, Homo sapiens
MLRRLLERPCTLALLVGSQLAVMMYLSLGGFRSLSALFGRDQGPTFDYSHPRDVYSNLSHLPGAPGGPPAPQGLPYCPERSPLLVGPVSVSFSPVPSLAEIVERNPRVEPGGRYRPAALPPAPLLAAPAACLWHLCHPPGWKWNI

SEQ ID NO: 16081 - protein, 683 aa, Homo sapiens
MNTSIPYQQNPYNPRGSSNVIQCYRCGDTCKGEVVRVHNNHFHIRCFTCQVCGCGLAQSGFFFKNQEYICTQDYQQLYGTRCDSCRDFITGEVISALGRTYHPKCFVCSLCRKPFPIGDKVTFSGKECVCQTCSQSMASSKPIKIRGPSHCAGCKEEIKHGQSLLALDKQWHVSCFKCQTCSVILTGEYISKDGVPYCESDYHAQFGIKCETCDRYISGRVLEAGGKHYHPTCARCVRCHQMFTEGEEMYLTGSEVWHPICKQAARAEKKLKHRRTSETSISPPGSSIGSPNRVICAKVDNEILNYKDLAALPKVKSIYEVQRPDLISYEPHSRYMSDEMLERCGYGESLGTLSPYSQDIYENLDLRQRRASSPGYIDSPTYSRQGMSPTFSRSPHHYYRSGPESGRSSPYHSQLDVRSSTPTSYQAPKHFHIPAGDSNIYRKPPIYKRHGDLSTATKSKTSEDISQTSKYSPIYSPDPYYASESEYWTYHGSPKVPRARRFSSGGEEDDFDRSMHKLQSGIGRLILKEEMKARSSSYADPWTPPRSSTSSREALHTAGYEMSLNGSPRSHYLADSDPLISKSASLPAYRRNGLHRTPSADLFHYDSMNAVNWGMREYKIYPYELLLVTTRGRNRLPKDVDRTRLERHLSQEEFYQVFGMTISEFDRLALWKRNELKKQARLF

SEQ ID NO: 16082 - protein, 544 aa, Homo sapiens
MNTSIPYQQNPYNPRGSSNVIQCYRCGDTCKGEVVRVHNNHFHIRCFTCQVCGCGLAQSGFFFKNQEYICTQDYQQLYGTRCDSCRDFITGEVISALGRTYHPKCFVCSLCRKPFPIGDKVTFSGKECVCQTCSQSMASSKPIKIRGPSHCAGCKEEIKHGQSLLALDKQWHVSCFKCQTCSVILTGEYISKDGVPYCESDYHAQFGIKCETCDRYISGRVLEAGGKHYHPTCARCVRCHQMFTEGEEMYLTGSEVWHPICKQAARAEKKLKHRRTSETSISPPGSSIGSPNRVICDIYENLDLRQRRASSPGYIDSPTYSRQGMSPTFSRSPHHYYRSGDLSTATKSKTSEDISQTSKYSPIYSPDPYYASESEYWTYHGSPKVPRARRFSSGGEEDDFDRSMHKLQSGIGRLILKEEMKARSSSYADPWTPPRSSTSSREALHTAGYEMSLNGSPRSHYLADSDPLISKSASLPAYRRNGLHRTPSADLFHYDSMNAVNWGMREYKIYPYELLLVTTRGRNRLPKDVDRTRLEGNFWKSGCL

SEQ ID NO: 16083 - protein, 588 aa, Homo sapiens
MNTSIPYQQNPYNPRGSSNVIQCYRCGDTCKGEVVRVHNNHFHIRCFTCQVCGCGLAQSGFFFKNQEYICTQDYQQLYGTRCDSCRDFITGEVISALGRTYHPKCFVCSLCRKPFPIGDKVTFSGKECVCQTCSQSMASSKPIKIRGPSHCAGCKEEIKHGQSLLALDKQWHVSCFKCQTCSVILTGEYISKDGVPYCESDYHAQFGIKCETCDRYISGRVLEAGGKHYHPTCARCVRCHQMFTEGEEMYLTGSEVWHPICKQAARAEKKLKHRRTSETSISPPGSSIGSPNRVICDIYENLDLRQRRASSPGYIDSPTYSRQGMSPTFSRSPHHYYRSAGDSNIYRKPPIYKRHGDLSTATKSKTSEDISQTSKYSPIYSPDPYYASESEYWTYHGSPKVPRARRFSSGGEEDDFDRSMHKLQSGIGRLILKEEMKARSSSYADPWTPPRSSTSSREALHTAGYEMSLNGSPRSHYLADSDPLISKSASLPAYRRNGLHRTPSADLFHYDSMNAVNWGMREYKIYPYELLLVTTRGRNRLPKDVDRTRLERHLSQEEFYQVFGMTISEFDRLALWKRNELKKQARLF

SEQ ID NO: 16084 - protein, 169 aa, Homo sapiens
MHKLQSGIGRLILKEEMKARSSSYADPWTPPRSSTSSREALHTAGYEMSLNGSPRSHYLADSDPLISKSASLPAYRRNGLHRTPSADLFHYDSMNAVNWGMREYKIYPYELLLVTTRGRNRLPKDVDRTRLERHLSQEEFYQVFGMTISEFDRLALWKRNELKKQARLF

SEQ ID NO: 16085 - protein, 388 aa, Homo sapiens
MRARRGLLRLPRRSLLAALFFFSLSSSLLYFVYVAPGIVNTYLFMMQAQGILIRDNVRTIGAQVYEQVLRSAYAKRNSSVNDSDYPLDLNHSETFLQTTTFLPEDFTYFANHTCPERLPSMKGPIDINMSEIGMDYIHELFSKDPTIKLGGHWKPSDCMPRWKVAILIPFRNRHEHLPVLFRHLLPMLQRQRLQFAFYVVEQVGTQPFNRAMLFNVGFQEAMKDLDWDCLIFHDVDHIPESDRNYYGCGQMPRHFATKLDKYMYLLPYTEFFGGVSGLTVEQFRKINGFPNAFWGWGGEDDDLWNRVQNAGYSVSRPEGDTGKYKSIPHHHRGEVQFLGRYALLRKSKERQGLDGLNNLNYFANITYDALYKNITVNLTPELAQVNEY

SEQ ID NO: 16086 - protein, 129 aa, Homo sapiens
MWLWQDIQCCPAPPSAPPRALEPGRAPPPPGEGLGAGIPSLSPPQKKPQSVGICVRQKGRQKAGLEKGNRKKELRQANCPSLRPQRKGADTRRLPRETRPTKKRTAAAQPFLQLWNPAPHTSNGRTGDL

SEQ ID NO: 16087 - protein, 421 aa, Homo sapiens
MAATLILEPAGRCCWDEPLRIAVRGLAPEQPVTLRTSLRDEEGALFRAHARYRADARDELDLERAPALGGSFAGLQPMGLLWALEPEKALVRLVKRDVRTPFAVELEVLDGHDTEPGRLLCLAQNKRDFLRPGVRREPVRAGPVRAALFLPPDEGPFPGIIDLFGSSRGLCEYRASLLAGHGFAVLALAYFRFEDLPEDLNDVHLEYFEEAVDFMLQHPKVKGPSIALLGFSKGGDLCLSMASFLKGITATVLINACVANTVAPLHYKDMIIPKLVDDLGKVKITKSGFLTFMDTWSNPLEEHNHQSLVPLEKAQVPFLFIVGMDDQSWKSEFYAQIASERLQAHGKERPQIICYPETGHCIDPPYFPPSRASVHAVLGEAIFYGGEPKAHSKAQVDAWQQIQTFFHKHLNGKKSVKHSKI

SEQ ID NO: 16088 - protein, 207 aa, Homo sapiens
MLQHPKVKGPSIALLGFSKGGDLCLSMASFLKGITATVLINACVANTVAPLHYKDMIIPKLVDDLGKVKITKSGFLTFMDTWSNPLEEHNHQSLVPLEKAQVPFLFIVGMDDQSWKSEFYAQIASERLQAHGKERPQIICYPETGHCIDPPYFPPSRASVHAVLGEAIFYGGEPKAHSKAQVDAWQQIQTFFHKHLNGKKSVKHSKI

SEQ ID NO: 16089 - protein, 421 aa, Homo sapiens
MSATLILEPPGRCCWNEPVRIAVRGLAPEQRVTLRASLRDEKGALFRAHARYCADARGELDLERAPALGGSFAGLEPMGLLWALEPEKPFWRFLKRDVQIPFVVELEVLDGHDPEPGRLLCQAQHERHFLPPGVRRQSVRAGRVRATLFLPPGPGPFPGIIDIFGIGGGLLEYRASLLAGHGFATLALAYYNFEDLPNNMDNISLEYFEEAVCYMLQHPQVKGPGIGLLGISLGADICLSMASFLKNVSATVSINGSGISGNTAINYKHSSIPPLGYDLRRIKVAFSGLVDIVDIRNALVGGYKNPSMIPIEKAQGPILLIVGQDDHNWRSELYAQTVSERLQAHGKEKPQIICYPGTGHYIEPPYFPLCPASLHRLLNKHVIWGGEPRAHSKAQEDAWKQILAFFCKHLGGTQKTAVPKL

SEQ ID NO: 16090 - protein, 211 aa, Homo sapiens
MAQAKINAKANEGRFCRSSSMADRSSRLLESLDQLELRVEALREAATAVEQEKEILLEMIHSIQNSQDMRQISDGEREELNLTANRLMGRTLTVEVSVETIRNPQQQESLKHATRIIDEVVNKFLDDLGNAKSHLMSLYSACSSEVPHGPVDQKFQSIVIGCALEDQKKIKRRLETLLRNIENSDKAIKLLEHSKGAGSKTLQQNAESRFN

SEQ ID NO: 16091 - protein, 178 aa, Homo sapiens
MPHMWVEALREAATAVEQEKEILLEMIHSIQNSQDMRQISDGEREELNLTANRLMGRTLTVEVSVETIRNPQQQESLKHATRIIDEVVNKFLDDLGNAKSHLMSLYSACSSEVPHGPVDQKFQSIVIGCALEDQKKIKRRLETLLRNIENSDKAIKLLEHSKGAGSKTLQQNAESRFN

SEQ ID NO: 16092 - protein, 382 aa, Homo sapiens
MSVLRRMMRVSNRSLLAFIFFFSLSSSCLYFIYVAPGIANTYLFMVQARGIMLRENVKTIGHMIRLYTNKNSTLNGTDYPEGNNSSDYLVQTTTYLPENFTYSPYLPCPEKLPYMRGFLNVNVSEVSFDEIHQLFSKDLDIEPGGHWRPKDCKPRWKVAVLIPFRNRHEHLPIFFLHLIPMLQKQRLEFAFYVIEQTGTQPFNRAMLFNVGFKEAMKDSVWDCVIFHDVDHLPENDRNYYGCGEMPRHFAAKLDKYMYILPYKEFFGGVSGLTVEQFRKINGFPNAFWGWGGEDDDLWNRVHYAGYNVTRPEGDLGKYKSIPHHHRGEVQFLGRYKLLRYSKERQYIDGLNNLIYRPKILVDRLYTNISVNLMPELAPIEDY

SEQ ID NO: 16093 - protein, 343 aa, Homo sapiens
MSVLRRMMRVSNRSLLAFIFFFSLSSSCLYFIYVAPGIANTYLFMVQARGIMLRENVKTIGHMIRLYTNKNSTLNGTDYPEGNNSSDYLVQTTTYLPENFTYSPYLPCPEKLPYMRGFLNVNVSEVSFDEIHQLFSKDLDIEPGGHWRPKDCKPRWKTGTQPFNRAMLFNVGFKEAMKDSVWDCVIFHDVDHLPENDRNYYGCGEMPRHFAAKLDKYMYILPYKEFFGGVSGLTVEQFRKINGFPNAFWGWGGEDDDLWNRVHYAGYNVTRPEGDLGKYKSIPHHHRGEVQFLGRYKLLRYSKERQYIDGLNNLIYRPKILVDRLYTNISVNLMPELAPIEDY

SEQ ID NO: 16094 - protein, 439 aa, Homo sapiens
MRRAALRLCALGKGQLTPGRGLTQGPQNPKKQGIFHIHEVRDKLREIVGASTNWRDHVKAMEERKLLHSFLAKSQDGLPPRRMKDSYIEVLLPLGSEPELREKYLTVQNTVRFGRILEDLDSLGVLICYMHNKIHSAKMSPLSIVTALVDKIDMCKKSLSPEQDIKFSGHVSWVGKTSMEVKMQMFQLHGDEFCPVLDATFVMVARDSENKGPAFVNPLIPESPEEEELFRQGELNKGRRIAFSSTSLLKMAPSAEERTTIHEMFLSTLDPKTISFRSRVLPSNAVWMENSKLKSLEICHPQERNIFNRIFGGFLMRKAYELAWATACSFGGSRPFVVAVDDIMFQKPVEVGSLLFLSSQVCFTQNNYIQVRVHSEVASLQEKQHTTTNVFHFTFMSEKEVPLVFPKTYGESMLYLDGQRHFNSMSGPATLRKDYLVEP

SEQ ID NO: 16095 - protein, 406 aa, Homo sapiens
MRRAPCVRDKLREIVGASTNWRDHVKAMEERKLLHSFLAKSQDGLPPRRMKDSYIEVLLPLGSEPELREKYLTVQNTVRFGRILEDLDSLGVLICYMHNKIHSAKMSPLSIVTALVDKIDMCKKSLSPEQDIKFSGHVSWVGKTSMEVKMQMFQLHGDEFCPVLDATFVMVARDSENKGPAFVNPLIPESPEEEELFRQGELNKGRRIAFSSTSLLKMAPSAEERTTIHEMFLSTLDPKTISFRSRVLPSNAVWMENSKLKSLEICHPQERNIFNRIFGGFLMRKAYELAWATACSFGGSRPFVVAVDDIMFQKPVEVGSLLFLSSQVCFTQNNYIQVRVHSEVASLQEKQHTTTNVFHFTFMSEKEVPLVFPKTYGESMLYLDGQRHFNSMSGPATLRKDYLVEP

SEQ ID NO: 16096 - protein, 379 aa, Homo sapiens
MEERKLLHSFLAKSQDGLPPRRMKDSYIEVLLPLGSEPELREKYLTVQNTVRFGRILEDLDSLGVLICYMHNKIHSAKMSPLSIVTALVDKIDMCKKSLSPEQDIKFSGHVSWVGKTSMEVKMQMFQLHGDEFCPVLDATFVMVARDSENKGPAFVNPLIPESPEEEELFRQGELNKGRRIAFSSTSLLKMAPSAEERTTIHEMFLSTLDPKTISFRSRVLPSNAVWMENSKLKSLEICHPQERNIFNRIFGGFLMRKAYELAWATACSFGGSRPFVVAVDDIMFQKPVEVGSLLFLSSQVCFTQNNYIQVRVHSEVASLQEKQHTTTNVFHFTFMSEKEVPLVFPKTYGESMLYLDGQRHFNSMSGPATLRKDYLVEP

SEQ ID NO: 16097 - protein, 448 aa, Homo sapiens
MRRAALRLCALGKGQLTPGRGLTQGPQNPKKQGIFHIHEACSSIHVNHVRDKLREIVGASTNWRDHVKAMEERKLLHSFLAKSQDGLPPRRMKDSYIEVLLPLGSEPELREKYLTVQNTVRFGRILEDLDSLGVLICYMHNKIHSAKMSPLSIVTALVDKIDMCKKSLSPEQDIKFSGHVSWVGKTSMEVKMQMFQLHGDEFCPVLDATFVMVARDSENKGPAFVNPLIPESPEEEELFRQGELNKGRRIAFSSTSLLKMAPSAEERTTIHEMFLSTLDPKTISFRSRVLPSNAVWMENSKLKSLEICHPQERNIFNRIFGGFLMRKAYELAWATACSFGGSRPFVVAVDDIMFQKPVEVGSLLFLSSQVCFTQNNYIQVRVHSEVASLQEKQHTTTNVFHFTFMSEKEVPLVFPKTYGESMLYLDGQRHFNSMSGPATLRKDYLVEP

SEQ ID NO: 16098 - protein, 457 aa, Homo sapiens
MSALRRSGYGPSDGPSYGRYYGPGGGDVPVHPPPPLYPLRPEPPQPPISWRVRGGGPAETTWLGEGGGGDGYYPSGGAWPEPGRAGGSHQEQPPYPSYNSNYWNSTARSRAPYPSTYPVRPELQGQSLNSYTNGAYGPTYPPGPGANTASYSGAYYAPGYTQTSYSTEVPSTYRSSGNSPTPVSRWIYPQQDCQTEAPPLRGQVPGYPPSQNPGMTLPHYPYGDGNRSVPQSGPTVRPQEDAWASPGAYGMGGRYPWPSSAPSAPPGNLYMTESTSPWPSSGSPQSPPSPPVQQPKDSSYPYSQSDQSMNRHNFPCSVHQYESSGTVNNDDSDLLDSQVQYSAEPQLYGNATSDHPNNQDQSSSLPEECVPSDESTPPSIKKIIHVLEKVQYLEQEVEEFVGKKTDKAYWLLEEMLTKELLELDSVETGGQDSVRQARKEAVCKIQAILEKLEKKGL

SEQ ID NO: 16099 - protein, 421 aa, Homo sapiens
MSALRRSGYGPSDGPSYGRYYGPGGGDVPVHPPPPLYPLRPEPPQPPISWRVRGGGPAETTWLGEGGGGDGYYPSGGAWPEPGRAGGSHQSLNSYTNGAYGPTYPPGPGANTASYSGAYYAPGYTQTSYSTEVPSTYRSSGNSPTPVSRWIYPQQDCQTEAPPLRGQVPGYPPSQNPGMTLPHYPYGDGNRSVPQSGPTVRPQEDAWASPGAYGMGGRYPWPSSAPSAPPGNLYMTESTSPWPSSGSPQSPPSPPVQQPKDSSYPYSQSDQSMNRHNFPCSVHQYESSGTVNNDDSDLLDSQVQYSAEPQLYGNATSDHPNNQDQSSSLPEECVPSDESTPPSIKKIIHVLEKVQYLEQEVEEFVGKKTDKAYWLLEEMLTKELLELDSVETGGQDSVRQARKEAVCKIQAILEKLEKKGL

SEQ ID NO: 16100 - protein, 778 aa, Homo sapiens
MSSGAKEGGGGSPAYHLPHPHPHPPQHAQYVGPYRLEKTLGKGQTGLVKLGVHCITGQKVAIKIVNREKLSESVLMKVEREIAILKLIEHPHVLKLHDVYENKKYLYLVLEHVSGGELFDYLVKKGRLTPKEARKFFRQIVSALDFCHSYSICHRDLKPENLLLDEKNNIRIADFGMASLQVGDSLLETSCGSPHYACPEVIKGEKYDGRRADMWSCGVILFALLVGALPFDDDNLRQLLEKVKRGVFHMPHFIPPDCQSLLRGMIEVEPEKRLSLEQIQKHPWYLGGKHEPDPCLEPAPGRRVAMRSLPSNGELDPDVLESMASLGCFRDRERLHRELRSEEENQEKMIYYLLLDRKERYPSCEDQDLPPRNDVDPPRKRVDSPMLSRHGKRRPERKSMEVLSITDAGGGGSPVPTRRALEMAQHSQRSRSVSGASTGLSSSPLSSPRSPVFSFSPEPGAGDEARGGGSPTSKTQTLPSRGPRGGGAGEQPPPPSARSTPLPGPPGSPRSSGGTPLHSPLHTPRASPTGTPGTTPPPSPGGGVGGAAWRSRLNSIRNSFLGSPRFHRRKMQVPTAEEMSSLTPESSPELAKRSWFGNFISLDKEEQIFLVLKDKPLSSIKADIVHAFLSIPSLSHSVLSQTSFRAEYKASGGPSVFQKPVRFQVDISSSEGPEPSPRRDGSGGGGIYSVTFTLISGPSRRFKRVVETIQAQLLSTHDQPSVQALADEKNGAQTRPAGAPPRSLQPPPGRPDPELSSSPRRGPPKDKKLLATNGTPLP

SEQ ID NO: 16101 - protein, 794 aa, Homo sapiens
MVAGLTLGKGPESPDGDVSVPERKDEVAGGGGEEEEAEERGRHAQYVGPYRLEKTLGKGQTGLVKLGVHCITGQKVAIKIVNREKLSESVLMKVEREIAILKLIEHPHVLKLHDVYENKKYLYLVLEHVSGGELFDYLVKKGRLTPKEARKFFRQIVSALDFCHSYSICHRDLKPENLLLDEKNNIRIADFGMASLQVGDSLLETSCGSPHYACPEVIKGEKYDGRRADMWSCGVILFALLVGALPFDDDNLRQLLEKVKRGVFHMPHFIPPDCQSLLRGMIEVEPEKRLSLEQIQKHPWYLGGKHEPDPCLEPAPGRRVAMRSLPSNGELDPDVLESMASLGCFRDRERLHRELRSEEENQEKMIYYLLLDRKERYPSCEDQDLPPRNDVDPPRKRVDSPMLSRHGKRRPERKSMEVLSITDAGGGGSPVPTRRALEMAQHSQRSRSVSGASTGLSSSPLSSPRSPVFSFSPEPGAGDEARGGGSPTSKTQTLPSRGPRGGGAGEQPPPPSARSTPLPGPPGSPRSSGGTPLHSPLHTPRASPTGTPGTTPPPSPGGGVGGAAWRSRLNSIRNSFLGSPRFHRRKMQVPTAEEMSSLTPESSPELAKRSWFGNFISLDKEEQIFLVLKDKPLSSIKADIVHAFLSIPSLSHSVLSQTSFRAEYKASGGPSVFQKPVRFQVDISSSEGPEPSPRRDGSGGGGIYSVTFTLISGPSRRFKRVVETIQAQLLSTHDQPSVQALADEKNGAQTRPAGAPPRSLQPPPGRPDPELSSSPRRGPPKDKKLLATNGTPLP

SEQ ID NO: 16102 - protein, 343 aa, Homo sapiens
MSSGAKEGGGGSPAYHLPHPHPHPPQHAQYVGPYRLEKTLGKGQTGLVKLGVHCITGQKVAIKIVNREKLSESVLMKVEREIAILKLIEHPHVLKLHDVYENKKYLYLVLEHVSGGELFDYLVKKGRLTPKEARKFFRQIVSALDFCHSYSICHRDLKPENLLLDEKNNIRIADFGMASLQVGDSLLETSCGSPHYACPEVIKGEKYDGRRADMWSCGVILFALLVGALPFDDDNLRQLLEKVKRGVFHMPHFIPPDCQSLLRGMIEVEPEKRLSLEQIQKHPWYLGGKHEPDPCLEPAPGRRVAMRSLPSNGELDPDVLESMASLGCFRDRERLHRELRSEE

SEQ ID NO: 16103 - protein, 374 aa, Homo sapiens
MANEVIKCKAAVAWEAGKPLSIEEIEVAPPKAHEVRIKIIATAVCHTDAYTLSGADPEGCFPVILGHEGAGIVESVGEGVTKLKAGDTVIPLYIPQCGECKFCLNPKTNLCQKIRVTQGKGLMPDGTSRFTCKGKTILHYMGTSTFSEYTVVADISVAKIDPLAPLDKVCLLGCGISTGYGAAVNTAKLEPGSVCAVFGLGGVGLAVIMGCKVAGASRIIGVDINKDKFARAKEFGATECINPQDFSKPIQEVLIEMTDGGVDYSFECIGNVKVMRAALEACHKGWGVSVVVGVAASGEEIATRPFQLVTGRTWKGTAFGGWKSVESVPKLVSEYMSKKIKVDEFVTHNLSFDEINKAFELMHSGKSIRTVVKI

SEQ ID NO: 16104 - protein, 517 aa, Homo sapiens
MHGGQGPLLLLLLLAVCLGAQGRNQEERLLADLMQNYDPNLRPAERDSDVVNVSLKLTLTNLISLNEREEALTTNVWIEMQWCDYRLRWDPRDYEGLWVLRVPSTMVWRPDIVLENNVDGVFEVALYCNVLVSPDGCIYWLPPAIFRSACSISVTYFPFDWQNCSLIFQSQTYSTNEIDLQLSQEDGQTIEWIFIDPEAFTENGEWAIQHRPAKMLLDPAAPAQEAGHQKVVFYLLIQRKPLFYVINIIAPCVLISSVAILIHFLPAKAGGQKCTVAINVLLAQTVFLFLVAKKVPETSQAVPLISKYLTFLLVVTILIVVNAVVVLNVSLRSPHTHSMARGVRKVFLRLLPQLLRMHVRPLAPAAVQDTQSRLQNGSSGWSITTGEEVALCLPRSELLFQQWQRQGLVAAALEKLEKGPELGLSQFCGSLKQAAPAIQACVEACNLIACARHQQSHFDNGNEEWFLVGRVLDRVCFLAMLSLFICGTAGIFLMAHYNRVPALPFPGDPRPYLPSPD

SEQ ID NO: 16105 - protein, 465 aa, Homo sapiens
MHGGQGPLLLLLLLAVCLGAQGRNQEERLLADLMQNYDPNLRPAERDSDVVNVSLKLTLTNLISLNEREEALTTNVWIEMQWCDYRLRWDPRDYEGLWVLRVPSTMVWRPDIVLENKSQTYSTNEIDLQLSQEDGQTIEWIFIDPEAFTENGEWAIQHRPAKMLLDPAAPAQEAGHQKVVFYLLIQRKPLFYVINIIAPCVLISSVAILIHFLPAKAGGQKCTVAINVLLAQTVFLFLVAKKVPETSQAVPLISKYLTFLLVVTILIVVNAVVVLNVSLRSPHTHSMARGVRKVFLRLLPQLLRMHVRPLAPAAVQDTQSRLQNGSSGWSITTGEEVALCLPRSELLFQQWQRQGLVAAALEKLEKGPELGLSQFCGSLKQAAPAIQACVEACNLIACARHQQSHFDNGNEEWFLVGRVLDRVCFLAMLSLFICGTAGIFLMAHYNRVPALPFPGDPRPYLPSPD

SEQ ID NO: 16106 - protein, 700 aa, Homo sapiens
MASTVEGGDTALLPEFPRGPLDAYRARASFSWKELALFTEGEGMLRFKKTIFSALENDPLFARSPGADLSLEKYRELNFLRCKRIFEYDFLSVEDMFKSPLKVPALIQCLGMYDSSLAAKYLLHSLVFGSAVYSSGSERHLTYIQKIFRMEIFGCFALTELSHGSNTKAIRTTAHYDPATEEFIIHSPDFEAAKFWVGNMGKTATHAVVFAKLCVPGDQCHGLHPFIVQIRDPKTLLPMPGVMVGDIGKKLGQNGLDNGFAMFHKVRVPRQSLLNRMGDVTPEGTYVSPFKDVRQRFGASLGSLSSGRVSIVSLAILNLKLAVAIALRFSATRRQFGPTEEEEIPVLEYPMQQWRLLPYLAAVYALDHFSKSLFLDLVELQRGLASGDRSARQAELGREIHALASASKPLASWTTQQGIQECREACGGHGYLAMNRLGVLRDDNDPNCTYEGDNNILLQQTSNYLLGLLAHQVHDGACFRSPLKSVDFLDAYPGILDQKFEVSSVADCLDSAVALAAYKWLVCYLLRETYQKLNQEKRSGSSDFEARNKCQVSHGRPLALAFVELTVVQRFHEHVHQPSVPPSLRAVLGRLSALYALWSLSRHAALLYRGGYFSGEQAGEVLESAVLALCSQLKDDAVALVDVIAPPDFVLDSPIGRADGELYKNLWGAVLQESKVLERASWWPEFSVNKPVIGSLKSKL

SEQ ID NO: 16107 - protein, 624 aa, Homo sapiens
MASTVEGGDTALLPEFPRGPLDAYRARASFSWKELALFTEGEGMLRFKKTIFSALENDPLFARSPGADLSLEKYRELNFLRCKRIFEYDFLSVEDMFKSPLKVPALIQCLGMYDSSLAAKYLLHSLVFGSAVYSSGSERHLTYIQKIFRMEIFGCFALTELSHGSNTKAIRTTAHYDPATEEFIIHSPDFEAAKFWVGNMGKTATHAVVFAKLCVPGDQCHGLHPFIVQIRDPKTLLPMPGVMVGDIGKKLGQNGLDNGFAMFHKVRVPRQSLLNRMGDVTPEGTYVSPFKDVRQRFGASLGSLSSGRVSIVSLAILNLKLAVAIALRFSATRRQFGPTEEEEIPVLEYPMQQWRLLPYLAAVYALDHFSKSLFLDLVELQRGLASGDRSARQAELGREIHALASASKPLASWTTQQGIQECREACGGHGYLAMNRLGVLRDDNDPNCTYEGDNNILLQQTSNYLLGLLAHQVHDGACFRSPLKSVDFLDAYPGILDQKFEVSSVADCLDSAVALAAYKWLVCYLLRETYQKLNQEKRSGSSDFEARNKCQVSHGRPLALAFVELTVVQRFHEHVHQPSVPPSLRAVLGRLSALYALWSLSRHAALLYRAERRCSCPGRRDRSS

SEQ ID NO: 16108 - protein, 736 aa, Homo sapiens
MSLSENSVFAYESSVHSTNVLLSLNDQRKKDVLCDVTIFVEGQRFRAHRSVLAACSSYFHSRIVGQADGELNITLPEEVTVKGFEPLIQFAYTAKLILSKENVDEVCKCVEFLSVHNIEESCFQFLKFKFLDSTADQQECPRKKCFSSHCQKTDLKLSLLDQRDLETDEVEEFLENKNVQTPQCKLRRYQGNAKASPPLQDSASQTYESMCLEKDAALALPSLCPKYRKFQKAFGTDRVRTGESSVKDIHASVQPNERSENECLGGVPECRDLQVMLKCDESKLAMEPEETKKDPASQCPTEKSEVTPFPHNSSIDPHGLYSLSLLHTYDQYGDLNFAGMQNTTVLTEKPLSGTDVQEKTFGESQDLPLKSDLGTREDSSVASSDRSSVEREVAEHLAKGFWSDICSTDTPCQMQLSPAVAKDGSEQISQKRSECPWLGIRISESPEPGQRTFTTLSSVNCPFISTLSTEGCSSNLEIGNDDYVSEPQQEPCPYACVISLGDDSETDTEGDSESCSAREQECEVKLPFNAQRIISLSRNDFQSLLKMHKLTPEQLDCIHDIRRRSKNRIAAQRCRKRKLDCIQNLESEIEKLQSEKESLLKERDHILSTLGETKQNLTGLCQKVCKEAALSQEQIQILAKYSAADCPLSFLISEKDKSTPDGELALPSIFSLSDRPPAVLPPCARGNSEPGYARGQESQQMSTATSEQAGPAEQCRQSGGISDFCQQMTDKCTTDE

SEQ ID NO: 16109 - protein, 245 aa, Homo sapiens
MDKNELVQKAKLAEQAERYDDMAACMKSVTEQGAELSNEERNLLSVAYKNVVGARRSSWRVVSSIEQKTEGAEKKQQMAREYREKIETELRDICNDVLSLLEKFLIPNASQAESKVFYLKMKGDYYRYLAEVAAGDDKKGIVDQSQQAYQEAFEISKKEMQPTHPIRLGLALNFSVFYYEILNSPEKACSLAKTAFDEAIAELDTLSEESYKDSTLIMQLLRDNLTLWTSDTQGDEAEAGEGGEN

SEQ ID NO: 16110 - protein, 170 aa, Homo sapiens
MSQPCRKLWRHNYETSSCIEFLKSLLEKFLIPNASQAESKVFYLKMKGDYYRYLAEVAAGDDKKGIVDQSQQAYQEAFEISKKEMQPTHPIRLGLALNFSVFYYEILNSPEKACSLAKTAFDEAIAELDTLSEESYKDSTLIMQLLRDNLTLWTSDTQGDEAEAGEGGEN

SEQ ID NO: 16111 - protein, 270 aa, Homo sapiens
MGNTSSERAALERHGGHKTPRRDSSGGTKDGDRPKILMDSPEDADLFHSEEIKAPEKEEFLAWQHDLEVNDKAPAQARPTVFRWTGGGKEVYLSGSFNNWSKLPLTRSHNNFVAILDLPEGEHQYKFFVDGQWTHDPSEPIVTSQLGTVNNIIQVKKTDFEVFDALMVDSQKCSDVSELSSSPPGPYHQEPYVCKPEERFRAPPILPPHLLQVILNKDTGISCDPALLPEPNHVMLNHLYALSIKDGVMVLSATHRYKKKYVTTLLYKPI

SEQ ID NO: 16112 - protein, 89 aa, Homo sapiens
MTTSQKHRDFVAEPMGEKPVGSLAGIGEVLGKKLEERGFDKAYVVLGQFLVLKKDEDLFREWLKDTCGANAKQSRDCFGCLREWCDAFL

SEQ ID NO: 16113 - protein, 519 aa, Homo sapiens
MEFSERKRSRKSQSFKLVSRDYHHEVYKIPEFSNDVNGEAKETQPIFLGDESMEIKKQITGMRRLLNDSTGRIYQRVGKEGEKLKEEPQDLDLVWPPRLNSSAEAPQSLHPSSRGVWNELPPQSGQFSGQYGTRSRTFQSQPHPTTSSNGELPVVNSSAGSNCCTCNCQSTLQAILQELKTMRKLMQIQAVGTQNRQQPPISLICSQRTAVSRKRNKKKKVPPKTVEPLTVKQKPSGSEMEKKSVVASELSALQAAEHTSPEESRVLGFGIVLESPSSDPEVQLAEGFDVFMPKSQLDSILSNYTRSGSLLFRKLVCAFFDDKTLANSLPNGKRKRGLNDNRKGLDQNIVGAIKVFTEKYCTANHVDKLPGPRDWVQILQDQIKLARRRLKRGSEIADSDERLDGIALPPTGACGGPCTVLPGGSAAVTLVLQSSPQTMSQEKGQMAEPWEEQHLVLLNNLTRDRAETGALSQTSQDFKHHSFLITQVSATLHHQRGIRNFPTPGSAKSLTLHISCLSL

SEQ ID NO: 16114 - protein, 374 aa, Homo sapiens
MEIKKQITGMRRLLNDSTGRIYQRVGKEGEKLKEEPQDLDLVWPPRLNSSAEAPQSLHPSSRGVWNELPPQSGQFSGQYGTRSRTFQSQPHPTTSSNGMVVNKHSEGSHGGELPVVNSSAGSNCCTCNCQSTLQAILQELKTMRKLMQIQAVGTQNRQQPPISLICSQRTAVSRKRNKKKKVPPKTVEPLTVKQKPSGSEMEKKSVVASELSALQAAEHTSPEESRVLGFGIVLESPSSDPEVQLAEGFDVFMPKSQLDSILSNYTRSGSLLFRKLVCAFFDDKTLANSLPNGKRKRGLNDNRKGLDQNIVGAIKVFTEKYCTANHVDKLPGPRDWVQILQDQIKLARRRLKRGSEIADSDERLDGIALPPTVV

SEQ ID NO: 16115 - protein, 468 aa, Homo sapiens
MEIKKQITGMRRLLNDSTGRIYQRVGKEGEKLKEEPQDLDLVWPPRLNSSAEAPQSLHPSSRGVWNELPPQSGQFSGQYGTRSRTFQSQPHPTTSSNGELPVVNSSAGSNCCTCNCQSTLQAILQELKTMRKLMQIQAVGTQNRQQPPISLICSQRTAVSRKRNKKKKVPPKTVEPLTVKQKPSGSEMEKKSVVASELSALQAAEHTSPEESRVLGFGIVLESPSSDPEVQLAEGFDVFMPKSQLDSILSNYTRSGSLLFRKLVCAFFDDKTLANSLPNGKRKRGLNDNRKGLDQNIVGAIKVFTEKYCTANHVDKLPGPRDWVQILQDQIKLARRRLKRGSAEIADSDERLDGIALPPTGACGGPCTVLPGGSAAVTLVLQSSPQTMSQEKGQMAEPWEEQHLVLLNNLTRDRAETGALSQTSQDFKHHSFLITQVSATLHHQRGIRNFPTPGSAKSLTLHISCLSL

SEQ ID NO: 16116 - protein, 408 aa, Homo sapiens
MIPGNRMLMVVLLCQVLLGGASHASLIPETGKKKVAEIQGHAGGRRSGQSHELLRDFEATLLQMFGLRRRPQPSKSAVIPDYMRDLYRLQSGEEEEEQIHSTGLEYPERPASRANTVRSFHHEEHLENIPGTSENSAFRFLFNLSSIPENEVISSAELRLFREQVDQGPDWERGFHRINIYEVMKPPAEVVPGHLITRLLDTRLVHHNVTRWETFDVSPAVLRWTREKQPNYGLAIEVTHLHQTRTHQGQHVRISRSLPQGSGNWAQLRPLLVTFGHDGRGHALTRRRRAKRSPKHHSQRARKKNKNCRRHSLYVDFSDVGWNDWIVAPPGYQAFYCHGDCPFPLADHLNSTNHAIVQTLVNSVNSSIPKACCVPTELSAISMLYLDEYDKVVLKNYQEMVVEGCGCR

SEQ ID NO: 16117 - protein, 111 aa, Homo sapiens
MADWARAQSPGAVEEILDRENKRMADSLASKVTRLKSLALDIDRDAEDQNRYLDGMDSDFTSMTSLLTGSVKRFSTMARSGQDNRKLLCGMAVGLIVAFFILSYFLSRART

SEQ ID NO: 16118 - protein, 505 aa, Homo sapiens
MGSGPLSLPLALSPPRLLLLLLLSLLPVARASEAEHRLFERLFEDYNEIIRPVANVSDPVIIHFEVSMSQLVKVDEVNQIMETNLWLKQIWNDYKLKWNPSDYGGAEFMRVPAQKIWKPDIVLYNNAVGDFQVDDKTKALLKYTGEVTWIPPAIFKSSCKIDVTYFPFDYQNCTMKFGSWSYDKAKIDLVLIGSSMNLKDYWESGEWAIIKAPGYKHDIKYNCCEEIYPDITYSLYIRRLPLFYTINLIIPCLLISFLTVLVFYLPSDCGEKVTLCISVLLSLTVFLLVITETIPSTSLVIPLIGEYLLFTMIFVTLSIVITVFVLNVHYRTPTTHTMPSWVKTVFLNLLPRVMFMTRPTSNEGNAQKPRPLYGAELSNLNCFSRAESKGCKEGYPCQDGMCGYCHHRRIKISNFSANLTRSSSSESVDAVLSLSALSPEIKEAIQSVKYIAENMKAQNEAKEIQDDWKYVAMVIDRIFLWVFTLVCILGTAGLFLQPLMAREDA

SEQ ID NO: 16119 - protein, 504 aa, Homo sapiens
MALAVSLPLALSPPRLLLLLLLSLLPVARASEAEHRLFERLFEDYNEIIRPVANVSDPVIIHFEVSMSQLVKVDEVNQIMETNLWLKQIWNDYKLKWNPSDYGGAEFMRVPAQKIWKPDIVLYNNAVGDFQVDDKTKALLKYTGEVTWIPPAIFKSSCKIDVTYFPFDYQNCTMKFGSWSYDKAKIDLVLIGSSMNLKDYWESGEWAIIKAPGYKHDIKYNCCEEIYPDITYSLYIRRLPLFYTINLIIPCLLISFLTVLVFYLPSDCGEKVTLCISVLLSLTVFLLVITETIPSTSLVIPLIGEYLLFTMIFVTLSIVITVFVLNVHYRTPTTHTMPSWVKTVFLNLLPRVMFMTRPTSNEGNAQKPRPLYGAELSNLNCFSRAESKGCKEGYPCQDGMCGYCHHRRIKISNFSANLTRSSSSESVDAVLSLSALSPEIKEAIQSVKYIAENMKAQNEAKEIQDDWKYVAMVIDRIFLWVFTLVCILGTAGLFLQPLMAREDA

SEQ ID NO: 16120 - protein, 489 aa, Homo sapiens
MGSGPLSLPLALSPPRLLLLLLLSLLPVARASEAEHRLFERLFEDYNEIIRPVANVSDPVIIHFEVSMSQLVKVDEVNQIMETNLWLKQIWNDYKLKWNPSDYGGAEFMRVPAQKIWKPDIVLYNNAVGDFQVDDKTKALLKYTGEVTWIPPAIFKSSCKIDVTYFPFDYQNCTMKFGSWSYDKAKIDLVLIGSSMNLKDYWESGEWAIIKAPGYKHDIKYNCCEEIYPDITYSLYIRRLPLFYTINLIIPCLLISFLTVLVFYLPSDCGEKVTLCISVLLSLTVFLLVITETIPSTSLVIPLIGEYLLFTMIFVTLSIVITVFVLNVHYRTPTTHTMPSWVKTVFLNLLPRVMFMTRPTSNEGNAQKPRPLYGAELSNLNCFSRAESKGCKEGYPCQDGMCGYCHHRRIKISNFSANLTRSSSSESVDAVLSLSALSPEIKEAIQSVKYIAENMKAQNEAKEEQKAQEIQQLKRKEKSTETSDQEPGL

SEQ ID NO: 16121 - protein, 210 aa, Homo sapiens
MSTKVPIYLKRGSRKGKKEKLRDLLSSDMISPPLGDFRHTIHIGSGGGSDMFGDISFLQGKFHLLPGTMVEGPEEDGTFDLPFQFTRTATVCGRELPDGPSPLLKNAISLPVIGGPQALTLPTAQAPPKPPRLHLETPQPSPQEGGSVDIWRIPETGSPNSGLTPESGAEEPFLSNASSLLSLHVDLGPSILDDVLQIMDQDLDSMQIPT

SEQ ID NO: 16122 - protein, 701 aa, Homo sapiens
MPRTMIPPGECTYAGRKRRRPLQKQRPAVGAEKSNPSKRHRDRLNAELDHLASLLPFPPDIISKLDKLSVLRLSVSYLRVKSFFQVVQEQSSRQPAAGAPSPGDSCPLAGSAVLEGRLLLESLNGFALVVSAEGTIFYASATIVDYLGFHQTDVMHQNIYDYIHVDDRQDFCRQLHWAMDPPQVVFGQPPPLETGDDAILGRLLRAQEWGTGTPTEYSAFLTRCFICRVRCLLDSTSGFLTMQFQGKLKFLFGQKKKAPSGAMLPPRLSLFCIAAPVLLPSAAEMKMRSALLRAKPRADTAATADAKVKATTSLCESELHGKPNYSAGRSSRESGVLVLREQTDAGRWAQVPARAPCLCLRGGPDLVLDPKGGSGDREEEQHRMLSRASGVTGRRETPGPTKPLPWTAGKHSEDGARPRLQPSKNDPPSLRPMPRGSCLPCPCVQGTFRNSPISHPPSPSPSAYSSRTSRPMRDVGEDQVHPPLCHFPQRSLQHQLPQPGAQRFATRGYPMEDMKLQGVPMPPGDLCGPTLLLDVSIKMEKDSGCEGAADGCVPSQVWLGASDRSHPATFPTRMHLKTEPDSRQQVYISHLGHGVRGAQPHGRATAGRSRELTPFHPAHCACLEPTDGLPQSEPPHQLCARGRGEQSCTCRAAEAAPVVKREPLDSPQWATHSQGMVPGMLPKSALATLVPPQASGCTFLP

SEQ ID NO: 16123 - protein, 719 aa, Homo sapiens
MPRTMIPPGECTYAGRKRRRPLQKQRPAVGAEKSNPSKRHRDRLNAELDHLASLLPFPPDIISKLDKLSVLRLSVSYLRVKSFFQVVQEQSSRQPAAGAPSPGDSCPLAGSAVLEGRLLLESLNGFALVVSAEGTIFYASATIVDYLGFHQTDVMHQNIYDYIHVDDRQDFCRQLHWAMDPPQVVFGQPPPLETGDDAILGRLLRAQEWGTGTPTEYSAFLTRCFICRVRCLLDSTSGFLARGSQAWQLRLCCPEPLMTMQFQGKLKFLFGQKKKAPSGAMLPPRLSLFCIAAPVLLPSAAEMKMRSALLRAKPRADTAATADAKVKATTSLCESELHGKPNYSAGRSSRESGVLVLREQTDAGRWAQVPARAPCLCLRGGPDLVLDPKGGSGDREEEQHRMLSRASGVTGRRETPGPTKPLPWTAGKHSEDGARPRLQPSKNDPPSLRPMPRGSCLPCPCVQGTFRNSPISHPPSPSPSAYSSRTSRPMRDVGEDQVHPPLCHFPQRSLQHQLPQPGAQRFATRGYPMEDMKLQGVPMPPGDLCGPTLLLDVSIKMEKDSGCEGAADGCVPSQVWLGASDRSHPATFPTRMHLKTEPDSRQQVYISHLGHGVRGAQPHGRATAGRSRELTPFHPAHCACLEPTDGLPQSEPPHQLCARGRGEQSCTCRAAEAAPVVKREPLDSPQWATHSQGMVPGMLPKSALATLVPPQASGCTFLP

SEQ ID NO: 16124 - protein, 715 aa, Homo sapiens
MIPPGECTYAGRKRRRPLQKQRPAVGAEKSNPSKRHRDRLNAELDHLASLLPFPPDIISKLDKLSVLRLSVSYLRVKSFFQVVQEQSSRQPAAGAPSPGDSCPLAGSAVLEGRLLLESLNGFALVVSAEGTIFYASATIVDYLGFHQTDVMHQNIYDYIHVDDRQDFCRQLHWAMDPPQVVFGQPPPLETGDDAILGRLLRAQEWGTGTPTEYSAFLTRCFICRVRCLLDSTSGFLARGSQAWQLRLCCPEPLMTMQFQGKLKFLFGQKKKAPSGAMLPPRLSLFCIAAPVLLPSAAEMKMRSALLRAKPRADTAATADAKVKATTSLCESELHGKPNYSAGRSSRESGVLVLREQTDAGRWAQVPARAPCLCLRGGPDLVLDPKGGSGDREEEQHRMLSRASGVTGRRETPGPTKPLPWTAGKHSEDGARPRLQPSKNDPPSLRPMPRGSCLPCPCVQGTFRNSPISHPPSPSPSAYSSRTSRPMRDVGEDQVHPPLCHFPQRSLQHQLPQPGAQRFATRGYPMEDMKLQGVPMPPGDLCGPTLLLDVSIKMEKDSGCEGAADGCVPSQVWLGASDRSHPATFPTRMHLKTEPDSRQQVYISHLGHGVRGAQPHGRATAGRSRELTPFHPAHCACLEPTDGLPQSEPPHQLCARGRGEQSCTCRAAEAAPVVKREPLDSPQWATHSQGMVPGMLPKSALATLVPPQASGCTFLP

SEQ ID NO: 16125 - protein, 646 aa, Homo sapiens
MSYTGFVQGSETTLQSTYSDTSAQPTCDYGYGTWNSGTNRGYEGYGYGYGYGQDNTTNYGYGMATSHSWEMPSSDTNANTSASGSASADSVLSRINQRLDMVPHLETDMMQGGVYGSGGERYDSYESCDSRAVLSERDLYRSGYDYSELDPEMEMAYEGQYDAYRDQFRMRGNDTFGPRAQGWARDARSGRPMASGYGRMWEDPMGARGQCMSGASRLPSLFSQNIIPEYGMFQGMRGGGAFPGGSRFGFGFGNGMKQMRRTWKTWTTADFRTKKKKRKQGGSPDEPDSKATRTDCSDNSDSDNDEGTEGEATEGLEGTEAVEKGSRVDGEDEEGKEDGREEGKEDPEKGALTTQDENGQTKRKLQAGKKSQDKQKKRQRDRMVERIQFVCSLCKYRTFYEDEMASHLDSKFHKEHFKYVGTKLPKQTADFLQEYVTNKTKKTEELRKTVEDLDGLIQQIYRDQDLTQEIAMEHFVKKVEAAHCAACDLFIPMQFGIIQKHLKTMDHNRNRRLMMEQSKKSSLMVARSILNNKLISKKLERYLKGENPFTDSPEEEKEQEEAEGGALDEGAQGEAAGISEGAEGVPAQPPVPPEPAPGAVSPPPPPPPEEEEEGAVPLLGGALQRQIRGIPGLDVEDDEEGGGGAP

SEQ ID NO: 16126 - protein, 585 aa, Homo sapiens
MSYTGFVQGSETTLQSTYSDTSAQPTCDYGYGTWNSGTNRGYEGYGYGYGYGQDNTTNYGYDSYESCDSRAVLSERDLYRSGYDYSELDPEMEMAYEGQYDAYRDQFRMRGNDTFGPRAQGWARDARSGRPMASGYGRMWEDPMGARGQCMSGASRLPSLFSQNIIPEYGMFQGMRGGGAFPGGSRFGFGFGNGMKQMRRTWKTWTTADFRTKKKKRKQGGSPDEPDSKATRTDCSDNSDSDNDEGTEGEATEGLEGTEAVEKGSRVDGEDEEGKEDGREEGKEDPEKGALTTQDENGQTKRKLQAGKKSQDKQKKRQRDRMVERIQFVCSLCKYRTFYEDEMASHLDSKFHKEHFKYVGTKLPKQTADFLQEYVTNKTKKTEELRKTVEDLDGLIQQIYRDQDLTQEIAMEHFVKKVEAAHCAACDLFIPMQFGIIQKHLKTMDHNRNRRLMMEQSKKSSLMVARSILNNKLISKKLERYLKGENPFTDSPEEEKEQEEAEGGALDEGAQGEAAGISEGAEGVPAQPPVPPEPAPGAVSPPPPPPPEEEEEGAVPLLGGALQRQIRGIPGLDVEDDEEGGGGAP

SEQ ID NO: 16127 - protein, 1017 aa, Homo sapiens
MVFSVRQCGHVGRTEEVLLTFKIFLVIICLHVVLVTSLEEDTDNSSLSPPPAKLSVVSFAPSSNGTPEVETTSLNDVTLSLLPSNETEKTKITIVKTFNASGVKPQRNICNLSSICNDSAFFRGEIMFQYDKESTVPQNQHITNGTLTGVLSLSELKRSELNKTLQTLSETYFIMCATAEAQSTLNCTFTIKLNNTMNACAVIAALERVKIRPMEHCCCSVRIPCPSSPEELEKLQCDLQDPIVCLADHPRGPPFSSSQSIPVVPRATVLSQVPKATSFAEPPDYSPVTHNVPSPIGEIQPLSPQPSAPIASSPAIDMPPQSETISSPMPQTHVSGTPPPVKASFSSPTVSAPANVNTTSAPPVQTDIVNTSSISDLENQVLQMEKALSLGSLEPNLAGEMINQVSRLLHSPPDMLAPLAQRLLKVVDDIGLQLNFSNTTISLTSPSLALAVIRVNASSFNTTTFVAQDPANLQVSLETQAPENSIGTITLPSSLMNNLPAHDMELASRVQFNFFETPALFQDPSLENLSLISYVISSSVANLTVRNLTRNVTVTLKHINPSQDELTVRCVFWDLGRNGGRGGWSDNGCSVKDRRLNETICTCSHLTSFGVLLDLSRTSVLPAQMMALTFITYIGCGLSSIFLSVTLVTYIAFEKIRRDYPSKILIQLCAALLLLNLVFLLDSWIALYKMQGLCISVAVFLHYFLLVSFTWMGLEAFHMYLALVKVFNTYIRKYILKFCIVGWGVPAVVVTIILTISPDNYGLGSYGKFPNGSPDDFCWINNNAVFYITVVGYFCVIFLLNVSMFIVVLVQLCRIKKKKQLGAQRKTSIQDLRSIAGLTFLLGITWGFAFFAWGPVNVTFMYLFAIFNTLQGFFIFIFYCVAKENVRKQWRRYLCCGKLRLAENSDWSKTATNGLKKQTVNQGVSSSSNSLQSSSNSTNSTTLLVNNDCSVHASGNGNASTERNGVSFSVQNGDVCLHDFTGKQHMFNEKEDSCNGKGRMALRRTSKRGSLHFIEQM

SEQ ID NO: 16128 - protein, 1014 aa, Homo sapiens
MVFSVRQCGHVGRTEEVLLTFKIFLVIICLHVVLVTSLEEDTDNSSLSPPPAKLSVVSFAPSSNEVETTSLNDVTLSLLPSNETEKTKITIVKTFNASGVKPQRNICNLSSICNDSAFFRGEIMFQYDKESTVPQNQHITNGTLTGVLSLSELKRSELNKTLQTLSETYFIMCATAEAQSTLNCTFTIKLNNTMNACAVIAALERVKIRPMEHCCCSVRIPCPSSPEELEKLQCDLQDPIVCLADHPRGPPFSSSQSIPVVPRATVLSQVPKATSFAEPPDYSPVTHNVPSPIGEIQPLSPQPSAPIASSPAIDMPPQSETISSPMPQTHVSGTPPPVKASFSSPTVSAPANVNTTSAPPVQTDIVNTSSISDLENQVLQMEKALSLGSLEPNLAGEMINQVSRLLHSPPDMLAPLAQRLLKVVDDIGLQLNFSNTTISLTSPSLALAVIRVNASSFNTTTFVAQDPANLQVSLETQAPENSIGTITLPSSLMNNLPAHDMELASRVQFNFFETPALFQDPSLENLSLISYVISSSVANLTVRNLTRNVTVTLKHINPSQDELTVRCVFWDLGRNGGRGGWSDNGCSVKDRRLNETICTCSHLTSFGVLLDLSRTSVLPAQMMALTFITYIGCGLSSIFLSVTLVTYIAFEKIRRDYPSKILIQLCAALLLLNLVFLLDSWIALYKMQGLCISVAVFLHYFLLVSFTWMGLEAFHMYLALVKVFNTYIRKYILKFCIVGWGVPAVVVTIILTISPDNYGLGSYGKFPNGSPDDFCWINNNAVFYITVVGYFCVIFLLNVSMFIVVLVQLCRIKKKKQLGAQRKTSIQDLRSIAGLTFLLGITWGFAFFAWGPVNVTFMYLFAIFNTLQGFFIFIFYCVAKENVRKQWRRYLCCGKLRLAENSDWSKTATNGLKKQTVNQGVSSSSNSLQSSSNSTNSTTLLVNNDCSVHASGNGNASTERNGVSFSVQNGDVCLHDFTGKQHMFNEKEDSCNGKGRMALRRTSKRGSLHFIEQM

SEQ ID NO: 16129 - protein, 1001 aa, Homo sapiens
MVFSVRQCGHVGRTEEVLLTFKIFLVIICLHVVLVTSLEEDTDNSSLSPPPEVETTSLNDVTLSLLPSNETEKTKITIVKTFNASGVKPQRNICNLSSICNDSAFFRGEIMFQYDKESTVPQNQHITNGTLTGVLSLSELKRSELNKTLQTLSETYFIMCATAEAQSTLNCTFTIKLNNTMNACAVIAALERVKIRPMEHCCCSVRIPCPSSPEELEKLQCDLQDPIVCLADHPRGPPFSSSQSIPVVPRATVLSQVPKATSFAEPPDYSPVTHNVPSPIGEIQPLSPQPSAPIASSPAIDMPPQSETISSPMPQTHVSGTPPPVKASFSSPTVSAPANVNTTSAPPVQTDIVNTSSISDLENQVLQMEKALSLGSLEPNLAGEMINQVSRLLHSPPDMLAPLAQRLLKVVDDIGLQLNFSNTTISLTSPSLALAVIRVNASSFNTTTFVAQDPANLQVSLETQAPENSIGTITLPSSLMNNLPAHDMELASRVQFNFFETPALFQDPSLENLSLISYVISSSVANLTVRNLTRNVTVTLKHINPSQDELTVRCVFWDLGRNGGRGGWSDNGCSVKDRRLNETICTCSHLTSFGVLLDLSRTSVLPAQMMALTFITYIGCGLSSIFLSVTLVTYIAFEKIRRDYPSKILIQLCAALLLLNLVFLLDSWIALYKMQGLCISVAVFLHYFLLVSFTWMGLEAFHMYLALVKVFNTYIRKYILKFCIVGWGVPAVVVTIILTISPDNYGLGSYGKFPNGSPDDFCWINNNAVFYITVVGYFCVIFLLNVSMFIVVLVQLCRIKKKKQLGAQRKTSIQDLRSIAGLTFLLGITWGFAFFAWGPVNVTFMYLFAIFNTLQGFFIFIFYCVAKENVRKQWRRYLCCGKLRLAENSDWSKTATNGLKKQTVNQGVSSSSNSLQSSSNSTNSTTLLVNNDCSVHASGNGNASTERNGVSFSVQNGDVCLHDFTGKQHMFNEKEDSCNGKGRMALRRTSKRGSLHFIEQM

SEQ ID NO: 16130 - protein, 1003 aa, Homo sapiens
MVFSVRQCGHVGRTEEVLLTFKIFLVIICLHVVLVTSLEEDTDNSSLSPPPAKLSVVSFAPSSNGTPEVETTSLNDVTLSLLPSNETGVKPQRNICNLSSICNDSAFFRGEIMFQYDKESTVPQNQHITNGTLTGVLSLSELKRSELNKTLQTLSETYFIMCATAEAQSTLNCTFTIKLNNTMNACAVIAALERVKIRPMEHCCCSVRIPCPSSPEELEKLQCDLQDPIVCLADHPRGPPFSSSQSIPVVPRATVLSQVPKATSFAEPPDYSPVTHNVPSPIGEIQPLSPQPSAPIASSPAIDMPPQSETISSPMPQTHVSGTPPPVKASFSSPTVSAPANVNTTSAPPVQTDIVNTSSISDLENQVLQMEKALSLGSLEPNLAGEMINQVSRLLHSPPDMLAPLAQRLLKVVDDIGLQLNFSNTTISLTSPSLALAVIRVNASSFNTTTFVAQDPANLQVSLETQAPENSIGTITLPSSLMNNLPAHDMELASRVQFNFFETPALFQDPSLENLSLISYVISSSVANLTVRNLTRNVTVTLKHINPSQDELTVRCVFWDLGRNGGRGGWSDNGCSVKDRRLNETICTCSHLTSFGVLLDLSRTSVLPAQMMALTFITYIGCGLSSIFLSVTLVTYIAFEKIRRDYPSKILIQLCAALLLLNLVFLLDSWIALYKMQGLCISVAVFLHYFLLVSFTWMGLEAFHMYLALVKVFNTYIRKYILKFCIVGWGVPAVVVTIILTISPDNYGLGSYGKFPNGSPDDFCWINNNAVFYITVVGYFCVIFLLNVSMFIVVLVQLCRIKKKKQLGAQRKTSIQDLRSIAGLTFLLGITWGFAFFAWGPVNVTFMYLFAIFNTLQGFFIFIFYCVAKENVRKQWRRYLCCGKLRLAENSDWSKTATNGLKKQTVNQGVSSSSNSLQSSSNSTNSTTLLVNNDCSVHASGNGNASTERNGVSFSVQNGDVCLHDFTGKQHMFNEKEDSCNGKGRMALRRTSKRGSLHFIEQM

SEQ ID NO: 16131 - protein, 993 aa, Homo sapiens
MVFSVRQCGHVGRTEEVLLTFKIFLVIICLHVVLVTSLEEDTDNSSLSPPPDVTLSLLPSNETEKTKITIVKTFNASGVKPQRNICNLSSICNDSAFFRGEIMFQYDKESTVPQNQHITNGTLTGVLSLSELKRSELNKTLQTLSETYFIMCATAEAQSTLNCTFTIKLNNTMNACAVIAALERVKIRPMEHCCCSVRIPCPSSPEELEKLQCDLQDPIVCLADHPRGPPFSSSQSIPVVPRATVLSQVPKATSFAEPPDYSPVTHNVPSPIGEIQPLSPQPSAPIASSPAIDMPPQSETISSPMPQTHVSGTPPPVKASFSSPTVSAPANVNTTSAPPVQTDIVNTSSISDLENQVLQMEKALSLGSLEPNLAGEMINQVSRLLHSPPDMLAPLAQRLLKVVDDIGLQLNFSNTTISLTSPSLALAVIRVNASSFNTTTFVAQDPANLQVSLETQAPENSIGTITLPSSLMNNLPAHDMELASRVQFNFFETPALFQDPSLENLSLISYVISSSVANLTVRNLTRNVTVTLKHINPSQDELTVRCVFWDLGRNGGRGGWSDNGCSVKDRRLNETICTCSHLTSFGVLLDLSRTSVLPAQMMALTFITYIGCGLSSIFLSVTLVTYIAFEKIRRDYPSKILIQLCAALLLLNLVFLLDSWIALYKMQGLCISVAVFLHYFLLVSFTWMGLEAFHMYLALVKVFNTYIRKYILKFCIVGWGVPAVVVTIILTISPDNYGLGSYGKFPNGSPDDFCWINNNAVFYITVVGYFCVIFLLNVSMFIVVLVQLCRIKKKKQLGAQRKTSIQDLRSIAGLTFLLGITWGFAFFAWGPVNVTFMYLFAIFNTLQGFFIFIFYCVAKENVRKQWRRYLCCGKLRLAENSDWSKTATNGLKKQTVNQGVSSSSNSLQSSSNSTNSTTLLVNNDCSVHASGNGNASTERNGVSFSVQNGDVCLHDFTGKQHMFNEKEDSCNGKGRMALRRTSKRGSLHFIEQM

SEQ ID NO: 16132 - protein, 995 aa, Homo sapiens
MVFSVRQCGHVGRTEEVLLTFKIFLVIICLHVVLVTSLEEDTDNSSLSPPPAKLSVVSFAPSSNGTPDVTLSLLPSNETGVKPQRNICNLSSICNDSAFFRGEIMFQYDKESTVPQNQHITNGTLTGVLSLSELKRSELNKTLQTLSETYFIMCATAEAQSTLNCTFTIKLNNTMNACAVIAALERVKIRPMEHCCCSVRIPCPSSPEELEKLQCDLQDPIVCLADHPRGPPFSSSQSIPVVPRATVLSQVPKATSFAEPPDYSPVTHNVPSPIGEIQPLSPQPSAPIASSPAIDMPPQSETISSPMPQTHVSGTPPPVKASFSSPTVSAPANVNTTSAPPVQTDIVNTSSISDLENQVLQMEKALSLGSLEPNLAGEMINQVSRLLHSPPDMLAPLAQRLLKVVDDIGLQLNFSNTTISLTSPSLALAVIRVNASSFNTTTFVAQDPANLQVSLETQAPENSIGTITLPSSLMNNLPAHDMELASRVQFNFFETPALFQDPSLENLSLISYVISSSVANLTVRNLTRNVTVTLKHINPSQDELTVRCVFWDLGRNGGRGGWSDNGCSVKDRRLNETICTCSHLTSFGVLLDLSRTSVLPAQMMALTFITYIGCGLSSIFLSVTLVTYIAFEKIRRDYPSKILIQLCAALLLLNLVFLLDSWIALYKMQGLCISVAVFLHYFLLVSFTWMGLEAFHMYLALVKVFNTYIRKYILKFCIVGWGVPAVVVTIILTISPDNYGLGSYGKFPNGSPDDFCWINNNAVFYITVVGYFCVIFLLNVSMFIVVLVQLCRIKKKKQLGAQRKTSIQDLRSIAGLTFLLGITWGFAFFAWGPVNVTFMYLFAIFNTLQGFFIFIFYCVAKENVRKQWRRYLCCGKLRLAENSDWSKTATNGLKKQTVNQGVSSSSNSLQSSSNSTNSTTLLVNNDCSVHASGNGNASTERNGVSFSVQNGDVCLHDFTGKQHMFNEKEDSCNGKGRMALRRTSKRGSLHFIEQM

SEQ ID NO: 16133 - protein, 987 aa, Homo sapiens
MVFSVRQCGHVGRTEEVLLTFKIFLVIICLHVVLVTSLEEDTDNSSLSPPPEVETTSLNDVTLSLLPSNETGVKPQRNICNLSSICNDSAFFRGEIMFQYDKESTVPQNQHITNGTLTGVLSLSELKRSELNKTLQTLSETYFIMCATAEAQSTLNCTFTIKLNNTMNACAVIAALERVKIRPMEHCCCSVRIPCPSSPEELEKLQCDLQDPIVCLADHPRGPPFSSSQSIPVVPRATVLSQVPKATSFAEPPDYSPVTHNVPSPIGEIQPLSPQPSAPIASSPAIDMPPQSETISSPMPQTHVSGTPPPVKASFSSPTVSAPANVNTTSAPPVQTDIVNTSSISDLENQVLQMEKALSLGSLEPNLAGEMINQVSRLLHSPPDMLAPLAQRLLKVVDDIGLQLNFSNTTISLTSPSLALAVIRVNASSFNTTTFVAQDPANLQVSLETQAPENSIGTITLPSSLMNNLPAHDMELASRVQFNFFETPALFQDPSLENLSLISYVISSSVANLTVRNLTRNVTVTLKHINPSQDELTVRCVFWDLGRNGGRGGWSDNGCSVKDRRLNETICTCSHLTSFGVLLDLSRTSVLPAQMMALTFITYIGCGLSSIFLSVTLVTYIAFEKIRRDYPSKILIQLCAALLLLNLVFLLDSWIALYKMQGLCISVAVFLHYFLLVSFTWMGLEAFHMYLALVKVFNTYIRKYILKFCIVGWGVPAVVVTIILTISPDNYGLGSYGKFPNGSPDDFCWINNNAVFYITVVGYFCVIFLLNVSMFIVVLVQLCRIKKKKQLGAQRKTSIQDLRSIAGLTFLLGITWGFAFFAWGPVNVTFMYLFAIFNTLQGFFIFIFYCVAKENVRKQWRRYLCCGKLRLAENSDWSKTATNGLKKQTVNQGVSSSSNSLQSSSNSTNSTTLLVNNDCSVHASGNGNASTERNGVSFSVQNGDVCLHDFTGKQHMFNEKEDSCNGKGRMALRRTSKRGSLHFIEQM

SEQ ID NO: 16134 - protein, 979 aa, Homo sapiens
MVFSVRQCGHVGRTEEVLLTFKIFLVIICLHVVLVTSLEEDTDNSSLSPPPDVTLSLLPSNETGVKPQRNICNLSSICNDSAFFRGEIMFQYDKESTVPQNQHITNGTLTGVLSLSELKRSELNKTLQTLSETYFIMCATAEAQSTLNCTFTIKLNNTMNACAVIAALERVKIRPMEHCCCSVRIPCPSSPEELEKLQCDLQDPIVCLADHPRGPPFSSSQSIPVVPRATVLSQVPKATSFAEPPDYSPVTHNVPSPIGEIQPLSPQPSAPIASSPAIDMPPQSETISSPMPQTHVSGTPPPVKASFSSPTVSAPANVNTTSAPPVQTDIVNTSSISDLENQVLQMEKALSLGSLEPNLAGEMINQVSRLLHSPPDMLAPLAQRLLKVVDDIGLQLNFSNTTISLTSPSLALAVIRVNASSFNTTTFVAQDPANLQVSLETQAPENSIGTITLPSSLMNNLPAHDMELASRVQFNFFETPALFQDPSLENLSLISYVISSSVANLTVRNLTRNVTVTLKHINPSQDELTVRCVFWDLGRNGGRGGWSDNGCSVKDRRLNETICTCSHLTSFGVLLDLSRTSVLPAQMMALTFITYIGCGLSSIFLSVTLVTYIAFEKIRRDYPSKILIQLCAALLLLNLVFLLDSWIALYKMQGLCISVAVFLHYFLLVSFTWMGLEAFHMYLALVKVFNTYIRKYILKFCIVGWGVPAVVVTIILTISPDNYGLGSYGKFPNGSPDDFCWINNNAVFYITVVGYFCVIFLLNVSMFIVVLVQLCRIKKKKQLGAQRKTSIQDLRSIAGLTFLLGITWGFAFFAWGPVNVTFMYLFAIFNTLQGFFIFIFYCVAKENVRKQWRRYLCCGKLRLAENSDWSKTATNGLKKQTVNQGVSSSSNSLQSSSNSTNSTTLLVNNDCSVHASGNGNASTERNGVSFSVQNGDVCLHDFTGKQHMFNEKEDSCNGKGRMALRRTSKRGSLHFIEQM

SEQ ID NO: 16135 - protein, 966 aa, Homo sapiens
MVFSVRQCGHVGRTEEVLLTFKIFLVIICLHVVLVTSLEEDTDNSSLSPPPAKLSVVSFAPSSNGTPEVETTSLNDVTLSLLPSNETEKTKITIVKTFNASGVKPQRNICNLSSICNDSAFFRGEIMFQYDKESTVPQNQHITNGTLTGVLSLSELKRSELNKTLQTLSETYFIMCATAEAQSTLNCTFTIKLNNTMNACAVIAALERVKIRPMEHCCCSVRIPCPSSPEELEKLQCDLQDPIVCLADHPRGPPFSSSQSIPVVPRATVLSQVPKATSFAEPPDYSPVTHNVPSPIGEIQPLSPQPSAPIASSPAIDMPPQSETISSPMPQTHVSGTPPPVKASFSSPTVSAPANVNTTSAPPVQTDIVNTSSISDLENQVLQMEKALSLGSLEPNLAGEMINQVSRLLHSPPDMLAPLAQRLLKVVDDIGLQLNFSNTTISLTSPSLALAVIRVNASSFNTTTFVAQDPANLQVSLETQAPENSIGTITLPSSLMNNLPAHDMELASRVQFNFFETPALFQDPSLENLSLISYVISSSVANLTVRNLTRNVTVTLKHINPSQDELTVRCVFWDLGRNGGRGGWSDNGCSVKDRRLNETICTCSHLTSFGVLLDLSRTSVLPAQMMALTFITYIGCGLSSIFLSVTLVTYIAFEKIRRDYPSKILIQLCAALLLLNLVFLLDSWIALYKMQGLCISVAVFLHYFLLVSFTWMGLEAFHMYLALVKVFNTYIRKYILKFCIVGWGVPAVVVTIILTISPDNYGLGSYGKFPNGSPDDFCWINNNAVFYITVVGYFCVIFLLNVSMFIVVLVQLCRIKKKKQLGAQRKTSIQDLRSIAGLTFLLGITWGFAFFAWGPVNVTFMYLFAIFNTLQGFFIFIFYCVAKENVRKQWRRYLCCGKLRLAENSGNASTERNGVSFSVQNGDVCLHDFTGKQHMFNEKEDSCNGKGRMALRRTSKRGSLHFIEQM

SEQ ID NO: 16136 - protein, 898 aa, Homo sapiens
MVFSVRQCGHVGRTEEVLLTFKIFLVIICLHVVLVTSLEEDTDNSSLSPPPEVETTSLNDVTLSLLPSNETGVKPQRNICNLSSICNDSAFFRGEIMFQYDKESTVPQNQHITNGTLTGVLSLSELKRSELNKTLQTLSETYFIMCATAEAQSTLNCTFTIKLNNTMNACAVIAALERVKIRPMEHCCCSVRIPCPSSPEELEKLQCDLQDPIVCLADHPRGPPFSSSQSIPVVPRATVLSQVPKATSFAEPPDYSPVTHNVPSPIGEIQPLSPQPSAPIASSPAIDMPPQSETISSPMPQTHVSGTPPPVKASFSSPTVSAPANVNTTSAPPVQTDIVNTSSISDLENQVLQMEKALSLGSLEPNLAGEMINQVSRLLHSPPDMLAPLAQRLLKVVDDIGLQLNFSNTTISLTSPSLALAVIRVNASSFNTTTFVAQDPANLQDELTVRCVFWDLGRNGGRGGWSDNGCSVKDRRLNETICTCSHLTSFGVLLDLSRTSVLPAQMMALTFITYIGCGLSSIFLSVTLVTYIAFEKIRRDYPSKILIQLCAALLLLNLVFLLDSWIALYKMQGLCISVAVFLHYFLLVSFTWMGLEAFHMYLALVKVFNTYIRKYILKFCIVGWGVPAVVVTIILTISPDNYGLGSYGKFPNGSPDDFCWINNNAVFYITVVGYFCVIFLLNVSMFIVVLVQLCRIKKKKQLGAQRKTSIQDLRSIAGLTFLLGITWGFAFFAWGPVNVTFMYLFAIFNTLQGFFIFIFYCVAKENVRKQWRRYLCCGKLRLAENSDWSKTATNGLKKQTVNQGVSSSSNSLQSSSNSTNSTTLLVNNDCSVHASGNGNASTERNGVSFSVQNGDVCLHDFTGKQHMFNEKEDSCNGKGRMALRRTSKRGSLHFIEQM

SEQ ID NO: 16137 - protein, 779 aa, Homo sapiens
MRTLEDSSGTVLHRLIQEQLRYGNLTETRTLLAIQQQALRGGAGTGGTGSPQASLEILAPEDSQVLQQATRQEPQGQEHQGGENHLAENTLYRLCPQPSKGEELPTYEEAKAHSQYYAAQQAGTRPHAGDRDPRGAPGGSRRQDEALRELRHGHVRSLSERLLQLSLERNGARAPSHMSSSHSFPQLARNQQGPPLRGPPAEGPESRGPPPQYPHVVLAHETTTAVTDPRYRARGSPHFQHAEVRILQAQVPPVFLQQQQQYQYLQQSQEHPPPPHPAALGHGPLSSLSPPAVEGPVSAQASSATSGSAHLAQMEAVLRENARLQRDNERLQRELESSAEKAGRIEKLESEIQRLSEAHESLTRASSKREALEKTMRNKMDSEMRRLQDFNRDLRERLESANRRLASKTQEAQAGSQDMVAKLLAQSYEQQQEQEKLEREMALLRGAIEDQRRRAELLEQALGNAQGRAARAEEELRKKQAYVEKVERLQQALGQLQAACEKREQLELRLRTRLEQELKALRAQQRQAGAPGGSSGSGGSPELSALRLSEQLREKEEQILALEADMTKWEQKYLEERAMRQFAMDAAATAAAQRDTTLIRHSPQPSPSSSFNEGLLTGGHRHQEMESRLKVLHAQILEKDAVIKVLQQRSRRDPGKAIQGSLRPAKSVPSVFAAAAAGTQGWQGLSSSERQTADAPARLTTDRAPTEEPVVTAPPAAHAKHGSRDGSTQTEGPPDSTSTCLPPEPDSLLGCSSSQRAASLDSVATSRVQDLSDMVEILI

SEQ ID NO: 16138 - protein, 780 aa, Homo sapiens
MRTLEDSSGTVLHRLIQEQLRYGNLTETRTLLAIQQQALRGGAGTGGTGSPQASLEILAPEDSQVLQQATRQEPQGQEHQGGENHLAENTLYRLCPQPSKGEELPTYEEAKAHSQYYAAQQAGTRPHAGDRDPRGAPGGSRRQDEALRELRHGHVRSLSERLLQLSLERNGARAPSHMSSSHSFPQLARNQQGPPLRGPPAEGPESRGPPPQYPHVVLAHETTTAVTDPRYRARGSPHFQHAEVRILQAQVPPVFLQQQQQYQYLQQSQEHPPPPHPAALGHGPLSSLSPPAVEGPVSAQASSATSGSAHLAQMEAVLRENARLQRDNERLQRELESSAEKAGRIEKLESEIQRLSEAHESLTRASSKREALEKTMRNKMDSEMRRLQDFNRDLRERLESANRRLASKTQEAQAGSQDMVAKLLAQSYEQQQEQEKLEREMALLRGAIEDQRRRAELLEQALGNAQGRAARAEEELRKKQAYVEKVERLQQALGQLQAACEKREQLELRLRTRLEQELKALRAQQRQAGAPGGSSGSGGSPELSALRLSEQLREKEEQILALEADMTKWEQKYLEERAMRQFAMDAAATAAAQRDTTLIRHSPQPSPSSSFNEGLLTGGHRHQEMESRLKVLHAQILEKDAVIKVLQQRSRRDPGKAIQGSLRPAKSVPSVFAAAAAGTQGWQGLSSSERQTADAPARLTTADRAPTEEPVVTAPPAAHAKHGSRDGSTQTEGPPDSTSTCLPPEPDSLLGCSSSQRAASLDSVATSRVQDLSDMVEILI

SEQ ID NO: 16139 - protein, 777 aa, Homo sapiens
MRTLEDSSGTVLHRLIQEQLRYGNLTETRTLLAIQQQALRGGAGTGGTGSPQASLEILAPEDSQVLQQATRQEPQGQEHQGGENHLAENTLYRLCPQPSKGEELPTYEEAKAHSQYYAAQQAGTRPHAGDRDPRGAPGGSRRQDEALRELRHGHVRSLSERLLQLSLERNGARAPSHMSSSHSFPQLARNQQGPPLRGPPAEGPESRGPPPQYPHVVLAHETTTAVTDPRYRARGSPHFQHAEVRILQAQVPPVFLQQQQQYQYLQQSQEHPPPPHPAALGHGPLSSLSPPAVEGPVSAQASSATSGSAHLAQMEAVLRENARLQRDNERLQRELESSAEKAGRIEKLESEIQRLSEAHESLTRASSKREALEKTMRNKMDSEMRRLQDFNRDLRERLESANRRLASKTQEAQAGSQDMVAKLLAQSYEQQQEQEKLEREMALLRGAIEDQRRRAELLEQALGNAQGRAARAEEELRKKQAYVEKVERLQQALGQLQAACEKREQLELRLRTRLEQELKALRAQQAGAPGGSSGSGGSPELSALRLSEQLREKEEQILALEADMTKWEQKYLEERAMRQFAMDAAATAAAQRDTTLIRHSPQPSPSSSFNEGLLTGGHRHQEMESRLKVLHAQILEKDAVIKVLQQRSRRDPGKAIQGSLRPAKSVPSVFAAAAAGTQGWQGLSSSERQTADAPARLTTDRAPTEEPVVTAPPAAHAKHGSRDGSTQTEGPPDSTSTCLPPEPDSLLGCSSSQRAASLDSVATSRVQDLSDMVEILI

SEQ ID NO: 16140 - protein, 837 aa, Homo sapiens
MTGRKASGGTPCTLRKGAPIITLGKNWTERLAAGDSVGCSGARCHRPLSRQLCASQRSMRTLEDSSGTVLHRLIQEQLRYGNLTETRTLLAIQQQALRGGAGTGGTGSPQASLEILAPEDSQVLQQATRQEPQGQEHQGGENHLAENTLYRLCPQPSKGEELPTYEEAKAHSQYYAAQQAGTRPHAGDRDPRGAPGGSRRQDEALRELRHGHVRSLSERLLQLSLERNGARAPSHMSSSHSFPQLARNQQGPPLRGPPAEGPESRGPPPQYPHVVLAHETTTAVTDPRYRARGSPHFQHAEVRILQAQVPPVFLQQQQQYQYLQQSQEHPPPPHPAALGHGPLSSLSPPAVEGPVSAQASSATSGSAHLAQMEAVLRENARLQRDNERLQRELESSAEKAGRIEKLESEIQRLSEAHESLTRASSKREALEKTMRNKMDSEMRRLQDFNRDLRERLESANRRLASKTQEAQAGSQDMVAKLLAQSYEQQQEQEKLEREMALLRGAIEDQRRRAELLEQALGNAQGRAARAEEELRKKQAYVEKVERLQQALGQLQAACEKREQLELRLRTRLEQELKALRAQQRQAGAPGGSSGSGGSPELSALRLSEQLREKEEQILALEADMTKWEQKYLEERAMRQFAMDAAATAAAQRDTTLIRHSPQPSPSSSFNEGLLTGGHRHQEMESRLKVLHAQILEKDAVIKVLQQRSRRDPGKAIQGSLRPAKSVPSVFAAAAAGTQGWQGLSSSERQTADAPARLTTDRAPTEEPVVTAPPAAHAKHGSRDGSTQTEGPPDSTSTCLPPEPDSLLGCSSSQRAASLDSVATSRVQDLSDMVEILI

SEQ ID NO: 16141 - protein, 453 aa, Homo sapiens
MSKISEAVKRARAAFSSGRTRPLQFRIQQLEALQRLIQEQEQELVGALAADLHKNEWNAYYEEVVYVLEEIEYMIQKLPEWAADEPVEKTPQTQQDELYIHSEPLGVVLVIGTWNYPFNLTIQPMVGAIAAGNSVVLKPSELSENMASLLATIIPQYLDKDLYPVINGGVPETTELLKERFDHILYTGSTGVGKIIMTAAAKHLTPVTLELGGKSPCYVDKNCDLDVACRRIAWGKFMNSGQTCVAPDYILCDPSIQNQIVEKLKKSLKEFYGEDAKKSRDYGRIISARHFQRVMGLIEGQKVAYGGTGDAATRYIAPTILTDVDPQSPVMQEEIFGPVLPIVCVRSLEEAIQFINQREKPLALYMFSSNDKVIKKMIAETSSGGVAANDVIVHITLHSLPFGGVGNSGMGSYHGKKSFETFSHRRSCLVRPLMNDEGLKVRYPPSPAKMTQH

SEQ ID NO: 16142 - protein, 132 aa, Homo sapiens
MLTAAVLSCALLLALPATRGAQMGLAPMEGIRRPDQALLPELPGLGLRAPLKKTTAEQAEEDLLQEAQALAEVLDLQDREPRSSRRCVRLHESCLGQQVPCCDPCATCYCRFFNAFCYCRKLGTAMNPCSRT

SEQ ID NO: 16143 - protein, 1164 aa, Homo sapiens
MPTMRRTVSEIRSRAEGYEKTDDVSEKTSLADQEEVRTIFINQPQLTKFCNNHVSTAKYNIITFLPRFLYSQFRRAANSFFLFIALLQQIPDVSPTGRYTTLVPLLFILAVAAIKEIIEDIKRHKADNAVNKKQTQVLRNGAWEIVHWEKVAVGEIVKVTNGEHLPADLISLSSSEPQAMCYIETSNLDGETNLKIRQGLPATSDIKDVDSLMRISGRIECESPNRHLYDFVGNIRLDGHGTVPLGADQILLRGAQLRNTQWVHGIVVYTGHDTKLMQNSTSPPLKLSNVERITNVQILILFCILIAMSLVCSVGSAIWNRRHSGKDWYLNLNYGGASNFGLNFLTFIILFNNLIPISLLVTLEVVKFTQAYFINWDLDMHYEPTDTAAMARTSNLNEELGQVKYIFSDKTGTLTCNVMQFKKCTIAGVAYGHVPEPEDYGCSPDEWQNSQFGDEKTFSDSSLLENLQNNHPTAPIICEFLTMMAVCHTAVPEREGDKIIYQAASPDEGALVRAAKQLNFVFTGRTPDSVIIDSLGQEERYELLNVLEFTSARKRMSVIVRTPSGKLRLYCKGADTVIYDRLAETSKYKEITLKHLEQFATEGLRTLCFAVAEISESDFQEWRAVYQRASTSVQNRLLKLEESYELIEKNLQLLGATAIEDKLQDQVPETIETLMKADIKIWILTGDKQETAINIGHSCKLLKKNMGMIVINEGSLDGTRETLSRHCTTLGDALRKENDFALIIDGKTLKYALTFGVRQYFLDLALSCKAVICCRVSPLQKSEVVEMVKKQVKVVTLAIGDGANDVSMIQTAHVGVGISGNEGLQAANSSDYSIAQFKYLKNLLMIHGAWNYNRVSKCILYCFYKNIVLYIIEIWFAFVNGFSGQILFERWCIGLYNVMFTAMPPLTLGIFERSCRKENMLKYPELYKTSQNALDFNTKVFWVHCLNGLFHSVILFWFPLKALQYGTAFGNGKTSDYLLLGNFVYTFVVITVCLKAGLETSYWTWFSHIAIWGSIALWVVFFGIYSSLWPAIPMAPDMSGEAAMLFSSGVFWMGLLFIPVASLLLDVVYKVIKRTAFKTLVDEVQELEAKSQDPGAVVLGKSLTERAQLLKNVFKKNHVNLYRSESLQQNLLHGYAFSQDENGIVSQSEVIRAYDTTKQRPDEW

SEQ ID NO: 16144 - protein, 1149 aa, Homo sapiens
MPTMRRTVSEIRSRAEGYEKTDDVSEKTSLADQEEVRTIFINQPQLTKFCNNHVSTAKYNIITFLPRFLYSQFRRAANSFFLFIALLQQIPDVSPTGRYTTLVPLLFILAVAAIKEIIEDIKRHKADNAVNKKQTQVLRNGAWEIVHWEKVAVGEIVKVTNGEHLPADLISLSSSEPQAMCYIETSNLDGETNLKIRQGLPATSDIKDVDSLMRISGRIECESPNRHLYDFVGNIRLDGHGTVPLGADQILLRGAQLRNTQWVHGIVVYTGHDTKLMQNSTSPPLKLSNVERITNVQILILFCILIAMSLVCSVGSAIWNRRHSGKDWYLNLNYGGASNFGLNFLTFIILFNNLIPISLLVTLEVVKFTQAYFINWDLDMHYEPTDTAAMARTSNLNEELGQVKYIFSDKTGTLTCNVMQFKKCTIAGVAYGQNSQFGDEKTFSDSSLLENLQNNHPTAPIICEFLTMMAVCHTAVPEREGDKIIYQAASPDEGALVRAAKQLNFVFTGRTPDSVIIDSLGQEERYELLNVLEFTSARKRMSVIVRTPSGKLRLYCKGADTVIYDRLAETSKYKEITLKHLEQFATEGLRTLCFAVAEISESDFQEWRAVYQRASTSVQNRLLKLEESYELIEKNLQLLGATAIEDKLQDQVPETIETLMKADIKIWILTGDKQETAINIGHSCKLLKKNMGMIVINEGSLDGTRETLSRHCTTLGDALRKENDFALIIDGKTLKYALTFGVRQYFLDLALSCKAVICCRVSPLQKSEVVEMVKKQVKVVTLAIGDGANDVSMIQTAHVGVGISGNEGLQAANSSDYSIAQFKYLKNLLMIHGAWNYNRVSKCILYCFYKNIVLYIIEIWFAFVNGFSGQILFERWCIGLYNVMFTAMPPLTLGIFERSCRKENMLKYPELYKTSQNALDFNTKVFWVHCLNGLFHSVILFWFPLKALQYGTAFGNGKTSDYLLLGNFVYTFVVITVCLKAGLETSYWTWFSHIAIWGSIALWVVFFGIYSSLWPAIPMAPDMSGEAAMLFSSGVFWMGLLFIPVASLLLDVVYKVIKRTAFKTLVDEVQELEAKSQDPGAVVLGKSLTERAQLLKNVFKKNHVNLYRSESLQQNLLHGYAFSQDENGIVSQSEVIRAYDTTKQRPDEW

SEQ ID NO: 16145 - protein, 1149 aa, Homo sapiens
MPTMRRTVSEIRSRAEGYEKTDDVSEKTSLADQEEVRTIFINQPQLTKFCNNHVSTAKYNIITFLPRFLYSQFRRAANSFFLFIALLQQIPDVSPTGRYTTLVPLLFILAVAAIKEIIEDIKRHKADNAVNKKQTQVLRNGAWEIVHWEKVNVGDIVIIKGKEYIPADTVLLSSSEPQAMCYIETSNLDGETNLKIRQGLPATSDIKDVDSLMRISGRIECESPNRHLYDFVGNIRLDGHGTVPLGADQILLRGAQLRNTQWVHGIVVYTGHDTKLMQNSTSPPLKLSNVERITNVQILILFCILIAMSLVCSVGSAIWNRRHSGKDWYLNLNYGGASNFGLNFLTFIILFNNLIPISLLVTLEVVKFTQAYFINWDLDMHYEPTDTAAMARTSNLNEELGQVKYIFSDKTGTLTCNVMQFKKCTIAGVAYGQNSQFGDEKTFSDSSLLENLQNNHPTAPIICEFLTMMAVCHTAVPEREGDKIIYQAASPDEGALVRAAKQLNFVFTGRTPDSVIIDSLGQEERYELLNVLEFTSARKRMSVIVRTPSGKLRLYCKGADTVIYDRLAETSKYKEITLKHLEQFATEGLRTLCFAVAEISESDFQEWRAVYQRASTSVQNRLLKLEESYELIEKNLQLLGATAIEDKLQDQVPETIETLMKADIKIWILTGDKQETAINIGHSCKLLKKNMGMIVINEGSLDGTRETLSRHCTTLGDALRKENDFALIIDGKTLKYALTFGVRQYFLDLALSCKAVICCRVSPLQKSEVVEMVKKQVKVVTLAIGDGANDVSMIQTAHVGVGISGNEGLQAANSSDYSIAQFKYLKNLLMIHGAWNYNRVSKCILYCFYKNIVLYIIEIWFAFVNGFSGQILFERWCIGLYNVMFTAMPPLTLGIFERSCRKENMLKYPELYKTSQNALDFNTKVFWVHCLNGLFHSVILFWFPLKALQYGTAFGNGKTSDYLLLGNFVYTFVVITVCLKAGLETSYWTWFSHIAIWGSIALWVVFFGIYSSLWPAIPMAPDMSGEAAMLFSSGVFWMGLLFIPVASLLLDVVYKVIKRTAFKTLVDEVQELEAKSQDPGAVVLGKSLTERAQLLKNVFKKNHVNLYRSESLQQNLLHGYAFSQDENGIVSQSEVIRAYDTTKQRPDEW

SEQ ID NO: 16146 - protein, 608 aa, Homo sapiens
MAAAAAAVGPGAGGAGSAVPGGAGPCATVSVFPGARLLTIGDANGEIQRHAEQQALRLEVRAGPDSAGIALYSHEDVCVFKCSVSRETECSRVGKQSFIITLGCNSVLIQFATPNDFCSFYNILKTCRGHTLERSVFSERTEESSAVQYFQFYGYLSQQQNMMQDYVRTGTYQRAILQNHTDFKDKIVLDVGCGSGILSFFAAQAGARKIYAVEASTMAQHAEVLVKSNNLTDRIVVIPGKVEEVSLPEQVDIIISEPMGYMLFNERMLESYLHAKKYLKPSGNMFPTIGDVHLAPFTDEQLYMEQFTKANFWYQPSFHGVDLSALRGAAVDEYFRQPVVDTFDIRILMAKSVKYTVNFLEAKEGDLHRIEIPFKFHMLHSGLVHGLAFWFDVAFIGSIMTVWLSTAPTEPLTHWYQVRCLFQSPLFAKAGDTLSGTCLLIANKRQSYDISIVAQVDQTGSKSSNLLDLKNPFFRYTGTTPSPPPGSHYTSPSENMWNTGSTYNLSSGMAVAGMPTAYDLSSVIASGSSVGHNNLIPLANTGIVNHTHSRMGSIMSTGIVQGSSGAQGSGGGSTSAHYAVNSQFTMGGPAISMASPMSIPTNTMHYGS

SEQ ID NO: 16147 - protein, 585 aa, Homo sapiens
MAAAAAAVGPGAGGAGSAVPGGAGPCATVSVFPGARLLTIGDANGEIQRHAEQQALRLEVRAGPDSAGIALYSHEDVCVFKCSVSRETECSRVGKQSFIITLGCNSVLIQFATPNDFCSFYNILKTCRGHTLERSVFSERTEESSAVQYFQFYGYLSQQQNMMQDYVRTGTYQRAILQNHTDFKDKIVLDVGCGSGILSFFAAQAGARKIYAVEASTMAQHAEVLVKSNNLTDRIVVIPGKVEEVSLPEQVDIIISEPMGYMLFNERMLESYLHAKKYLKPSGNMFPTIGDVHLAPFTDEQLYMEQFTKANFWYQPSFHGVDLSALRGAAVDEYFRQPVVDTFDIRILMAKSVKYTVNFLEAKEGDLHRIEIPFKFHMLHSGLVHGLAFWFDVAFIGSIMTVWLSTAPTEPLTHWYQVRCLFQSPLFAKAGDTLSGTCLLIANKRQSYDISIVAQVDQTGSKSSNLLDLKNPFFRYTGTTPSPPPGSHYTSPSENMWNTGSTYNLSSGMAVAGMPTAYDLSSVIASGSSVGHNNLIPLGSSGAQGSGGGSTSAHYAVNSQFTMGGPAISMASPMSIPTNTMHYGS

SEQ ID NO: 16148 - protein, 384 aa, Homo sapiens
MAAAAAAVGPGAGGAGSAVPGGAGPCATVSVFPGARLLTIGDANGEIQRHAEQQALRLEVRAGPDSAGIALYSHEDVCVFKCSVSRETECSRVGKQSFIITLGCNSVLIQFATPNDFCSFYNILKTCRGHTLERSVFSERTEESSAVQYFQFYGYLSQQQNMMQDYVRTGTYQRAILQNHTDFKDKIVLDVGCGSGILSFFAAQAGARKIYAVEASTMAQHAEVLVKSNNLTDRIVVIPGKVEEVSLPEQVDIIISEPMGYMLFNERMLESYLHAKKYLKPSGNMFPTIGDVHLAPFTDEQLYMEQFTKANFWYQPSFHGVDLSALRGAAVDEYFRQPVVDTFDIRILMAKSVKYTVNFLEAKEGDLHSACLASPAATALCLPG

SEQ ID NO: 16149 - protein, 329 aa, Homo sapiens
MWGLKVLLLPVVSFALYPEEILDTHWELWKKTHRKQYNNKVDEISRRLIWEKNLKYISIHNLEASLGVHTYELAMNHLGDMTSEEVVQKMTGLKVPLSHSRSNDTLYIPEWEGRAPDSVDYRKKGYVTPVKNQGQCGSCWAFSSVGALEGQLKKKTGKLLNLSPQNLVDCVSENDGCGGGYMTNAFQYVQKNRGIDSEDAYPYVGQEESCMYNPTGKAAKCRGYREIPEGNEKALKRAVARVGPVSVAIDASLTSFQFYSKGVYYDESCNSDNLNHAVLAVGYGIQKGNKHWIIKNSWGENWGNKGYILMARNKNNACGIANLASFPKM

SEQ ID NO: 16150 - protein, 705 aa, Homo sapiens
MQPTATMATAATTTTTTTATVALTTSWDNATGRPTAEPDPILDNYVLLVVVMSLFVGGTLVVLSGVLLLCKRCWDVHQRLNRAMEEAEKTTTTYLDNGTHPAQDPDFRGEDPECQDAETERFLSTSSTGRRVSFNEAALFEQSRKTQDKGRRYTLTEGDFHHLKNARLTHLHLPPLKIVTIHECDSGEASSATTPHPATSPKATLAIFQPPGKALTGRSVGPSSALPGDPYNSAAGATDFAEISPSASSDSGEGTSLDAGTRSTKAGGPGAAAGPGEAGPGSGAGTVLQFLTRLRRHASLDGASPYFKVKKWKLEPSQRAASLDTRGSPKRHHFQRQRAASESTEQEEGDAPQEDFIQYIARAGDAVAFPHPRPFLASPPPALGRLEAAEAAGGASPDSPPERGAGSAGPEQQQPPLEPDAERDAGPEQAQTSYRDLWSLRASLELHAAASDHSSSGNDRDSVRSGDSSGSGSGGAAPAFPPPSPPAPRPKDGEARRLLQMDSGYASIEGRGAGDDTEPPAAPARPRSPRAWPRRPRRDYSIDEKTDALFHEFLRHDPHFDDTPAAARHRARAHPHARKQWQRGRQHSDPGARAAPALAGTPAPPAGAARPARAPLRRGDSVDGPPDGRTLGGAGDDPAIPVIEEEPGGGGCPGSGLCVLPSGSVLDKLAAGLDERLFPPRLAEPVVATPALVAAAPTSPDHSPA

SEQ ID NO: 16151 - protein, 453 aa, Homo sapiens
MQPTATMATAATTTTTTTATVALTTSWDNATGRPTAEPDPILDNYVLLVVVMSLFVGGTLVVLSGVLLLCKRCWDVHQRLNRAMEEAEKTTTTYLDNGTHPAQDPDFRGEDPECQDAETERFLSTSSTGRRVSFNEAALFEQSRKTQDKGRRYTLTEGDFHHLKNARLTHLHLPPLKIVTIHECDSGEASSATTPHPATSPKATLAIFQPPGKALTGRSVGPSSALPGDPYNSAAGATDFAEISPSASSDSGEGTSLDAGTRSTKAGGPGAAAGPGEAGPGSGAGTVLQFLTRLRRHASLDGASPYFKVKKWKLEPSQRAASLDTRGSPKRHHFQRQRAASESTEQEEGDAPQEDFIQYIARAGDAVAFPHPRPFLASPPPALGRYFSVDGGARGGPVGPCPPSPPPRRPRERSPGPVDTRSPASSGKAPPRGGLTGATSPAWTRGGKQGETG

SEQ ID NO: 16152 - protein, 131 aa, Homo sapiens
MDVLFVAIFAVPLILGQEYEDEERLGEDEYYQVVYYYTVTPSYDDFSADFTIDYSIFESEDRLNRLDKDITEAIETTISLETARADHPKPVTVKPVTTEPSPDLNDAVSSLRSPIPLLLSCAFVQVGMYFM

SEQ ID NO: 16153 - protein, 484 aa, Homo sapiens
MAGPWTFTLLCGLLAATLIQATLSPTAVLILGPKVIKEKLTQELKDHNATSILQQLPLLSAMREKPAGGIPVLGSLVNTVLKHIIWLKVITANILQLQVKPSANDQELLVKIPLDMVAGFNTPLVKTIVEFHMTTEAQATIRMDTSASGPTRLVLSDCATSHGSLRIQLLHKLSFLVNALAKQVMNLLVPSLPNLVKNQLCPVIEASFNGMYADLLQLVKVPISLSIDRLEFDLLYPAIKGDTIQLYLGAKLLDSQGKVTKWFNNSAASLTMPTLDNIPFSLIVSQDVVKAAVAAVLSPEEFMVLLDSVLPESAHRLKSSIGLINEKAADKLGSTQIVKILTQDTPEFFIDQGHAKVAQLIVLEVFPSSEALRPLFTLGIEASSEAQFYTKGDQLILNLNNISSDRIQLMNSGIGWFQPDVLKNIITEIIHSILLPNQNGKLRSGVPVSLVKALGFEAAESSLTKDALVLTPASLWKPSSPVSQ

SEQ ID NO: 16154 - protein, 160 aa, Homo sapiens
MCCPGGHYTLILRRGNRFRREKRPAKVTGAQTEVQLAPPLPRGRARRSPWSVPISLSIDRLEFDLLYPAIKGDTIQLYLGAKLLDSQGKVTKWFNNSAASLTMPTLDNIPFSLIVSQDVVKAAVAAVLSPEEFMVLLDSVLPESAHRLKSSIGLINEKLQ

SEQ ID NO: 16155 - protein, 825 aa, Homo sapiens
MAAGKFASLPRNMPVNHQFPLASSMDLLSSRSPLAEHRPDAYQDVSIHGTLPRKKKGPPPIRSCDDFSHMGTLPHSKSPRQNSPVTQDGIQESPWQDRHGETFTFRDPHLLDPTVEYVKFSKERHIMDRTPEKLKKELEEELLLSSEDLRSHAWYHGRIPRQVSENLVQRDGDFLVRDSLSSPGNFVLTCQWKNLAQHFKINRTVLRLSEAYSRVQYQFEMESFDSIPGLVRCYVGNRRPISQQSGAIIFQPINRTVPLRCLEEHYGTSPGQAREGSLTKGRPDVAKRLSLTMGGVQAREQNLPRGNLLRNKEKSGSQPACLDHMQDRRALSLKAHQSESYLPIGCKLPPQSSGVDTSPCPNSPVFRTGSEPALSPAVVRRVSSDARAGEALRGSDSQLCPKPPPKPCKVPFLKVPSSPSAWLNSEANYCELNPAFATGCGRGAKLPSCAQGSHTELLTAKQNEAPGPRNSGVNYLILDDDDRERPWEPAAAQMEKGQWDKGEFVTPLLETVSSFRPNEFESKFLPPENKPLETAMLKRAKELFTNNDPKVIAQHVLSMDCRVARILGVSEEMRRNMGVSSGLELITLPHGHQLRLDIIERHNTMAIGIAVDILGCTGTLEDRAATLSKIIQVAVELKDSMGDLYSFSALMKALEMPQITRLEKTWTALRHQYTQTAILYEKQLKPFSKLLHEGRESTCVPPNNVSVPLLMPLVTLMERQAVTFEGTDMWEKNDQSCEIMLNHLATARFMAEAADSYRMNAERILAGFQPDEEMNEICKTEFQMRLLWGSKGAQVNQTERYEKFNQILTALSRKLEPPPVKQAEL

SEQ ID NO: 16156 - protein, 501 aa, Homo sapiens
MQDRRALSLKAHQSESYLPIGCKLPPQSSGVDTSPCPNSPVFRTGSEPALSPAVVRRVSSDARAGEALRGSDSQLCPKPPPKPCKVPFLKVPSSPSAWLNSEANYCELNPAFATGCGRGAKLPSCAQGSHTELLTAKQNEAPGPRNSGVNYLILDDDDRERPWEPAAAQMEKGQWDKGEFVTPLLETVSSFRPNEFESKFLPPENKPLETAMLKRAKELFTNNDPKVIAQHVLSMDCRVARILGVSEEMRRNMGVSSGLELITLPHGHQLRLDIIERHNTMAIGIAVDILGCTGTLEDRAATLSKIIQVAVELKDSMGDLYSFSALMKALEMPQITRLEKTWTALRHQYTQTAILYEKQLKPFSKLLHEGRESTCVPPNNVSVPLLMPLVTLMERQAVTFEGTDMWEKNDQSCEIMLNHLATARFMAEAADSYRMNAERILAGFQPDEEMNEICKTEFQMRLLWGSKGAQVNQTERYEKFNQILTALSRKLEPPPVKQAEL

SEQ ID NO: 16157 - protein, 734 aa, Homo sapiens
MPKECSAFHALSAALCCFYHRKSFIGVKFSKERHIMDRTPEKLKKELEEELLLSSEDLRSHAWYHGRIPRQVSENLVQRDGDFLVRDSLSSPGNFVLTCQWKNLAQHFKINRTVLRLSEAYSRVQYQFEMESFDSIPGLVRCYVGNRRPISQQSGAIIFQPINRTVPLRCLEEHYGTSPGQAREGSLTKGRPDVAKRLSLTMGGVQAREQNLPRGNLLRNKEKSGSQPACLDHMQDRRALSLKAHQSESYLPIGCKLPPQSSGVDTSPCPNSPVFRTGSEPALSPAVVRRVSSDARAGEALRGSDSQLCPKPPPKPCKVPFLKVPSSPSAWLNSEANYCELNPAFATGCGRGAKLPSCAQGSHTELLTAKQNEAPGPRNSGVNYLILDDDDRERPWEPAAAQMEKGQWDKGEFVTPLLETVSSFRPNEFESKFLPPENKPLETAMLKRAKELFTNNDPKVIAQHVLSMDCRVARILGVSEEMRRNMGVSSGLELITLPHGHQLRLDIIERHNTMAIGIAVDILGCTGTLEDRAATLSKIIQVAVELKDSMGDLYSFSALMKALEMPQITRLEKTWTALRHQYTQTAILYEKQLKPFSKLLHEGRESTCVPPNNVSVPLLMPLVTLMERQAVTFEGTDMWEKNDQSCEIMLNHLATARFMAEAADSYRMNAERILAGFQPDEEMNEICKTEFQMRLLWGSKGAQVNQTERYEKFNQILTALSRKLEPPPVKQAEL

SEQ ID NO: 16158 - protein, 196 aa, Homo sapiens
MAAEHLLPGPPPSLADFRLEAGGKGTERGSGSSKPTGSSRGPRMAKFLSQDQINEYKECFSLYDKQQRGKIKATDLMVAMRCLGASPTPGEVQRHLQTHGIDGNGELDFSTFLTIMHMQIKQEDPKKEILLAMLMVDKEKKGYVMASDLRSKLTSLGEKLTHKEVDDLFREADIEPNGKVKYDEFIHKITLPGRDY

SEQ ID NO: 16159 - protein, 120 aa, Homo sapiens
MVAMRCLGASPTPGEVQRHLQTHGIDGNGELDFSTFLTIMHMQIKQEDPKKEILLAMLMVDKEKKGYVMASDLRSKLTSLGEKLTHKEVDDLFREADIEPNGKVKYDEFIHKITLPGRDY

SEQ ID NO: 16160 - protein, 81 aa, Homo sapiens
MHMQIKQEDPKKEILLAMLMVDKEKKGYVMASDLRSKLTSLGEKLTHKEVDDLFREADIEPNGKVKYDEFIHKITLPGRDY

SEQ ID NO: 16161 - protein, 149 aa, Homo sapiens
MAAEHLLPGPPPSLADFRLEAGGKGTERGSGSSKPTGSSRGPRMAKFLSQDQINDGNGELDFSTFLTIMHMQIKQEDPKKEILLAMLMVDKEKKGYVMASDLRSKLTSLGEKLTHKEVDDLFREADIEPNGKVKYDEFIHKITLPGRDY

SEQ ID NO: 16162 - protein, 59 aa, Homo sapiens
MAAEHLLPGPPPSLADFRLEAGGKGTERGSGSSKPTGSSRGPRMWMISSGKQISNPMAK

SEQ ID NO: 16163 - protein, 180 aa, Homo sapiens
MAALDLRAELDSLVLQLLGDLEELEGKRTVLNARVEEGWLSLAKARYAMGAKSVGPLQYASHMEPQVCLHASEAQEGLQKFKVVRAGVHAPEEVGPREAGLRRRKGPTKTPEPESSEAPQDPLNWFGILVPHSLRQAQASFRDGLQLAADIASLQNRIDWGRSQLRGLQEKLKQLEPGAA

SEQ ID NO: 16164 - protein, 188 aa, Homo sapiens
MGTPLDGGSRVPIGCPAKLRRVTRKKVAPDLEGWLSLAKARYAMGAKSVGPLQYASHMEPQVCLHASEAQEGLQKFKVVRAGVHAPEEVGPREAGLRRRKGPTKTPEPESSEAPQDPLNWFGILVPHSLRQAQASFRDGVLEAKKRKCFLERVIQCVVSPAAEQEAEDESCPEDWAAAVPAETSAKAI

SEQ ID NO: 16165 - protein, 788 aa, Homo sapiens
MTIHQFLLLFLFWVCLPHFCSPEIMFRRTPVPQQRILSSRVPRSDGKILHRQKRGWMWNQFFLLEEYTGSDYQYVGKLHSDQDKGDGSLKYILSGDGAGTLFIIDEKTGDIHATRRIDREEKAFYTLRAQAINRRTLRPVEPESEFVIKIHDINDNEPTFPEEIYTASVPEMSVVGTSVVQVTATDADDPSYGNSARVIYSILQGQPYFSVEPETGIIRTALPNMNRENREQYQVVIQAKDMGGQMGGLSGTTTVNITLTDVNDNPPRFPQNTIHLRVLESSPVGTAIGSVKATDADTGKNAEVEYRIIDGDGTDMFDIVTEKDTQEGIITVKKPLDYESRRLYTLKVEAENTHVDPRFYYLGPFKDTTIVKISIEDVDEPPVFSRSSYLFEVHEDIEVGTIIGTVMARDPDSISSPIRFSLDRHTDLDRIFNIHSGNGSLYTSKPLDRELSQWHNLTVIAAEINNPKETTRVAVFVRILDVNDNAPQFAVFYDTFVCENARPGQLIQTISAVDKDDPLGGQKFFFSLAAVNPNFTVQDNEDNTARILTRKNGFNRHEISTYLLPVVISDNDYPIQSSTGTLTIRVCACDSQGNMQSCSAEALLLPAGLSTGALIAILLCIIILLVIVVLFAALKRQRKKEPLILSKEDIRDNIVSYNDEGGGEEDTQAFDIGTLRNPAAIEEKKLRRDIIPETLFIPRRTPTAPDNTDVRDFINERLKEHDLDPTAPPYDSLATYAYEGNDSIAESLSSLESGTTEGDQNYDYLREWGPRFNKLAEMYGGGESDKDS

SEQ ID NO: 16166 - protein, 258 aa, Homo sapiens
MSLESLFQHIIFTEHQAEESRRLMREVRSEITRCREKIKKATEELNEEKIKLESKVQQFFEKSFFLQLLKAHENALEKQYSEITNHRNMLLQTFEAIKKQMIEEEDKFIKEITDFNNDYEITKKRELLMKENVKIEISDLENQANMLKSEMKSMEHDSSQLNELQKQKSELIQELFTLQRKLKVFEDEENESICTTKYLEAEKIKISEKPQNDTECLRLKKELELYKEDDMESVYEALQTEIEFLELTLAQKDLQESK

SEQ ID NO: 16167 - protein, 278 aa, Homo sapiens
MQWLRVRESPGEATGHRVTMGTAALGPVWAALLLFLLMCEIPMVELTFDRAVASGCQRCCDSEDPLDPAHVSSASSSGRPHALPEIRPYINITILKGDKGDPGPMGLPGYMGREGPQGEPGPQGSKGDKGEMGSPGAPCQKRFFAFSVGRKTALHSGEDFQTLLFERVFVNLDGCFDMATGQFAAPLRGIYFFSLNVHSWNYKETYVHIMHNQKEAVILYAQPSERSIMQSQSVMLDLAYGDRVWVRLFKRQRENAIYSNDFDTYITFSGHLIKAEDD

SEQ ID NO: 16168 - protein, 259 aa, Homo sapiens
MGTAALGPVWAALLLFLLMCEIPMVELTFDRAVASGCQRCCDSEDPLDPAHVSSASSSGRPHALPEIRPYINITILKGDKGDPGPMGLPGYMGREGPQGEPGPQGSKGDKGEMGSPGAPCQKRFFAFSVGRKTALHSGEDFQTLLFERVFVNLDGCFDMATGQFAAPLRGIYFFSLNVHSWNYKETYVHIMHNQKEAVILYAQPSERSIMQSQSVMLDLAYGDRVWVRLFKRQRENAIYSNDFDTYITFSGHLIKAEDD

SEQ ID NO: 16169 - protein, 154 aa, Homo sapiens
MSVGTSLEQAQMSTLTCPLFIPTVGRKTALHSGEDFQTLLFERVFVNLDGCFDMATGQFAAPLRGIYFFSLNVHSWNYKETYVHIMHNQKEAVILYAQPSERSIMQSQSVMLDLAYGDRVWVRLFKRQRENAIYSNDFDTYITFSGHLIKAEDD

SEQ ID NO: 16170 - protein, 169 aa, Homo sapiens
MAALLLRHVGRHCLRAHFSPQLCIRNAVPLGTTAKEEMERFWNKNIGSNRPLSPHITIYSWSLPMAMSICHRGTGIALSAGVSLFGMSALLLPGNFESYLELVKSLCLGPALIHTAKFALVFPLMYHTWNGIRHLMWDLGKGLKIPQLYQSGVVVLVLTVLSSMGLAAM

SEQ ID NO: 16171 - protein, 150 aa, Homo sapiens
MAALLLRHVGRHCLRAHFSPQLCIRNAVPLGTTAKEEMERFWNKNIGSNRPLSPHITIYSWSLPMAMSICHRGTGIALSADVGPRKRPEDSPAIPVWSGCPGSYCVVLYGAGSHVKKGGSQHHLPTHYYIHPSFCLSFLSPAWEKFSLFV

SEQ ID NO: 16172 - protein, 135 aa, Homo sapiens
MAALLLRHVGRHCLRAHFSPQLCIRNWSLPMAMSICHRGTGIALSAGVSLFGMSALLLPGNFESYLELVKSLCLGPALIHTAKFALVFPLMYHTWNGIRHLMWDLGKGLKIPQLYQSGVVVLVLTVLSSMGLAAM

SEQ ID NO: 16173 - protein, 116 aa, Homo sapiens
MAALLLRHVGRHCLRAHFSPQLCIRNWSLPMAMSICHRGTGIALSADVGPRKRPEDSPAIPVWSGCPGSYCVVLYGAGSHVKKGGSQHHLPTHYYIHPSFCLSFLSPAWEKFSLFV

SEQ ID NO: 16174 - protein, 116 aa, Homo sapiens
MAALLLSWSLPMAMSICHRGTGIALSAGVSLFGMSALLLPGNFESYLELVKSLCLGPALIHTAKFALVFPLMYHTWNGIRHLMWDLGKGLKIPQLYQSGVVVLVLTVLSSMGLAAM

SEQ ID NO: 16175 - protein, 333 aa, Homo sapiens
MRIWWLLLAIEICTGNINSQDTCRQGHPGIPGNPGHNGLPGRDGRDGAKGDKGDAGEPGRPGSPGKDGTSGEKGERGADGKVEAKGIKGDQGSRGSPGKHGPKGLAGPMGEKGLRGETGPQGQKGNKGDVGPTGPEGPRGNIGPLGPTGLPGPMGPIGKPGPKGEAGPTGPQGEPGVRGIRGWKGDRGEKGKIGETLVLPKSAFTVGLTVLSKFPSSDMPIKFDKILYNEFNHYDTAAGKFTCHIAGVYYFTYHITVFSRNVQVSLVKNGVKILHTKDAYMSSEDQASGGIVLQLKLGDEVWLQVTGGERFNGLFADEDDDTTFTGFLLFSSP

SEQ ID NO: 16176 - protein, 794 aa, Homo sapiens
MLTRNCLSLLLWVLFDGGLLTPLQPQPQQTLATEPRENVIHLPGQRSHFQRVKRGWVWNQFFVLEEYVGSEPQYVGKLHSDLDKGEGTVKYTLSGDGAGTVFTIDETTGDIHAIRSLDREEKPFYTLRAQAVDIETRKPLEPESEFIIKVQDINDNEPKFLDGPYVATVPEMSPVGAYVLQVKATDADDPTYGNSARVVYSILQGQPYFSIDPKTGVIRTALPNMDREVKEQYQVLIQAKDMGGQLGGLAGTTIVNITLTDVNDNPPRFPKSIFHLKVPESSPIGSAIGRIRAVDPDFGQNAEIEYNIVPGDGGNLFDIVTDEDTQEGVIKLKKPLDFETKKAYTFKVEASNLHLDHRFHSAGPFKDTATVKISVLDVDEPPVFSKPLYTMEVYEDTPVGTIIGAVTAQDLDVGSSAVRYFIDWKSDGDSYFTIDGNEGTIATNELLDRESTAQYNFSIIASKVSNPLLTSKVNILINVLDVNEFPPEISVPYETAVCENAKPGQIIQIVSAADRDLSPAGQQFSFRLSPEAAIKPNFTVRDFRNNTAGIETRRNGYSRRQQELYFLPVVIEDSSYPVQSSTNTMTIRVCRCDSDGTILSCNVEAIFLPVGLSTGALIAILLCIVILLAIVVLYVALRRQKKKDTLMTSKEDIRDNVIHYDDEGGGEEDTQAFDIGALRNPKVIEENKIRRDIKPDSLCLPRQRPPMEDNTDIRDFIHQRLQENDVDPTAPPYDSLATYAYEGSGSVAESLSSIDSLTTEADQDYDYLTDWGPRFKVLADMFGEEESYNPDKVT

SEQ ID NO: 16177 - protein, 754 aa, Homo sapiens
MLTRNCLSLLLWVLFDGGLLTPLQPQPQQTLATEPRENVIHLPGQRSHFQRVKRGWVWNQFFVLEEYVGSEPQYVGKLHSDLDKGEGTVKYTLSGDGAGTVFTIDETTGDIHAIRSLDREEKPFYTLRAQAVDIETRKPLEPESEFIIKVQDINDNEPKFLDGPYVATVPEMSPVGVIRTALPNMDREVKEQYQVLIQAKDMGGQLGGLAGTTIVNITLTDVNDNPPRFPKSIFHLKVPESSPIGSAIGRIRAVDPDFGQNAEIEYNIVPGDGGNLFDIVTDEDTQEGVIKLKKPLDFETKKAYTFKVEASNLHLDHRFHSAGPFKDTATVKISVLDVDEPPVFSKPLYTMEVYEDTPVGTIIGAVTAQDLDVGSSAVRYFIDWKSDGDSYFTIDGNEGTIATNELLDRESTAQYNFSIIASKVSNPLLTSKVNILINVLDVNEFPPEISVPYETAVCENAKPGQIIQIVSAADRDLSPAGQQFSFRLSPEAAIKPNFTVRDFRNNTAGIETRRNGYSRRQQELYFLPVVIEDSSYPVQSSTNTMTIRVCRCDSDGTILSCNVEAIFLPVGLSTGALIAILLCIVILLAIVVLYVALRRQKKKDTLMTSKEDIRDNVIHYDDEGGGEEDTQAFDIGALRNPKVIEENKIRRDIKPDSLCLPRQRPPMEDNTDIRDFIHQRLQENDVDPTAPPYDSLATYAYEGSGSVAESLSSIDSLTTEADQDYDYLTDWGPRFKVLADMFGEEESYNPDKVT

SEQ ID NO: 16178 - protein, 829 aa, Homo sapiens
MVPAWLWLLCVSVPQALPKAQPAELSVEVPENYGGNFPLYLTKLPLPREGAEGQIVLSGDSGKATEGPFAMDPDSGFLLVTRALDREEQAEYQLQVTLEMQDGHVLWGPQPVLVHVKDENDQVPHFSQAIYRARLSRGTRPGIPFLFLEASDRDEPGTANSDLRFHILSQAPAQPSPDMFQLEPRLGALALSPKGSTSLDHALERTYQLLVQVKDMGDQASGHQATATVEVSIIESTWVSLEPIHLAENLKVLYPHHMAQVHWSGGDVHYHLESHPPGPFEVNAEGNLYVTRELDREAQAEYLLQVRAQNSHGEDYAAPLELHVLVMDENDNVPICPPRDPTVSIPELSPPGTEVTRLSAEDADAPGSPNSHVVYQLLSPEPEDGVEGRAFQVDPTSGSVTLGVLPLRAGQNILLLVLAMDLAGAEGGFSSTCEVEVAVTDINDHAPEFITSQIGPISLPEDVEPGTLVAMLTAIDADLEPAFRLMDFAIERGDTEGTFGLDWEPDSGHVRLRLCKNLSYEAAPSHEVVVVVQSVAKLVGPGPGPGATATVTVLVERVMPPPKLDQESYEASVPISAPAGSFLLTIQPSDPISRTLRFSLVNDSEGWLCIEKFSGEVHTAQSLQGAQPGDTYTVLVEAQDTDEPRLSASAPLVIHFLKAPPAPALTLAPVPSQYLCTPRQDHGLIVSGPSKDPDLASGHGPYSFTLGPNPTVQRDWRLQTLNGSHAYLTLALHWVEPREHIIPVVVSHNAQMWQLLVRVIVCRCNVEGQCMRKVGRMKGMPTKLSAVGILVGTLVAIGIFLILIFTHWTMSRKKDPDQPADSVPLKATV

SEQ ID NO: 16179 - protein, 807 aa, Homo sapiens
MVPAWLWLLCVSVPQALPKAQPAELSVEVPENYGGNFPLYLTKLPLPREGAEGQIVLSGDSGKATEGPFAMDPDSGFLLVTRALDREEQAEYQLQVTLEMQDGHVLWGPQPVLVHVKDENDQVPHFSQAIYRARLSRGTRPGIPFLFLEASDRDEPGTANSDLRFHILSQAPAQPSPDMFQLEPRLGALALSPKGSTSLDHALERTYQLLVQVKDMGDQASGHQATATVEVSIIESTWVSLEPIHLAENLKVLYPHHMAQVHWSGGDVHYHLESHPPGPFEVNAEGNLYVTRELDREAQAEYLLQVRAQNSHGEDYAAPLELHVLVMDENDNVPICPPRDPTVSIPELSPPGTEVTRLSAEDADAPGSPNSHVVYQLLSPEPEDGVEGRAFQVDPTSGSVTLGVLPLRAGQNILLLVLAMDLAGAEGGFSSTCEVEVAVTDINDHAPEFITSQIGPISLPEDVEPGTLVAMLTAIDADLEPAFRLMDFAIERGDTEGTFGLDWEPDSGHVRLRLCKNLSYEAAPSHEVVVVVQSVAKLVGPGPGPGATATVTVLVERVMPPPKLDQESYEASVPISAPAGSFLLTIQPSDPISRTLRFSLVNDSEGWLCIEKFSGEVHTAQSLQGAQPGDTYTVLVEAQDTALTLAPVPSQYLCTPRQDHGLIVSGPSKDPDLASGHGPYSFTLGPNPTVQRDWRLQTLNGSHAYLTLALHWVEPREHIIPVVVSHNAQMWQLLVRVIVCRCNVEGQCMRKVGRMKGMPTKLSAVGILVGTLVAIGIFLILIFTHWTMSRKKDPDQPADSVPLKATV

SEQ ID NO: 16180 - protein, 732 aa, Homo sapiens
MVPAWLWLLCVSVPQALPKAQPAELSVEVPENYGGNFPLYLTKLPLPREGAEGQIVLSGDSGKATEGPFAMDPDSGFLLVTRALDREEQAEYQLQVTLEMQDGHVLWGPQPVLVHVKDENDQASGHQATATVEVSIIESTWVSLEPIHLAENLKVLYPHHMAQVHWSGGDVHYHLESHPPGPFEVNAEGNLYVTRELDREAQAEYLLQVRAQNSHGEDYAAPLELHVLVMDENDNVPICPPRDPTVSIPELSPPGTEVTRLSAEDADAPGSPNSHVVYQLLSPEPEDGVEGRAFQVDPTSGSVTLGVLPLRAGQNILLLVLAMDLAGAEGGFSSTCEVEVAVTDINDHAPEFITSQIGPISLPEDVEPGTLVAMLTAIDADLEPAFRLMDFAIERGDTEGTFGLDWEPDSGHVRLRLCKNLSYEAAPSHEVVVVVQSVAKLVGPGPGPGATATVTVLVERVMPPPKLDQESYEASVPISAPAGSFLLTIQPSDPISRTLRFSLVNDSEGWLCIEKFSGEVHTAQSLQGAQPGDTYTVLVEAQDTDEPRLSASAPLVIHFLKAPPAPALTLAPVPSQYLCTPRQDHGLIVSGPSKDPDLASGHGPYSFTLGPNPTVQRDWRLQTLNGSHAYLTLALHWVEPREHIIPVVVSHNAQMWQLLVRVIVCRCNVEGQCMRKVGRMKGMPTKLSAVGILVGTLVAIGIFLILIFTHWTMSRKKDPDQPADSVPLKATV

SEQ ID NO: 16181 - protein, 790 aa, Homo sapiens
MVPAWLWLLCVSVPQALPKAQPAELSVEVPENYGGNFPLYLTKLPLPREGAEGQIVLSGDSGKATEGPFAMDPDSGFLLVTRALDREEQAEYQLQVTLEMQDGHVLWGPQPVLVHVKDENDQVPHFSQAIYRARLSRGTRPGIPFLFLEASDRDEPGTANSDLRFHILSQAPAQPSPDMFQLEPRLGALALSPKGSTSLDHALERTYQLLVQVKDMGDQASGHQATATVEVSIIESTWVSLEPIHLAENLKVLYPHHMAQVHWSGGDVHYHLESHPPGPFEVNAEGNLYVTRELDREAQAEYLLQVRAQNSHGEDYAAPLELHVLVMDENDNVPICPPRDPTVSIPELSPPGTEVTRLSAEDADAPGSPNSHVVYQLLSPEPEDGVEGRAFQVDPTSGSVTLGVLPLRAGQNILLLVLAMDLAGAEGGFSSTCEVEVAVTDINDHAPEFITSQIGPISLPEDVEPGTLVAMLTAIDADLEPAFRLMDFAIERGDTEGTFGLDWEPDSGHVRLRLCKNLSYEAAPSHEVVVVVQSVAKLVGPGPGPGATATVTVLVERVMPPPKLDQESYEASVPISAPAGSFLLTIQPSDPISRTLRFSLVNDSEGWLCIEKFSGEVHTAQSLQGAQPGDTYTVLVEAQDTDHGLIVSGPSKDPDLASGHGPYSFTLGPNPTVQRDWRLQTLNGSHAYLTLALHWVEPREHIIPVVVSHNAQMWQLLVRVIVCRCNVEGQCMRKVGRMKGMPTKLSAVGILVGTLVAIGIFLILIFTHWTMSRKKDPDQPADSVPLKATV

SEQ ID NO: 16182 - protein, 252 aa, Homo sapiens
MAAPALLLLALLLPVGAWPGLPRRPCVHCCRPAWPPGPYARVSDRDLWRGDLWRGLPRVRPTIDIEILKGEKGEAGVRGRAGRSGKEGPPGARGLQGRRGQKGQVGPPGAACRRAYAAFSVGRREGLHSSDHFQAVPFDTELVNLDGAFDLAAGRFLCTVPGVYFLSLNVHTWNYKETYLHIMLNRRPAAVLYAQPSERSVMQAQSLMLLLAAGDAVWVRMFQRDRDNAIYGEHGDLYITFSGHLVKPAAEL

SEQ ID NO: 16183 - protein, 772 aa, Homo sapiens
MNCYLLLRFMLGIPLLWPCLGATENSQTKKVKQPVRSHLRVKRGWVWNQFFVPEEMNTTSHHIGQLRSDLDNGNNSFQYKLLGAGAGSTFIIDERTGDIYAIQKLDREERSLYILRAQVIDIATGRAVEPESEFVIKVSDINDNEPKFLDEPYEAIVPEMSPEGTLVIQVTASDADDPSSGNNARLLYSLLQGQPYFSVEPTTGVIRISSKMDRELQDEYWVIIQAKDMIGQPGALSGTTSVLIKLSDVNDNKPIFKESLYRLTVSESAPTGTSIGTIMAYDNDIGENAEMDYSIEEDDSQTFDIITNHETQEGIVILKKKVDFEHQNHYGIRAKVKNHHVPEQLMKYHTEASTTFIKIQVEDVDEPPLFLLPYYVFEVFEETPQGSFVGVVSATDPDNRKSPIRYSITRSKVFNINDNGTITTSNSLDREISAWYNLSITATEKYNIEQISSIPLYVQVLNINDHAPEFSQYYETYVCENAGSGQVIQTISAVDRDESIEEHHFYFNLSVEDTNNSSFTIIDNQDNTAVILTNRTGFNLQEEPVFYISILIADNGIPSLTSTNTLTIHVCDCGDSGSTQTCQYQELVLSMGFKTEVIIAILICIMIIFGFIFLTLGLKQRRKQILFPEKSEDFRENIFQYDDEGGGEEDTEAFDIAELRSSTIMRERKTRKTTSAEIRSLYRQSLQVGPDSAIFRKFILEKLEEANTDPCAPPFDSLQTYAFEGTGSLAGSLSSLESAVSDQDESYDYLNELGPRFKRLACMFGSAVQSNN

SEQ ID NO: 16184 - protein, 490 aa, Homo sapiens
MNCYLLLRFMLGIPLLWPCLGATENSQTKKVKQPVRSHLRVKRGWVWNQFFVPEEMNTTSHHIGQLRSDLDNGNNSFQYKLLGAGAGSTFIIDERTGDIYAIQKLDREERSLYILRAQVIDIATGRAVEPESEFVIKVSDINDNEPKFLDEPYEAIVPEMSPEGTLVIQVTASDADDPSSGNNARLLYSLLQGQPYFSVEPTTGVIRISSKMDRELQDEYWVIIQAKDMIGQPGALSGTTSVLIKLSDVNDNKPIFKESLYRLTVSESAPTGTSIGTIMAYDNDIGENAEMDYSIEEDDSQTFDIITNHETQEGIVILKKKVDFEHQNHYGIRAKVKNHHVPEQLMKYHTEASTTFIKIQVEDVDEPPLFLLPYYVFEVFEETPQGSFVGVVSATDPDNRKSPIRYSITRSKVFNINDNGTITTSNSLDREISAWYNLSITATEKYNIEQISSIPLYVQVLNINDHAPEFSQYYETYVCENAGSGQGLFF

SEQ ID NO: 16185 - protein, 3354 aa, Homo sapiens
MGRHVATSCHVAWLLVLISGCWGQVNRLPFFTNHFFDTYLLISEDTPVGSSVTQLLAQDMDNDPLVFGVSGEEASRFFAVEPDTGVVWLRQPLDRETKSEFTVEFSVSDHQGVITRKVNIQVGDVNDNAPTFHNQPYSVRIPENTPVGTPIFIVNATDPDLGAGGSVLYSFQPPSQFFAIDSARGIVTVIRELDYETTQAYQLTVNATDQDKTRPLSTLANLAIIITDVQDMDPIFINLPYSTNIYEHSPPGTTVRIITAIDQDKGRPRGIGYTIVSGNTNSIFALDYISGVLTLNGLLDRENPLYSHGFILTVKGTELNDDRTPSDATVTTTFNILVIDINDNAPEFNSSEYSVAITELAQVGFALPLFIQVVDKDENLGLNSMFEVYLVGNNSHHFIISPTSVQGKADIRIRVAIPLDYETVDRYDFDLFANESVPDHVGYAKVKITLINENDNRPIFSQPLYNISLYENVTVGTSVLTVLATDNDAGTFGEVSYFFSDDPDRFSLDKDTGLIMLIARLDYELIQRFTLTIIARDGGGEETTGRVRINVLDVNDNVPTFQKDAYVGALRENEPSVTQLVRLRATDEDSPPNNQITYSIVSASAFGSYFDISLYEGYGVISVSRPLDYEQISNGLIYLTVMAMDAGNPPLNSTVPVTIEVFDENDNPPTFSKPAYFVSVVENIMAGATVLFLNATDLDRSREYGQESIIYSLEGSTQFRINARSGEITTTSLLDRETKSEYILIVRAVDGGVGHNQKTGIATVNITLLDINDNHPTWKDAPYYINLVEMTPPDSDVTTVVAVDPDLGENGTLVYSIQPPNKFYSLNSTTGKIRTTHAMLDRENPDPHEAELMRKIVVSVTDCGRPPLKATSSATVFVNLLDLNDNDPTFQNLPFVAEVLEGIPAGVSIYQVVAIDLDEGLNGLVSYRMPVGMPRMDFLINSSSGVVVTTTELDRERIAEYQLRVVASDAGTPTKSSTSTLTIHVLDVNDETPTFFPAVYNVSVSEDVPREFRVVWLNCTDNDVGLNAELSYFITGGNVDGKFSVGYRDAVVRTVVGLDRETTAAYMLILEAIDNGPVGKRHTGTATVFVTVLDVNDNRPIFLQSSYEASVPEDIPEGHSILQLKATDADEGEFGRVWYRILHGNHGNNFRIHVSNGLLMRGPRPLDRERNSSHVLIVEAYNHDLGPMRSSVRVIVYVEDINDEAPVFTQQQYSRLGLRETAGIGTSVIVVQATDRDSGDGGLVNYRILSGAEGKFEIDESTGLIITVNYLDYETKTSYMMNVSATDQAPPFNQGFCSVYITLLNELDEAVQFSNASYEAAILENLALGTEIVRVQAYSIDNLNQITYRFNAYTSTQAKALFKIDAITGVITVQGLVDREKGDFYTLTVVADDGGPKVDSTVKVYITVLDENDNSPRFDFTSDSAVSIPEDCPVGQRVATVKAWDPDAGSNGQVVFSLASGNIAGAFEIVTTNDSIGEVFVARPLDREELDHYILQVVASDRGTPPRKKDHILQVTILDINDNPPVIESPFGYNVSVNENVGGGTAVVQVRATDRDIGINSVLSYYITEGNKDMAFRMDRISGEIATRPAPPDRERQSFYHLVATVEDEGTPTLSATTHVYVTIVDENDNAPMFQQPHYEVLLDEGPDTLNTSLITIQALDLDEGPNGTVTYAIVAGNIVNTFRIDRHMGVITAAKELDYEISHGRYTLIVTATDQCPILSHRLTSTTTVLVNVNDINDNVPTFPRDYEGPFEVTEGQPGPRVWTFLAHDRDSGPNGQVEYSIMDGDPLGEFVISPVEGVLRVRKDVELDRETIAFYNLTICARDRGMPPLSSTMLVGIRVLDINDNDPVLLNLPMNITISENSPVSSFVAHVLASDADSGCNARLTFNITAGNRERAFFINATTGIVTVNRPLDRERIPEYKLTISVKDNPENPRIARRDYDLLLIFLSDENDNHPLFTKSTYQAEVMENSPAGTPLTVLNGPILALDADQDIYAVVTYQLLGAQSGLFDINSSTGVVTVRSGVIIDREAFSPPILELLLLAEDIGLLNSTAHLLITILDDNDNRPTFSPATLTVHLLENCPPGFSVLQVTATDEDSGLNGELVYRIEAGAQDRFLIHLVTGVIRVGNATIDREEQESYRLTVVATDRGTVPLSGTAIVTILIDDINDSRPEFLNPIQTVSVLESAEPGTVIANITAIDHDLNPKLEYHIVGIVAKDDTDRLVPNQEDAFAVNINTGSVMVKSPMNRELVATYEVTLSVIDNASDLPERSVSVPNAKLTVNVLDVNDNTPQFKPFGITYYMERILEGATPGTTLIAVAAVDPDKGLNGLVTYTLLDLVPPGYVQLEDSSAGKVIANRTVDYEEVHWLNFTVRASDNGSPPRAAEIPVYLEIVDINDNNPIFDQPSYQEAVFEDVPVGTIILTVTATDADSGNFALIEYSLGDGESKFAINPTTGDIYVLSSLDREKKDHYILTALAKDNPGDVASNRRENSVQVVIQVLDVNDCRPQFSKPQFSTSVYENEPAGTSVITMMATDQDEGPNGELTYSLEGPGVEAFHVDMDSGLVTTQRPLQSYEKFSLTVVATDGGEPPLWGTTMLLVEVIDVNDNRPVFVRPPNGTILHIREEIPLRSNVYEVYATDKDEGLNGAVRYSFLKTAGNRDWEFFIIDPISGLIQTAQRLDRESQAVYSLILVASDLGQPVPYETMQPLQVALEDIDDNEPLFVRPPKGSPQYQLLTVPEHSPRGTLVGNVTGAVDADEGPNAIVYYFIAAGNEEKNFHLQPDGCLLVLRDLDREREAIFSFIVKASSNRSWTPPRGPSPTLDLVADLTLQEVRVVLEDINDQPPRFTKAEYTAGVATDAKVGSELIQVLALDADIGNNSLVFYSILAIHYFRALANDSEDVGQVFTMGSMDGILRTFDLFMAYSPGYFVVDIVARDLAGHNDTAIIGIYILRDDQRVKIVINEIPDRVRGFEEEFIHLLSNITGAIVNTDNVQFHVDKKGRVNFAQTELLIHVVNRDTNRILDVDRVIQMIDENKEQLRNLFRNYNVLDVQPAISVRLPDDMSALQMAIIVLAILLFLAAMLFVLMNWYYRTVHKRKLKAIVAGSAGNRGFIDIMDMPNTNKYSFDGANPVWLDPFCRNLELAAQAEHEDDLPENLSEIADLWNSPTRTHGTFGREPAAVKPDDDRYLRAAIQEYDNIAKLGQIIREGPIKGSLLKVVLEDYLRLKKLFAQRMVQKASSCHSSISELIQTELDEEPGDHSPGQGSLRFRHKPPVELKGPDGIHVVHGSTGTLLATDLNSLPEEDQKGLGRSLETLTAAEATAFERNARTESAKSTPLHKLRDVIMETPLEITEL

SEQ ID NO: 16186 - protein, 3352 aa, Homo sapiens
MGRHVATSCHVAWLLVLISGCWGQVNRLPFFTNHFFDTYLLISEDTPVGSSVTQLLAQDMDNDPLVFGVSGEEASRFFAVEPDTGVVWLRQPLDRETKSEFTVEFSVSDHQGVITRKVNIQVGDVNDNAPTFHNQPYSVRIPENTPVGTPIFIVNATDPDLGAGGSVLYSFQPPSQFFAIDSARGIVTVIRELDYETTQAYQLTVNATDQDKTRPLSTLANLAIIITDVQDMDPIFINLPYSTNIYEHSPPGTTVRIITAIDQDKGRPRGIGYTIVSGNTNSIFALDYISGVLTLNGLLDRENPLYSHGFILTVKGTELNDDRTPSDATVTTTFNILVIDINDNAPEFNSSEYSVAITELAQVGFALPLFIQVVDKDEGLNSMFEVYLVGNNSHHFIISPTSVQGKADIRIRVAIPLDYETVDRYDFDLFANESVPDHVGYAKVKITLINENDNRPIFSQPLYNISLYENVTVGTSVLTVLATDNDAGTFGEVSYFFSDDPDRFSLDKDTGLIMLIARLDYELIQRFTLTIIARDGGGEETTGRVRINVLDVNDNVPTFQKDAYVGALRENEPSVTQLVRLRATDEDSPPNNQITYSIVSASAFGSYFDISLYEGYGVISVSRPLDYEQISNGLIYLTVMAMDAGNPPLNSTVPVTIEVFDENDNPPTFSKPAYFVSVVENIMAGATVLFLNATDLDRSREYGQESIIYSLEGSTQFRINARSGEITTTSLLDRETKSEYILIVRAVDGGVGHNQKTGIATVNITLLDINDNHPTWKDAPYYINLVEMTPPDSDVTTVVAVDPDLGENGTLVYSIQPPNKFYSLNSTTGKIRTTHAMLDRENPDPHEAELMRKIVVSVTDCGRPPLKATSSATVFVNLLDLNDNDPTFQNLPFVAEVLEGIPAGVSIYQVVAIDLDEGLNGLVSYRMPVGMPRMDFLINSSSGVVVTTTELDRERIAEYQLRVVASDAGTPTKSSTSTLTIHVLDVNDETPTFFPAVYNVSVSEDVPREFRVVWLNCTDNDVGLNAELSYFITGGNVDGKFSVGYRDAVVRTVVGLDRETTAAYMLILEAIDNGPVGKRHTGTATVFVTVLDVNDNRPIFLQSSYEASVPEDIPEGHSILQLKATDADEGEFGRVWYRILHGNHGNNFRIHVSNGLLMRGPRPLDRERNSSHVLIVEAYNHDLGPMRSSVRVIVYVEDINDEAPVFTQQQYSRLGLRETAGIGTSVIVVQATDRDSGDGGLVNYRILSGAEGKFEIDESTGLIITVNYLDYETKTSYMMNVSATDQAPPFNQGFCSVYITLLNELDEAVQFSNASYEAAILENLALGTEIVRVQAYSIDNLNQITYRFNAYTSTQAKALFKIDAITGVITVQGLVDREKGDFYTLTVVADDGGPKVDSTVKVYITVLDENDNSPRFDFTSDSAVSIPEDCPVGQRVATVKAWDPDAGSNGQVVFSLASGNIAGAFEIVTTNDSIGEVFVARPLDREELDHYILQVVASDRGTPPRKKDHILQVTILDINDNPPVIESPFGYNVSVNENVGGGTAVVQVRATDRDIGINSVLSYYITEGNKDMAFRMDRISGEIATRPAPPDRERQSFYHLVATVEDEGTPTLSATTHVYVTIVDENDNAPMFQQPHYEVLLDEGPDTLNTSLITIQALDLDEGPNGTVTYAIVAGNIVNTFRIDRHMGVITAAKELDYEISHGRYTLIVTATDQCPILSHRLTSTTTVLVNVNDINDNVPTFPRDYEGPFEVTEGQPGPRVWTFLAHDRDSGPNGQVEYSIMDGDPLGEFVISPVEGVLRVRKDVELDRETIAFYNLTICARDRGMPPLSSTMLVGIRVLDINDNDPVLLNLPMNITISENSPVSSFVAHVLASDADSGCNARLTFNITAGNRERAFFINATTGIVTVNRPLDRERIPEYKLTISVKDNPENPRIARRDYDLLLIFLSDENDNHPLFTKSTYQAEVMENSPAGTPLTVLNGPILALDADQDIYAVVTYQLLGAQSGLFDINSSTGVVTVRSGVIIDREAFSPPILELLLLAEDIGLLNSTAHLLITILDDNDNRPTFSPATLTVHLLENCPPGFSVLQVTATDEDSGLNGELVYRIEAGAQDRFLIHLVTGVIRVGNATIDREEQESYRLTVVATDRGTVPLSGTAIVTILIDDINDSRPEFLNPIQTVSVLESAEPGTVIANITAIDHDLNPKLEYHIVGIVAKDDTDRLVPNQEDAFAVNINTGSVMVKSPMNRELVATYEVTLSVIDNASDLPERSVSVPNAKLTVNVLDVNDNTPQFKPFGITYYMERILEGATPGTTLIAVAAVDPDKGLNGLVTYTLLDLVPPGYVQLEDSSAGKVIANRTVDYEEVHWLNFTVRASDNGSPPRAAEIPVYLEIVDINDNNPIFDQPSYQEAVFEDVPVGTIILTVTATDADSGNFALIEYSLGDGESKFAINPTTGDIYVLSSLDREKKDHYILTALAKDNPGDVASNRRENSVQVVIQVLDVNDCRPQFSKPQFSTSVYENEPAGTSVITMMATDQDEGPNGELTYSLEGPGVEAFHVDMDSGLVTTQRPLQSYEKFSLTVVATDGGEPPLWGTTMLLVEVIDVNDNRPVFVRPPNGTILHIREEIPLRSNVYEVYATDKDEGLNGAVRYSFLKTAGNRDWEFFIIDPISGLIQTAQRLDRESQAVYSLILVASDLGQPVPYETMQPLQVALEDIDDNEPLFVRPPKGSPQYQLLTVPEHSPRGTLVGNVTGAVDADEGPNAIVYYFIAAGNEEKNFHLQPDGCLLVLRDLDREREAIFSFIVKASSNRSWTPPRGPSPTLDLVADLTLQEVRVVLEDINDQPPRFTKAEYTAGVATDAKVGSELIQVLALDADIGNNSLVFYSILAIHYFRALANDSEDVGQVFTMGSMDGILRTFDLFMAYSPGYFVVDIVARDLAGHNDTAIIGIYILRDDQRVKIVINEIPDRVRGFEEEFIHLLSNITGAIVNTDNVQFHVDKKGRVNFAQTELLIHVVNRDTNRILDVDRVIQMIDENKEQLRNLFRNYNVLDVQPAISVRLPDDMSALQMAIIVLAILLFLAAMLFVLMNWYYRTVHKRKLKAIVAGSAGNRGFIDIMDMPNTNKYSFDGANPVWLDPFCRNLELAAQAEHEDDLPENLSEIADLWNSPTRTHGTFGREPAAVKPDDDRYLRAAIQEYDNIAKLGQIIREGPIKGSLLKVVLEDYLRLKKLFAQRMVQKASSCHSSISELIQTELDEEPGDHSPGQGSLRFRHKPPVELKGPDGIHVVHGSTGTLLATDLNSLPEEDQKGLGRSLETLTAAEATAFERNARTESAKSTPLHKLRDVIMETPLEITEL

SEQ ID NO: 16187 - protein, 3353 aa, Homo sapiens
MGRHVATSCHVAWLLVLISGCWGQVNRLPFFTNHFFDTYLLISEDTPVGSSVTQLLAQDMDNDPLVFGVSGEEASRFFAVEPDTGVVWLRQPLDRETKSEFTVEFSVSDHQGVITRKVNIQVGDVNDNAPTFHNQPYSVRIPENTPVGTPIFIVNATDPDLGAGGSVLYSFQPPSQFFAIDSARGIVTVIRELDYETTQAYQLTVNATDQDKTRPLSTLANLAIIITDVQDMDPIFINLPYSTNIYEHSPPGTTVRIITAIDQDKGRPRGIGYTIVSGNTNSIFALDYISGVLTLNGLLDRENPLYSHGFILTVKGTELNDDRTPSDATVTTTFNILVIDINDNAPEFNSSEYSVAITELAQVGFALPLFIQVVDKDENLGLNSMFEVYLVGNNSHHFIISPTSVQGKADIRIRVAIPLDYETVDRYDFDLFANESVPDHVGYAKVKITLINENDNRPIFSQPLYNISLYENVTVGTSVLTVLATDNDAGTFGEVSYFFSDDPDRFSLDKDTGLIMLIARLDYELIQRFTLTIIARDGGGEETTGRVRINVLDVNDNVPTFQKDAYVGALRENEPSVTQLVRLRATDEDSPPNNQITYSIVSASAFGSYFDISLYEGYGVISVSRPLDYEQISNGLIYLTVMAMDAGNPPLNSTVPVTIEVFDENDNPPTFSKPAYFVSVVENIMAGATVLFLNATDLDRSREYGQESIIYSLEGSTQFRINARSGEITTTSLLDRETKSEYILIVRAVDGGVGHNQKTGIATVNITLLDINDNHPTWKDAPYYINLVEMTPPDSDVTTVVAVDPDLGENGTLVYSIQPPNKFYSLNSTTGKIRTTHAMLDRENPDPHEAELMRKIVVSVTDCGRPPLKATSSATVFVNLLDLNDNDPTFQNLPFVAEVLEGIPAGVSIYQVVAIDLDEGLNGLVSYRMPVGMPRMDFLINSSSGVVVTTTELDRERIAEYQLRVVASDAGTPTKSSTSTLTIHVLDVNDETPTFFPAVYNVSVSEDVPREFRVVWLNCTDNDVGLNAELSYFITGGNVDGKFSVGYRDAVVRTVVGLDRETTAAYMLILEAIDNGPVGKRHTGTATVFVTVLDVNDNRPIFLQSSYEASVPEDIPEGHSILQLKATDADEGEFGRVWYRILHGNHGNNFRIHVSNGLLMRGPRPLDRERNSSHVLIVEAYNHDLGPMRSSVRVIVYVEDINDEAPVFTQQQYSRLGLRETAGIGTSVIVVQATDRDSGDGGLVNYRILSGAEGKFEIDESTGLIITVNYLDYETKTSYMMNVSATDQAPPFNQGFCSVYITLLNELDEAVQFSNASYEAAILENLALGTEIVRVQAYSIDNLNQITYRFNAYTSTQAKALFKIDAITGVITVQGLVDREKGDFYTLTVVADDGGPKVDSTVVYITVLDENDNSPRFDFTSDSAVSIPEDCPVGQRVATVKAWDPDAGSNGQVVFSLASGNIAGAFEIVTTNDSIGEVFVARPLDREELDHYILQVVASDRGTPPRKKDHILQVTILDINDNPPVIESPFGYNVSVNENVGGGTAVVQVRATDRDIGINSVLSYYITEGNKDMAFRMDRISGEIATRPAPPDRERQSFYHLVATVEDEGTPTLSATTHVYVTIVDENDNAPMFQQPHYEVLLDEGPDTLNTSLITIQALDLDEGPNGTVTYAIVAGNIVNTFRIDRHMGVITAAKELDYEISHGRYTLIVTATDQCPILSHRLTSTTTVLVNVNDINDNVPTFPRDYEGPFEVTEGQPGPRVWTFLAHDRDSGPNGQVEYSIMDGDPLGEFVISPVEGVLRVRKDVELDRETIAFYNLTICARDRGMPPLSSTMLVGIRVLDINDNDPVLLNLPMNITISENSPVSSFVAHVLASDADSGCNARLTFNITAGNRERAFFINATTGIVTVNRPLDRERIPEYKLTISVKDNPENPRIARRDYDLLLIFLSDENDNHPLFTKSTYQAEVMENSPAGTPLTVLNGPILALDADQDIYAVVTYQLLGAQSGLFDINSSTGVVTVRSGVIIDREAFSPPILELLLLAEDIGLLNSTAHLLITILDDNDNRPTFSPATLTVHLLENCPPGFSVLQVTATDEDSGLNGELVYRIEAGAQDRFLIHLVTGVIRVGNATIDREEQESYRLTVVATDRGTVPLSGTAIVTILIDDINDSRPEFLNPIQTVSVLESAEPGTVIANITAIDHDLNPKLEYHIVGIVAKDDTDRLVPNQEDAFAVNINTGSVMVKSPMNRELVATYEVTLSVIDNASDLPERSVSVPNAKLTVNVLDVNDNTPQFKPFGITYYMERILEGATPGTTLIAVAAVDPDKGLNGLVTYTLLDLVPPGYVQLEDSSAGKVIANRTVDYEEVHWLNFTVRASDNGSPPRAAEIPVYLEIVDINDNNPIFDQPSYQEAVFEDVPVGTIILTVTATDADSGNFALIEYSLGDGESKFAINPTTGDIYVLSSLDREKKDHYILTALAKDNPGDVASNRRENSVQVVIQVLDVNDCRPQFSKPQFSTSVYENEPAGTSVITMMATDQDEGPNGELTYSLEGPGVEAFHVDMDSGLVTTQRPLQSYEKFSLTVVATDGGEPPLWGTTMLLVEVIDVNDNRPVFVRPPNGTILHIREEIPLRSNVYEVYATDKDEGLNGAVRYSFLKTAGNRDWEFFIIDPISGLIQTAQRLDRESQAVYSLILVASDLGQPVPYETMQPLQVALEDIDDNEPLFVRPPKGSPQYQLLTVPEHSPRGTLVGNVTGAVDADEGPNAIVYYFIAAGNEEKNFHLQPDGCLLVLRDLDREREAIFSFIVKASSNRSWTPPRGPSPTLDLVADLTLQEVRVVLEDINDQPPRFTKAEYTAGVATDAKVGSELIQVLALDADIGNNSLVFYSILAIHYFRALANDSEDVGQVFTMGSMDGILRTFDLFMAYSPGYFVVDIVARDLAGHNDTAIIGIYILRDDQRVKIVINEIPDRVRGFEEEFIHLLSNITGAIVNTDNVQFHVDKKGRVNFAQTELLIHVVNRDTNRILDVDRVIQMIDENKEQLRNLFRNYNVLDVQPAISVRLPDDMSALQMAIIVLAILLFLAAMLFVLMNWYYRTVHKRKLKAIVAGSAGNRGFIDIMDMPNTNKYSFDGANPVWLDPFCRNLELAAQAEHEDDLPENLSEIADLWNSPTRTHGTFGREPAAVKPDDDRYLRAAIQEYDNIAKLGQIIREGPIKGSLLKVVLEDYLRLKKLFAQRMVQKASSCHSSISELIQTELDEEPGDHSPGQGSLRFRHKPPVELKGPDGIHVVHGSTGTLLATDLNSLPEEDQKGLGRSLETLTAAEATAFERNARTESAKSTPLHKLRDVIMETPLEITEL

SEQ ID NO: 16188 - protein, 3319 aa, Homo sapiens
MGRHVATSCHVAWLLVLISGCWGQVNRLPFFTNHFFDTYLLISEDTPVGSSVTQLLAQDMDNDPLVFGVSGEEASRFFAVEPDTGVVWLRQPLDRETKSEFTVEFSVSDHQGVITRKVNIQVGDVNDNAPTFHNQPYSVRIPENTPVGTPIFIVNATDPDLGAGGSVLYSFQPPSQFFAIDSARGIVTVIRELDYETTQAYQLTVNATDQDKTRPLSTLANLAIIITDVQDMDPIFINLPYSTNIYEHSPPGTTVRIITAIDQDKGRPRGIGYTIVSGNTNSIFALDYISGVLTLNGLLDRENPLYSHGFILTVKGTELNDDRTPSDATVTTTFNILVIDINDNAPEFNSSEYSVAITELAQVGFALPLFIQVVDKDENLGLNSMFEVYLVGNNSHHFIISPTSVQGKADIRIRVAIPLDYETVDRYDFDLFANESVPDHVGYAKVKITLINENDNRPIFSQPLYNISLYENVTVGTSVLTVLATDNDAGTFGEVSYFFSDDPDRFSLDKDTGLIMLIARLDYELIQRFTLTIIARDGGGEETTGRVRINVLDVNDNVPTFQKDAYVGALRENEPSVTQLVRLRATDEDSPPNNQITYSIVSASAFGSYFDISLYEGYGVISVSRPLDYEQISNGLIYLTVMAMDAGNPPLNSTVPVTIEVFDENDNPPTFSKPAYFVSVVENIMAGATVLFLNATDLDRSREYGQESIIYSLEGSTQFRINARSGEITTTSLLDRETKSEYILIVRAVDGGVGHNQKTGIATVNITLLDINDNHPTWKDAPYYINLVEMTPPDSDVTTVVAVDPDLGENGTLVYSIQPPNKFYSLNSTTGKIRTTHAMLDRENPDPHEAELMRKIVVSVTDCGRPPLKATSSATVFVNLLDLNDNDPTFQNLPFVAEVLEGIPAGVSIYQVVAIDLDEGLNGLVSYRMPVGMPRMDFLINSSSGVVVTTTELDRERIAEYQLRVVASDAGTPTKSSTSTLTIHVLDVNDETPTFFPAVYNVSVSEDVPREFRVVWLNCTDNDVGLNAELSYFITGGNVDGKFSVGYRDAVVRTVVGLDRETTAAYMLILEAIDNGPVGKRHTGTATVFVTVLDVNDNRPIFLQSSYEASVPEDIPEGHSILQLKATDADEGEFGRVWYRILHGNHGNNFRIHVSNGLLMRGPRPLDRERNSSHVLIVEAYNHDLGPMRSSVRVIVYVEDINDEAPVFTQQQYSRLGLRETAGIGTSVIVVQATDRDSGDGGLVNYRILSGAEGKFEIDESTGLIITVNYLDYETKTSYMMNVSATDQAPPFNQGFCSVYITLLNELDEAVQFSNASYEAAILENLALGTEIVRVQAYSIDNLNQITYRFNAYTSTQAKALFKIDAITGVITVQGLVDREKGDFYTLTVVADDGGPKVDSTVKVYITVLDENDNSPRFDFTSDSAVSIPEDCPVGQRVATVKAWDPDAGSNGQVVFSLASGNIAGAFEIVTTNDSIGEVFVARPLDREELDHYILQVVASDRGTPPRKKDHILQVTILDINDNPPVIESPFGYNVSVNENVGGGTAVVQVRATDRDIGINSVLSYYITEGNKDMAFRMDRISGEIATRPAPPDRERQSFYHLVATVEDEGTPTLSATTHVYVTIVDENDNAPMFQQPHYEVLLDEGPDTLNTSLITIQALDLDEGPNGTVTYAIVAGNIVNTFRIDRHMGVITAAKELDYEISHGRYTLIVTATDQCPILSHRLTSTTTVLVNVNDINDNVPTFPRDYEGPFEVTEGQPGPRVWTFLAHDRDSGPNGQVEYSIMDGDPLGEFVISPVEGVLRVRKDVELDRETIAFYNLTICARDRGMPPLSSTMLVGIRVLDINDNDPVLLNLPMNITISENSPVSSFVAHVLASDADSGCNARLTFNITAGNRERAFFINATTGIVTVNRPLDRERIPEYKLTISVKDNPENPRIARRDYDLLLIFLSDENDNHPLFTKSTYQAEVMENSPAGTPLTVLNGPILALDADQDIYAVVTYQLLGAQSGLFDINSSTGVVTVRSGVIIDREAFSPPILELLLLAEDIGLLNSTAHLLITILDDNDNRPTFSPATLTVHLLENCPPGFSVLQVTATDEDSGLNGELVYRIEAGAQDRFLIHLVTGVIRVGNATIDREEQESYRLTVVATDRGTVPLSGTAIVTILIDDINDSRPEFLNPIQTVSVLESAEPGTVIANITAIDHDLNPKLEYHIVGIVAKDDTDRLVPNQEDAFAVNINTGSVMVKSPMNRELVATYEVTLSVIDNASDLPERSVSVPNAKLTVNVLDVNDNTPQFKPFGITYYMERILEGATPGTTLIAVAAVDPDKGLNGLVTYTLLDLVPPGYVQLEDSSAGKVIANRTVDYEEVHWLNFTVRASDNGSPPRAAEIPVYLEIVDINDNNPIFDQPSYQEAVFEDVPVGTIILTVTATDADSGNFALIEYSLGDGESKFAINPTTGDIYVLSSLDREKKDHYILTALAKDNPGDVASNRRENSVQVVIQVLDVNDCRPQFSKPQFSTSVYENEPAGTSVITMMATDQDEGPNGELTYSLEGPGVEAFHVDMDSGLVTTQRPLQSYEKFSLTVVATDGGEPPLWGTTMLLVEVIDVNDNRPVFVRPPNGTILHIREEIPLRSNVYEVYATDKDEGLNGAVRYSFLKTAGNRDWEFFIIDPISGLIQTAQRLDRESQAVYSLILVASDLGQPVPYETMQPLQVALEDIDDNEPLFVRPPKGSPQYQLLTVPEHSPRGTLVGNVTGAVDADEGPNAIVYYFIAAGNEEKNFHLQPDGCLLVLRDLDREREAIFSFIVKASSNRSWTPPRGPSPTLDLVADLTLQEVRVVLEDINDQPPRFTKAEYTAGVATDAKVGSELIQVLALDADIGNNSLVFYSILAIHYFRALANDSEDVGQVFTMGSMDGILRTFDLFMAYSPGYFVVDIVARDLAGHNDTAIIGIYILRDDQRVKIVINEIPDRVRGFEEEFIHLLSNITGAIVNTDNVQFHVDKKGRVNFAQTELLIHVVNRDTNRILDVDRVIQMIDENKEQLRNLFRNYNVLDVQPAISVRLPDDMSALQMAIIVLAILLFLAAMLFVLMNWYYRTVHKRKLKAIVAGSAGNRGFIDIMDMPNTNKYSFDGANPVWLDPFCRNLELAAQAEHEDDLPENLSEIADLWNSPTRTHGTFGREPAAVKPDDDRYLRAAIQEYDNIAKLGQIIREGPIKLIQTELDEEPGDHSPGQGSLRFRHKPPVELKGPDGIHVVHGSTGTLLATDLNSLPEEDQKGLGRSLETLTAAEATAFERNARTESAKSTPLHKLRDVIMETPLEITEL

SEQ ID NO: 16189 - protein, 530 aa, Homo sapiens
MGRHVATSCHVAWLLVLISGCWGQVNRLPFFTNHFFDTYLLISEDTPVGSSVTQLLAQDMDNDPLVFGVSGEEASRFFAVEPDTGVVWLRQPLDRETKSEFTVEFSVSDHQGVITRKVNIQVGDVNDNAPTFHNQPYSVRIPENTPVGTPIFIVNATDPDLGAGGSVLYSFQPPSQFFAIDSARGIVTVIRELDYETTQAYQLTVNATDQDKTRPLSTLANLAIIITDVQDMDPIFINLPYSTNIYEHSPPGTTVRIITAIDQDKGRPRGIGYTIVSGNTNSIFALDYISGVLTLNGLLDRENPLYSHGFILTVKGTELNDDRTPSDATVTTTFNILVIDINDNAPEFNSSEYSVAITELAQVGFALPLFIQVVDKDENLGLNSMFEVYLVGNNSHHFIISPTSVQGKADIRIRVAIPLDYETVDRYDFDLFANESVPDHVGYAKVKITLINENDNRPIFSQPLYNISLYENVTVGTSVLTVLVSPRFTAGPLSSPGPTVVRHPEGFCPRDLSNQGRRHPQIPELCLLVY

SEQ ID NO: 16190 - protein, 1212 aa, Homo sapiens
MGRHVATSCHVAWLLVLISGCWGQVNRLPFFTNHFFDTYLLISEDTPVGSSVTQLLAQDMDNDPLVFGVSGEEASRFFAVEPDTGVVWLRQPLDRETKSEFTVEFSVSDHQGVITRKVNIQVGDVNDNAPTFHNQPYSVRIPENTPVGTPIFIVNATDPDLGAGGSVLYSFQPPSQFFAIDSARGIVTVIRELDYETTQAYQLTVNATDQDKTRPLSTLANLAIIITDVQDMDPIFINLPYSTNIYEHSPPGTTVRIITAIDQDKGRPRGIGYTIVSGNTNSIFALDYISGVLTLNGLLDRENPLYSHGFILTVKGTELNDDRTPSDATVTTTFNILVIDINDNAPEFNSSEYSVAITELAQVGFALPLFIQVVDKDENLGLNSMFEVYLVGNNSHHFIISPTSVQGKADIRIRVAIPLDYETVDRYDFDLFANESVPDHVGYAKVKITLINENDNRPIFSQPLYNISLYENVTVGTSVLTVLATDNDAGTFGEVSYFFSDDPDRFSLDKDTGLIMLIARLDYELIQRFTLTIIARDGGGEETTGRVRINVLDVNDNVPTFQKDAYVGALRENEPSVTQLVRLRATDEDSPPNNQITYSIVSASAFGSYFDISLYEGYGVISVSRPLDYEQISNGLIYLTVMAMDAGNPPLNSTVPVTIEVFDENDNPPTFSKPAYFVSVVENIMAGATVLFLNATDLDRSREYGQESIIYSLEGSTQFRINARSGEITTTSLLDRETKSEYILIVRAVDGGVGHNQKTGIATVNITLLDINDNHPTWKDAPYYINLVEMTPPDSDVTTVVAVDPDLGENGTLVYSIQPPNKFYSLNSTTGKIRTTHAMLDRENPDPHEAELMRKIVVSVTDCGRPPLKATSSATVFVNLLDLNDNDPTFQNLPFVAEVLEGIPAGVSIYQVVAIDLDEGLNGLVSYRMPVGMPRMDFLINSSSGVVVTTTELDRERIAEYQLRVVASDAGTPTKSSTSTLTIHVLDVNDETPTFFPAVYNVSVSEDVPREFRVVWLNCTDNDVGLNAELSYFITGGNVDGKFSVGYRDAVVRTVVGLDRETTAAYMLILEAIDNGPVGKRHTGTATVFVTVLDVNDNRPIFLQSSYEASVPEDIPEGHSILQEEDLASPCISPAPPRRAFQSSGEKETSQFPGKELRREPGPSKAQNRAAFTEPLAEAPLLGSKQAQEERAPLPREQAQQLQGSEGEKGGP

SEQ ID NO: 16191 - protein, 1114 aa, Homo sapiens
MVKSPMNRELVATYEVTLSVIDNASDLPERSVSVPNAKLTVNVLDVNDNTPQFKPFGITYYMERILEGATPGTTLIAVAAVDPDKGLNGLVTYTLLDLVPPGYVQLEDSSAGKVIANRTVDYEEVHWLNFTVRASDNGSPPRAAEIPVYLEIVDINDNNPIFDQPSYQEAVFEDVPVGTIILTVTATDADSGNFALIEYSLGDGESKFAINPTTGDIYVLSSLDREKKDHYILTALAKDNPGDVASNRRENSVQVVIQVLDVNDCRPQFSKPQFSTSVYENEPAGTSVITMMATDQDEGPNGELTYSLEGPGVEAFHVDMDSGLVTTQRPLQSYEKFSLTVVATDGGEPPLWGTTMLLVEVIDVNDNRPVFVRPPNGTILHIREEIPLRSNVYEVYATDKDEGLNGAVRYSFLKTAGNRDWEFFIIDPISGLIQTAQRLDRESQAVYSLILVASDLGQPVPYETMQPLQVALEDIDDNEPLFVRPPKGSPQYQLLTVPEHSPRGTLVGNVTGAVDADEGPNAIVYYFIAAGNEEKNFHLQPDGCLLVLRDLDREREAIFSFIVKASSNRSWTPPRGPSPTLDLVADLTLQEVRVVLEDINDQPPRFTKAEYTAGVATDAKVGSELIQVLALDADIGNNSLVFYSILAIHYFRALANDSEDVGQVFTMGSMDGILRTFDLFMAYSPGYFVVDIVARDLAGHNDTAIIGIYILRDDQRVKIVINEIPDRVRGFEEEFIHLLSNITGAIVNTDNVQFHVDKKGRVNFAQTELLIHVVNRDTNRILDVDRVIQMIDENKEQLRNLFRNYNVLDVQPAISVRLPDDMSALQMAIIVLAILLFLAAMLFVLMNWYYRTVHKRKLKAIVAGSAGNRGFIDIMDMPNTNKYSFDGANPVWLDPFCRNLELAAQAEHEDDLPENLSEIADLWNSPTRTHGTFGREPAAVKPDDDRYLRAAIQEYDNIAKLGQIIREGPIKGSLLKVVLEDYLRLKKLFAQRMVQKASSCHSSISELIQTELDEEPGDHSPGQGSLRFRHKPPVELKGPDGIHVVHGSTGTLLATDLNSLPEEDQKGLGRSLETLTAAEATAFERNARTESAKSTPLHKLRDVIMETPLEITEL

SEQ ID NO: 16192 - protein, 3357 aa, Homo sapiens
MGRHVATSCHVAWLLVLISGCWGQVNRLPFFTNHFFDTYLLISEDTPVGSSVTQLLAQDMDNDPLVFGVSGEEASRFFAVEPDTGVVWLRQPLDRETKSEFTVEFSVSDHQGVITRKVNIQVGDVNDNAPTFHNQPYSVRIPEVGATGNTPVGTPIFIVNATDPDLGAGGSVLYSFQPPSQFFAIDSARGIVTVIRELDYETTQAYQLTVNATDQDKTRPLSTLANLAIIITDVQDMDPIFINLPYSTNIYEHSPPGTTVRIITAIDQDKGRPRGIGYTIVSGNTNSIFALDYISGVLTLNGLLDRENPLYSHGFILTVKGTELNDDRTPSDATVTTTFNILVIDINDNAPEFNSSEYSVAITELAQVGFALPLFIQVVDKDEGLNSMFEVYLVGNNSHHFIISPTSVQGKADIRIRVAIPLDYETVDRYDFDLFANESVPDHVGYAKVKITLINENDNRPIFSQPLYNISLYENVTVGTSVLTVLATDNDAGTFGEVSYFFSDDPDRFSLDKDTGLIMLIARLDYELIQRFTLTIIARDGGGEETTGRVRINVLDVNDNVPTFQKDAYVGALRENEPSVTQLVRLRATDEDSPPNNQITYSIVSASAFGSYFDISLYEGYGVISVSRPLDYEQISNGLIYLTVMAMDAGNPPLNSTVPVTIEVFDENDNPPTFSKPAYFVSVVENIMAGATVLFLNATDLDRSREYGQESIIYSLEGSTQFRINARSGEITTTSLLDRETKSEYILIVRAVDGGVGHNQKTGIATVNITLLDINDNHPTWKDAPYYINLVEMTPPDSDVTTVVAVDPDLGENGTLVYSIQPPNKFYSLNSTTGKIRTTHAMLDRENPDPHEAELMRKIVVSVTDCGRPPLKATSSATVFVNLLDLNDNDPTFQNLPFVAEVLEGIPAGVSIYQVVAIDLDEGLNGLVSYRMPVGMPRMDFLINSSSGVVVTTTELDRERIAEYQLRVVASDAGTPTKSSTSTLTIHVLDVNDETPTFFPAVYNVSVSEDVPREFRVVWLNCTDNDVGLNAELSYFITGGNVDGKFSVGYRDAVVRTVVGLDRETTAAYMLILEAIDNGPVGKRHTGTATVFVTVLDVNDNRPIFLQSSYEASVPEDIPEGHSILQLKATDADEGEFGRVWYRILHGNHGNNFRIHVSNGLLMRGPRPLDRERNSSHVLIVEAYNHDLGPMRSSVRVIVYVEDINDEAPVFTQQQYSRLGLRETAGIGTSVIVVQATDRDSGDGGLVNYRILSGAEGKFEIDESTGLIITVNYLDYETKTSYMMNVSATDQAPPFNQGFCSVYITLLNELDEAVQFSNASYEAAILENLALGTEIVRVQAYSIDNLNQITYRFNAYTSTQAKALFKIDAITGVITVQGLVDREKGDFYTLTVVADDGGPKVDSTVKVYITVLDENDNSPRFDFTSDSAVSIPEDCPVGQRVATVKAWDPDAGSNGQVVFSLASGNIAGAFEIVTTNDSIGEVFVARPLDREELDHYILQVVASDRGTPPRKKDHILQVTILDINDNPPVIESPFGYNVSVNENVGGGTAVVQVRATDRDIGINSVLSYYITEGNKDMAFRMDRISGEIATRPAPPDRERQSFYHLVATVEDEGTPTLSATTHVYVTIVDENDNAPMFQQPHYEVLLDEGPDTLNTSLITIQALDLDEGPNGTVTYAIVAGNIVNTFRIDRHMGVITAAKELDYEISHGRYTLIVTATDQCPILSHRLTSTTTVLVNVNDINDNVPTFPRDYEGPFEVTEGQPGPRVWTFLAHDRDSGPNGQVEYSIMDGDPLGEFVISPVEGVLRVRKDVELDRETIAFYNLTICARDRGMPPLSSTMLVGIRVLDINDNDPVLLNLPMNITISENSPVSSFVAHVLASDADSGCNARLTFNITAGNRERAFFINATTGIVTVNRPLDRERIPEYKLTISVKDNPENPRIARRDYDLLLIFLSDENDNHPLFTKSTYQAEVMENSPAGTPLTVLNGPILALDADQDIYAVVTYQLLGAQSGLFDINSSTGVVTVRSGVIIDREAFSPPILELLLLAEDIGLLNSTAHLLITILDDNDNRPTFSPATLTVHLLENCPPGFSVLQVTATDEDSGLNGELVYRIEAGAQDRFLIHLVTGVIRVGNATIDREEQESYRLTVVATDRGTVPLSGTAIVTILIDDINDSRPEFLNPIQTVSVLESAEPGTVIANITAIDHDLNPKLEYHIVGIVAKDDTDRLVPNQEDAFAVNINTGSVMVKSPMNRELVATYEVTLSVIDNASDLPERSVSVPNAKLTVNVLDVNDNTPQFKPFGITYYMERILEGATPGTTLIAVAAVDPDKGLNGLVTYTLLDLVPPGYVQLEDSSAGKVIANRTVDYEEVHWLNFTVRASDNGSPPRAAEIPVYLEIVDINDNNPIFDQPSYQEAVFEDVPVGTIILTVTATDADSGNFALIEYSLGDGESKFAINPTTGDIYVLSSLDREKKDHYILTALAKDNPGDVASNRRENSVQVVIQVLDVNDCRPQFSKPQFSTSVYENEPAGTSVITMMATDQDEGPNGELTYSLEGPGVEAFHVDMDSGLVTTQRPLQSYEKFSLTVVATDGGEPPLWGTTMLLVEVIDVNDNRPVFVRPPNGTILHIREEIPLRSNVYEVYATDKDEGLNGAVRYSFLKTAGNRDWEFFIIDPISGLIQTAQRLDRESQAVYSLILVASDLGQPVPYETMQPLQVALEDIDDNEPLFVRPPKGSPQYQLLTVPEHSPRGTLVGNVTGAVDADEGPNAIVYYFIAAGNEEKNFHLQPDGCLLVLRDLDREREAIFSFIVKASSNRSWTPPRGPSPTLDLVADLTLQEVRVVLEDINDQPPRFTKAEYTAGVATDAKVGSELIQVLALDADIGNNSLVFYSILAIHYFRALANDSEDVGQVFTMGSMDGILRTFDLFMAYSPGYFVVDIVARDLAGHNDTAIIGIYILRDDQRVKIVINEIPDRVRGFEEEFIHLLSNITGAIVNTDNVQFHVDKKGRVNFAQTELLIHVVNRDTNRILDVDRVIQMIDENKEQLRNLFRNYNVLDVQPAISVRLPDDMSALQMAIIVLAILLFLAAMLFVLMNWYYRTVHKRKLKAIVAGSAGNRGFIDIMDMPNTNKYSFDGANPVWLDPFCRNLELAAQAEHEDDLPENLSEIADLWNSPTRTHGTFGREPAAVKPDDDRYLRAAIQEYDNIAKLGQIIREGPIKGSLLKVVLEDYLRLKKLFAQRMVQKASSCHSSISELIQTELDEEPGDHSPGQGSLRFRHKPPVELKGPDGIHVVHGSTGTLLATDLNSLPEEDQKGLGRSLETLTAAEATAFERNARTESAKSTPLHKLRDVIMETPLEITEL

SEQ ID NO: 16193 - protein, 1079 aa, Homo sapiens
MVKSPMNRELVATYEVTLSVIDNASDLPERSVSVPNAKLTVNVLDVNDNTPQFKPFGITYYMERILEGATPGTTLIAVAAVDPDKGLNGLVTYTLLDLVPPGYVQLEDSSAGKVIANRTVDYEEVHWLNFTVRASDNGSPPRAAEIPVYLEIVDINDNNPIFDQPSYQEAVFEDVPVGTIILTVTATDADSGNFALIEYSLGDGESKFAINPTTGDIYVLSSLDREKKDHYILTALAKDNPGDVASNRRENSVQVVIQVLDVNDCRPQFSKPQFSTSVYENEPAGTSVITMMATDQDEGPNGELTYSLEGPGVEAFHVDMDSGLVTTQRPLQSYEKFSLTVVATDGGEPPLWGTTMLLVEVIDVNDNRPVFVRPPNGTILHIREEIPLRSNVYEVYATDKDEGLNGAVRYSFLKTAGNRDWEFFIIDPISGLIQTAQRLDRESQAVYSLILVASDLGQPVPYETMQPLQVALEDIDDNEPLFVRPPKGSPQYQLLTVPEHSPRGTLVGNVTGAVDADEGPNAIVYYFIAAGNEEKNFHLQPDGCLLVLRDLDREREAIFSFIVKASSNRSWTPPRGPSPTLDLVADLTLQEVRVVLEDINDQPPRFTKAEYTAGVATDAKVGSELIQVLALDADIGNNSLVFYSILAIHYFRALANDSEDVGQVFTMGSMDGILRTFDLFMAYSPGYFVVDIVARDLAGHNDTAIIGIYILRDDQRVKIVINEIPDRVRGFEEEFIHLLSNITGAIVNTDNVQFHVDKKGRVNFAQTELLIHVVNRDTNRILDVDRVIQMIDENKEQLRNLFRNYNVLDVQPAISVRLPDDMSALQMAIIVLAILLFLAAMLFVLMNWYYRTVHKRKLKAIVAGSAGNRGFIDIMDMPNTNKYSFDGANPVWLDPFCRNLELAAQAEHEDDLPENLSEIADLWNSPTRTHGTFGREPAAVKPDDDRYLRAAIQEYDNIAKLGQIIREGPIKLIQTELDEEPGDHSPGQGSLRFRHKPPVELKGPDGIHVVHGSTGTLLATDLNSLPEEDQKGLGRSLETLTAAEATAFERNARTESAKSTPLHKLRDVIMETPLEITEL

SEQ ID NO: 16194 - protein, 251 aa, Homo sapiens
MRSWFQQDPMVGACTTGTRASHPKANPVWLDPFCRNLELAAQAEHEDDLPENLSEIADLWNSPTRTHGTFGREPAAVKPDDDRYLRAAIQEYDNIAKLGQIIREGPIKGSLLKVVLEDYLRLKKLFAQRMVQKASSCHSSISELIQTELDEEPGDHSPGQGSLRFRHKPPVELKGPDGIHVVHGSTGTLLATDLNSLPEEDQKGLGRSLETLTAAEATAFERNARTESAKSTPLHKLRDVIMETPLEITEL

SEQ ID NO: 16195 - protein, 216 aa, Homo sapiens
MRSWFQQDPMVGACTTGTRASHPKANPVWLDPFCRNLELAAQAEHEDDLPENLSEIADLWNSPTRTHGTFGREPAAVKPDDDRYLRAAIQEYDNIAKLGQIIREGPIKLIQTELDEEPGDHSPGQGSLRFRHKPPVELKGPDGIHVVHGSTGTLLATDLNSLPEEDQKGLGRSLETLTAAEATAFERNARTESAKSTPLHKLRDVIMETPLEITEL

SEQ ID NO: 16196 - protein, 832 aa, Homo sapiens
MAMRSGRHPSLLLLLVLLLWLLQVSIIDSVQQETDDLTKQTKEKIYQPLRRSKRRWVITTLELEEEDPGPFPKLIGELFNNMSYNMSLMYLISGPGVDEYPEIGLFSLEDHENGRIYVHRPVDREMTPSFTVYFDVVERSTGKIVDTSLIFNIRISDVNDHAPQFPEKEFNITVQENQSAGQPIFQMLAVDLDEENTPNSQVLYFLISQTPLLKESGFRVDRLSGEIRLSGCLDYETAPQFTLLIRARDCGEPSLSSTTTVHVDVQEGNNHRPAFTQENYKVQIPEGRASQGVLRLLVQDRDSPFTSAWRAKFNILHGNEEGHFDISTDPETNEGILNVIKPLDYETRPAQSLIIVVENEERLVFCERGKLQPPRKAAASATVSVQVTDANDPPAFHPQSFIVNKEEGARPGTLLGTFNAMDPDSQIRYELVHDPANWVSVDKNSGVVITVEPIDRESPHVNNSFYVIIIHAVDDGFPPQTATGTLMLFLSDINDNVPTLRPRSRYMEVCESAVHEPLHIEAEDPDLEPFSDPFTFELDNTWGNAEDTWKLGRNWGQSVELLTLRSLPRGNYLVPLFIGDKQGLSQKQTVHVRICPCASGLTCVELADAEVGLHVGALFPVCAAFVALAVALLFLLRCYFVLEPKRHGCSVSNDEGHQTLVMYNAESKGTSAQTWSDVEGQRPALLICTAAAGPTQGVKDLEEVPPSAASQSAQARCALGSWGYGKPFEPRSVKNIHSTPAYPDATMHRQLLAPVEGRMAETLNQKLHVANVLEDDPGYLPHVYSEEGECGGAPSLSSLASLEQELQPDLLDSLGSKATPFEEIYSESGVPS

SEQ ID NO: 16197 - protein, 852 aa, Homo sapiens
MAMRSGRHPSLLLLLVLLLWLLQVSIIDSVQQETDDLTKQTKEKIYQPLRRSKRRWVITTLELEEEDPGPFPKLIGELFNNMSYNMSLMYLISGPGVDEYPEIGLFSLEDHENGRIYVHRPVDREMTPSFTVYFDVVERSTGKIVDTSLIFNIRISDVNDHAPQFPEKEFNITVQENQSAGQPIFQMLAVDLDEENTPNSQVLYFLISQTPLLKESGFRVDRLSGEIRLSGCLDYETAPQFTLLIRARDCGEPSLSSTTTVHVDVQEGNNHRPAFTQENYKVQIPEGRASQGVLRLLVQDRDSPFTSAWRAKFNILHGNEEGHFDISTDPETNEGILNVIKPLDYETRPAQSLIIVVENEERLVFCERGKLQPPRKAAASATVSVQVTDANDPPAFHPQSFIVNKEEGARPGTLLGTFNAMDPDSQIRYELVHDPANWVSVDKNSGVVITVEPIDRESPHVNNSFYVIIIHAVDDGFPPQTATGTLMLFLSDINDNVPTLRPRSRYMEVCESAVHEPLHIEAEDPDLEPFSDPFTFELDNTWGNAEDTWKLGRNWGQSVELLTLRSLPRGNYLVPLFIGDKQGLSQKQTVHVRICPCASGLTCVELADAEVGLHVGALFPVCAAFVALAVALLFLLRCYFVLEPKRHGCSVSNDEGHQTLVMYNAESKGTSAQTWSDVEGQRPALLICTAAAGPTQGVKAYPDATMHRQLLAPVEGRMAETLNQSKERNRFSLSRGCIIPQGRATAGRGLPQDIYKEMMPRRLTQTGKRKHGALARTPSFKKVVYDHKEDEENKAGRKQRSHLFKVMQLRNEQGGVRVQSAHSPSPLNKKACFPGDYRGESAGGHNCRAVSG

SEQ ID NO: 16198 - protein, 165 aa, Homo sapiens
MKPLIWTWSDVEGQRPALLICTAAAGPTQGVKDLEEVPPSAASQSAQARCALGSWGYGKPFEPRSVKNIHSTPAYPDATMHRQLLAPVEGRMAETLNQKLHVANVLEDDPGYLPHVYSEEGECGGAPSLSSLASLEQELQPDLLDSLGSKATPFEEIYSESGVPS

SEQ ID NO: 16199 - protein, 124 aa, Homo sapiens
MKPLIWTWSDVEGQRPALLICTAAAGPTQGVKAYPDATMHRQLLAPVEGRMAETLNQKLHVANVLEDDPGYLPHVYSEEGECGGAPSLSSLASLEQELQPDLLDSLGSKATPFEEIYSESGVPS

SEQ ID NO: 16200 - protein, 116 aa, Homo sapiens
MVGGEAAAAVEELVSGVRQAADFAEQFRSYSESEKQWKARMEFILRHLPDYRDPPDGSGRLDQLLSLSMVWANHLFLGCSYNKDLLDKVMEMADGIEVEDLPQFTTRSELMKKHQS

SEQ ID NO: 16201 - protein, 85 aa, Homo sapiens
MVGGEAAAAVEELVSGVRQAADFAEQFRSYSESEKQWKARMEFILRHLPDYRDPPDGSGRLDQLLSLSMVWANHLFLGCSPRGPK

SEQ ID NO: 16202 - protein, 503 aa, Homo sapiens
MALRAKAEVCMAVPWLSLQRAQALGTRAARVPRTVLPFEAMPRRPGNRWLRLLQIWREQGYEDLHLEVHQTFQELGPIFRYDLGGAGMVCVMLPEDVEKLQQVDSLHPHRMSLEPWVAYRQHRGHKCGVFLLNGPEWRFNRLRLNPEVLSPNAVQRFLPMVDAVARDFSQALKKKVLQNARGSLTLDVQPSIFHYTIEASNLALFGERLGLVGHSPSSASLNFLHALEVMFKSTVQLMFMPRSLSRWTSPKVWKEHFEAWDCIFQYGDNCIQKIYQELAFSRPQQYTSIVAELLLNAELSPDAIKANSMELTAGSVDTTVFPLLMTLFELARNPNVQQALRQESLAAAASISEHPQKATTELPLLRAALKETLRLYPVGLFLERVASSDLVLQNYHIPAGTLVRVFLYSLGRNPALFPRPERYNPQRWLDIRGSGRNFYHVPFGFGMRQCLGRRLAEAEMLLLLHHVLKHLQVETLTQEDIKMVYSFILRPSMFPLLTFRAIN

SEQ ID NO: 16203 - protein, 437 aa, Homo sapiens
MALRAKAEVCMAVPWLSLQRAQALGTRAARVPRTVLPFEAMPRRPGNRWLRLLQIWREQGYEDLHLEVHQTFQELGPIFRYDLGGAGMVCVMLPEDVEKLQQVDSLHPHRMSLEPWVAYRQHRGHKCGVFLLNGPEWRFNRLRLNPEVLSPNAVQRFLPMVDAVARDFSQALKKKVLQNARGSLTLDVQPSIFHYTIEASNLALFGERLGLVGHSPSSASLNFLHALEVMFKSTVQLMFMPRSLSRWTSPKVWKEHFEAWDCIFQYGDNCIQKIYQELAFSRPQQYTSIVAELLLNAELSPDAIKANSMELTAGSVDTTVFPLLMTLFELARNPNVQQALRQESLAAAASISEHPQKATTELPLLRAALKETLRLYPVGLFLERVASSDLVLQNYHIPAGVLKHLQVETLTQEDIKMVYSFILRPSMFPLLTFRAIN

SEQ ID NO: 16204 - protein, 706 aa, Homo sapiens
MDPGWGQRDVGWAALLILFAASLLTVFAWLLQYARGLWLARARGDRGPGPALAGEPAGSLRELGVWRSLLRLRATRAGAAEEPGVRGLLASLFAFKSFRENWQRAWVRALNEQACRNGSSIQIAFEEVPQLPPRASISHVTCVDQSEHTMVLRCQLSAEEVRFPVSVTQQSPAAVSMETYHVTLTLPPTQLEVNLEEIPGEGLLISWAFTDRPDLSLTVLPKLQARERGEEQVELSTIEELIKDAIVSTQPAMMVNLRACSAPGGLVPSEKPPMMPQAQPAIPRPNRLFLRQLRASHLGNELEGTEELCCVAELDNPMQQKWTKPARAGSEVEWTEDLALDLGPQSRELTLKVLRSSSCGDTELLGQATLPVGSPSRPLSRRQLCPLTPGPGKALGPAATMAVELHYEEGSPRNLGTPTSSTPRPSITPTKKIELDRTIMPDGTIVTTVTTVQSRPRIDGKLDSPSRSPSKVEVTEKTTTVLSESSGPSNTSHSSSRDSHLSNGLDPVAETAIRQLTEPSGRVAKKTPTKRSTLIISGVSKVPIAQDELALSLGYAASLEASVQDDAGTSGGPSSPPSDPPAMSPGPLDALSSPTSVQEADETTRSDISERPSVDDIESETGSTGALETRSLKDHKVSFLRSGTKLIFRRRPRQKEAGLSQSHDDLSNATATPSVRKKAGSFSRRLIKRFSFKSKPKANGNPSPQL

SEQ ID NO: 16205 - protein, 707 aa, Homo sapiens
MDPGWGQRDVGWAALLILFAASLLTVFAWLLQYARGLWLARARGDRGPGPALAGEPAGSLRELGVWRSLLRLRATRAGAAEEPGVRGLLASLFAFKSFRENWQRAWVRALNEQACRNGSSIQIAFEEVPQLPPRASISHVTCVDQSEHTMVLRCQLSAEEVRFPVSVTQQSPAAVSMETYHVTLTLPPTQLEVNLEEIPGEGLLISWAFTDRPDLSLTVLPKLQARERGEEQVELSTIEELIKDAIVSTQPAMMVNLRACSAPGGLVPSEKPPMMPQAQPAIPRPNRLFLRQLRASHLGNELEGTEELCCVAELDNPMQQKWTKPARAGSEVEWTEDLALDLGPQSRELTLKVLRSSSCGDTELLGQATLPVGSPSRPLSRRQLCPLTPGPGKALGPAATMAVELHYEEGSPRNLGTPTSSTPRPSITPTKKIELDRTIMPDGTIVTTVTTVQSRPRIDGKLDSPSRSPSKVEVTEKTTTVLSESSGPSNTSHSSSPGDSHLSNGLDPVAETAIRQLTEPSGRVAKKTPTKRSTLIISGVSKVPIAQDELALSLGYAASLEASVQDDAGTSGGPSSPPSDPPAMSPGPLDALSSPTSVQEADETTRSDISERPSVDDIESETGSTGALETRSLKDHKVSFLRSGTKLIFRRRPRQKEAGLSQSHDDLSNATATPSVRKKAGSFSRRLIKRFSFKSKPKANGNPSPQL

SEQ ID NO: 16206 - protein, 364 aa, Homo sapiens
MRLLEKLCSSAAGSSAPKPAFAKVLTPNRIPEFCIPPRLPAPCTLESPIRAAAVPRRCAAESDLWPRAADEDAGRTDWDPRSQAALSLPHLPRVRTTYGFCALLESPHTRRKESLLLGGPPAPRPRAHSCGGGGGPDAPLGTLCGPRGPGPATPAAPGGPRLPQDALAAGPRRCRLLRVPDGLLSRALRAGRSRRLARVRSVSSGNEDEERRAGSESPARAPSSSPLSSRAPLPERLEAKGTVALGRAGDALRLAAEYCPGTRRLRLRLLRAESLFGGAPGPRAVRCRLSLVLRPPGTARWQCSAVVGRSRKASFDQDFCFDGLSEDEVRRLAVRVKARDEGRGRDRGRLLGQGELSLGALLLL

SEQ ID NO: 16207 - protein, 795 aa, Homo sapiens
MGDEKDSWKVKTLDEILQEKKRRKEQEEKAEIKRLKNSDDRDSKRDSLEEGELRDHRMEITIRNSPYRREDSMEDRGEEDDSLAIKPPQQMSRKEKAHHRKDEKRKEKRRHRSHSAEGGKHARVKEKEREHERRKRHREEQDKARREWERQKRREMAREHSRRERDRLEQLERKRERERKMREQQKEQREQKERERRAEERRKEREARREVSAHHRTMREDYSDKVKASHWSRSPPRPPRERFELGDGRKPGEARPAPAQKPAQLKEEKMEERDLLSDLQDISDSERKTSSAESSSAESGSGSEEEEEEEEEEEEEGSTSEESEEEEEEEEEEEEETGSNSEEASEQSAEEVSEEEMSEDEERENENHLLVVPESRFDRDSGESEEAEEEVGEGTPQSSALTEGDYVPDSPALSPIELKQELPKYLPALQGCRSVEEFQCLNRIEEGTYGVVYRAKDKKTDEIVALKRLKMEKEKEGFPITSLREINTILKAQHPNIVTVREIVVGSNMDKIYIVMNYVEHDLKSLMETMKQPFLPGEVKTLMIQLLRGVKHLHDNWILHRDLKTSNLLLSHAGILKVGDFGLAREYGSPLKAYTPVVVTLWYRAPELLLGAKEYSTAVDMWSVGCIFGELLTQKPLFPGKSEIDQINKVFKDLGTPSEKIWPGYSELPAVKKMTFSEHPYNNLRKRFGALLSDQGFDLMNKFLTYFPGRRISAEDGLKHEYFRETPLPIDPSMFPTWPAKSEQQRVKRGTSPRPPEGGLGYSQLGDDDLKETGFHLTTTNQGASAAGPGFSLKF

SEQ ID NO: 16208 - protein, 782 aa, Homo sapiens
MGDEKDSWKVKTLDEILQEKKRRKEQEEKAEIKRLKNSDDRDSKRDSLEEGELRDHRMEITIRNSPYRREDSMEDRGEEDDSLAIKPPQQMSRKEKAHHRKDEKRKEKRRHRSHSAEGGKHARVKEKEREHERRKRHREEQDKARREWERQKRREMAREHSRRERDRLEQLERKRERERKMREQQKEQREQKERERRAEERRKEREARREVSAHHRTMREDYSDKVKASHWSRSPPRPPRERFELGDGRKPVKEEKMEERDLLSDLQDISDSERKTSSAESSSAESGSGSEEEEEEEEEEEEEGSTSEESEEEEEEEEEEEEETGSNSEEASEQSAEEVSEEEMSEDEERENENHLLVVPESRFDRDSGESEEAEEEVGEGTPQSSALTEGDYVPDSPALSPIELKQELPKYLPALQGCRSVEEFQCLNRIEEGTYGVVYRAKDKKTDEIVALKRLKMEKEKEGFPITSLREINTILKAQHPNIVTVREIVVGSNMDKIYIVMNYVEHDLKSLMETMKQPFLPGEVKTLMIQLLRGVKHLHDNWILHRDLKTSNLLLSHAGILKVGDFGLAREYGSPLKAYTPVVVTLWYRAPELLLGAKEYSTAVDMWSVGCIFGELLTQKPLFPGKSEIDQINKVFKDLGTPSEKIWPGYSELPAVKKMTFSEHPYNNLRKRFGALLSDQGFDLMNKFLTYFPGRRISAEDGLKHEYFRETPLPIDPSMFPTWPAKSEQQRVKRGTSPRPPEGGLGYSQLGDDDLKETGFHLTTTNQGASAAGPGFSLKF

SEQ ID NO: 16209 - protein, 781 aa, Homo sapiens
MGDEKDSWKVKTLDEILQEKKRRKEQEEKAEIKRLKNSDDRDSKRDSLEEGELRDHRMEITIRNSPYRREDSMEDRGEEDDSLAIKPPQQMSRKEKAHHRKDEKRKEKRKHARVKEKEREHERRKRHREEQDKARREWERQKRREMAREHSRRERGNDGVCLFRDRLEQLERKRERERKMREQQKEQREQKERERRAEERRKEREARREVSAHHRTMREDYSDKVKASHWSRSPPRPPRERFELGDGRKPVKEEKMEERDLLSDLQDISDSERKTSSAESSSAESGSGSEEEEEEEEEEEEEGSTSEESEEEEEEEEEEEEETGSNSEEASEQSAEEVSEEEMSEDEERENENHLLVVPESRFDRDSGESEEAEEEVGEGTPQSSALTEGDYVPDSPALSPIELKQELPKYLPALQGCRSVEEFQCLNRIEEGTYGVVYRAKDKKTDEIVALKRLKMEKEKEGFPITSLREINTILKAQHPNIVTVREIVVGSNMDKIYIVMNYVEHDLKSLMETMKQPFLPGEVKTLMIQLLRGVKHLHDNWILHRDLKTSNLLLSHAGILKVGDFGLAREYGSPLKAYTPVVVTLWYRAPELLLGAKEYSTAVDMWSVGCIFGELLTQKPLFPGKSEIDQINKVFKDLGTPSEKIWPGYSELPAVKKMTFSEHPYNNLRKRFGALLSDQGFDLMNKFLTYFPGRRISAEDGLKHEYFRETPLPIDPSMFPTWPAKSEQQRVKRGTSPRPPEGGLGYSQLGDDDLKETGFHLTTTNQGASAAGPGFSLKF

SEQ ID NO: 16210 - protein, 461 aa, Homo sapiens
METGSNSEEASEQSAEEVSEEEMSEDEERENENHLLVVPESRFDRDSGESEEAEEEVGEGTPQSSALTEGDYVPDSPALSPIELKQELPKYLPALQGCRSVEEFQCLNRIEEGTYGVVYRAKDKKTDEIVALKRLKMEKEKEGFPITSLREINTILKAQHPNIVTVREIVVGSNMDKIYIVMNYVEHDLKSLMETMKQPFLPGEVKTLMIQLLRGVKHLHDNWILHRDLKTSNLLLSHAGILKVGDFGLAREYGSPLKAYTPVVVTLWYRAPELLLGAKEYSTAVDMWSVGCIFGELLTQKPLFPGKSEIDQINKVFKDLGTPSEKIWPGYSELPAVKKMTFSEHPYNNLRKRFGALLSDQGFDLMNKFLTYFPGRRISAEDGLKHEYFRETPLPIDPSMFPTWPAKSEQQRVKRGTSPRPPEGGLGYSQLGDDDLKETGFHLTTTNQGASAAGPGFSLKF

SEQ ID NO: 16211 - protein, 526 aa, Homo sapiens
MEERDLLSDLQDISDSERKTSSAESSSAESGSGSEEEEEEEEEEEEEGSTSEESEEEEEEEEEEEEETGSNSEEASEQSAEEVSEEEMSEDEERENENHLLVVPESRFDRDSGESEEAEEEVGEGTPQSSALTEGDYVPDSPALSPIELKQELPKYLPALQGCRSVEEFQCLNRIEEGTYGVVYRAKDKKTDEIVALKRLKMEKEKEGFPITSLREINTILKAQHPNIVTVREIVVGSNMDKIYIVMNYVEHDLKSLMETMKQPFLPGEVKTLMIQLLRGVKHLHDNWILHRDLKTSNLLLSHAGILKVGDFGLAREYGSPLKAYTPVVVTLWYRAPELLLGAKEYSTAVDMWSVGCIFGELLTQKPLFPGKSEIDQINKVFKDLGTPSEKIWPGYSELPAVKKMTFSEHPYNNLRKRFGALLSDQGFDLMNKFLTYFPGRRISAEDGLKHEYFRETPLPIDPSMFPTWPAKSEQQRVKRGTSPRPPEGGLGYSQLGDDDLKETGFHLTTTNQGASAAGPGFSLKF

SEQ ID NO: 16212 - protein, 738 aa, Homo sapiens
MSQSDDRDSKRDSLEEGELRDHRMEITIRNSPYRREDSMEDRGEEDDSLAIKPPQQMSRKEKAHHRKDEKRKEKRKHARVKEKEREHERRKRHREEQDKARREWERQKRREMAREHSRRERDRLEQLERKRERERKMREQQKEQREQKERERRAEERRKEREARREVSAHHRTMREDYSDKVKASHWSRSPPRPPRERFELGDGRKPVKEEKMEERDLLSDLQDISDSERKTSSAESSSAESGSGSEEEEEEEEEEEEEGSTSEESEEEEEEEEEEEEETGSNSEEASEQSAEEVSEEEMSEDEERENENHLLVVPESRFDRDSGESEEAEEEVGEGTPQSSALTEGDYVPDSPALSPIELKQELPKYLPALQGCRSVEEFQCLNRIEEGTYGVVYRAKDKKTDEIVALKRLKMEKEKEGFPITSLREINTILKAQHPNIVTVREIVVGSNMDKIYIVMNYVEHDLKSLMETMKQPFLPGEVKTLMIQLLRGVKHLHDNWILHRDLKTSNLLLSHAGILKVGDFGLAREYGSPLKAYTPVVVTLWYRAPELLLGAKEYSTAVDMWSVGCIFGELLTQKPLFPGKSEIDQINKVFKDLGTPSEKIWPGYSELPAVKKMTFSEHPYNNLRKRFGALLSDQGFDLMNKFLTYFPGRRISAEDGLKHEYFRETPLPIDPSMFPTWPAKSEQQRVKRGTSPRPPEGGLGYSQLGDDDLKETGFHLTTTNQGASAAGPGFSLKF

SEQ ID NO: 16213 - protein, 772 aa, Homo sapiens
MGDEKDSWKVKTLDEILQEKKRRKEQEEKAEIKRLKNSDDRDSKRDSLEEGELRDHRMEITIRNSPYRREDSMEDRGEEDDSLAIKPPQQMSRKEKAHHRKDEKRKEKRKHARVKEKEREHERRKRHREEQDKARREWERQKRREMAREHSRRERDRLEQLERKRERERKMREQQKEQREQKERERRAEERRKEREARREVSAHHRTMREDYSDKVKASHWSRSPPRPPRERFELGDGRKPVKEEKMEERDLLSDLQDISDSERKTSSAESSSAESGSGSEEEEEEEEEEEEEGSTSEESEEEEEEEEEEEEETGSNSEEASEQSAEEVSEEEMSEDEERENENHLLVVPESRFDRDSGESEEAEEEVGEGTPQSSALTEGDYVPDSPALSPIELKQELPKYLPALQGCRSVEEFQCLNRIEEGTYGVVYRAKDKKTDEIVALKRLKMEKEKEGFPITSLREINTILKAQHPNIVTVREIVVGSNMDKIYIVMNYVEHDLKSLMETMKQPFLPGEVKTLMIQLLRGVKHLHDNWILHRDLKTSNLLLSHAGILKVGDFGLAREYGSPLKAYTPVVVTLWYRAPELLLGAKEYSTAVDMWSVGCIFGELLTQKPLFPGKSEIDQINKVFKDLGTPSEKIWPGYSELPAVKKMTFSEHPYNNLRKRFGALLSDQGFDLMNKFLTYFPGRRISAEDGLKHEYFRETPLPIDPSMFPTWPAKSEQQRVKRGTSPRPPEGGLGYSQLGDDDLKETGFHLTTTNQGASAAGPGFSLKF

SEQ ID NO: 16214 - protein, 748 aa, Homo sapiens
MSQSDDRDSKRDSLEEGELRDHRMEITIRNSPYRREDSMEDRGEEDDSLAIKPPQQMSRKEKAHHRKDEKRKEKRRHRSHSAEGGKHARVKEKEREHERRKRHREEQDKARREWERQKRREMAREHSRRERDRLEQLERKRERERKMREQQKEQREQKERERRAEERRKEREARREVSAHHRTMREDYSDKVKASHWSRSPPRPPRERFELGDGRKPVKEEKMEERDLLSDLQDISDSERKTSSAESSSAESGSGSEEEEEEEEEEEEEGSTSEESEEEEEEEEEEEEETGSNSEEASEQSAEEVSEEEMSEDEERENENHLLVVPESRFDRDSGESEEAEEEVGEGTPQSSALTEGDYVPDSPALSPIELKQELPKYLPALQGCRSVEEFQCLNRIEEGTYGVVYRAKDKKTDEIVALKRLKMEKEKEGFPITSLREINTILKAQHPNIVTVREIVVGSNMDKIYIVMNYVEHDLKSLMETMKQPFLPGEVKTLMIQLLRGVKHLHDNWILHRDLKTSNLLLSHAGILKVGDFGLAREYGSPLKAYTPVVVTLWYRAPELLLGAKEYSTAVDMWSVGCIFGELLTQKPLFPGKSEIDQINKVFKDLGTPSEKIWPGYSELPAVKKMTFSEHPYNNLRKRFGALLSDQGFDLMNKFLTYFPGRRISAEDGLKHEYFRETPLPIDPSMFPTWPAKSEQQRVKRGTSPRPPEGGLGYSQLGDDDLKETGFHLTTTNQGASAAGPGFSLKF

SEQ ID NO: 16215 - protein, 565 aa, Homo sapiens
MREDYSDKVKASHWSRSPPRPPRERFELGDGRKPVKEEKMEERDLLSDLQDISDSERKTSSAESSSAESGSGSEEEEEEEEEEEEEGSTSEESEEEEEEEEEEEEETGSNSEEASEQSAEEVSEEEMSEDEERENENHLLVVPESRFDRDSGESEEAEEEVGEGTPQSSALTEGDYVPDSPALSPIELKQELPKYLPALQGCRSVEEFQCLNRIEEGTYGVVYRAKDKKTDEIVALKRLKMEKEKEGFPITSLREINTILKAQHPNIVTVREIVVGSNMDKIYIVMNYVEHDLKSLMETMKQPFLPGEVKTLMIQLLRGVKHLHDNWILHRDLKTSNLLLSHAGILKVGDFGLAREYGSPLKAYTPVVVTLWYRAPELLLGAKEYSTAVDMWSVGCIFGELLTQKPLFPGKSEIDQINKVFKDLGTPSEKIWPGYSELPAVKKMTFSEHPYNNLRKRFGALLSDQGFDLMNKFLTYFPGRRISAEDGLKHEYFRETPLPIDPSMFPTWPAKSEQQRVKRGTSPRPPEGGLGYSQLGDDDLKETGFHLTTTNQGASAAGPGFSLKF

SEQ ID NO: 16216 - protein, 439 aa, Homo sapiens
MSEDEERENENHLLVVPESRFDRDSGESEEAEEEVGEGTPQSSALTEGDYVPDSPALSPIELKQELPKYLPALQGCRSVEEFQCLNRIEEGTYGVVYRAKDKKTDEIVALKRLKMEKEKEGFPITSLREINTILKAQHPNIVTVREIVVGSNMDKIYIVMNYVEHDLKSLMETMKQPFLPGEVKTLMIQLLRGVKHLHDNWILHRDLKTSNLLLSHAGILKVGDFGLAREYGSPLKAYTPVVVTLWYRAPELLLGAKEYSTAVDMWSVGCIFGELLTQKPLFPGKSEIDQINKVFKDLGTPSEKIWPGYSELPAVKKMTFSEHPYNNLRKRFGALLSDQGFDLMNKFLTYFPGRRISAEDGLKHEYFRETPLPIDPSMFPTWPAKSEQQRVKRGTSPRPPEGGLGYSQLGDDDLKETGFHLTTTNQGASAAGPGFSLKF

SEQ ID NO: 16217 - protein, 621 aa, Homo sapiens
MCSGWSSSVIWRHTQFAVERCGFCGSSGPGAPLEPSTLGSKHLPWEAVSAGFADRNRNMDGAMWLSLCPDNEDLLWRKKHKLLQARGKGDLALQRRADAKLWKNYQLQRLAEELRRGYQEAQHLHVGGLDRLQSARLLGWGGGRARENEPDSQGPIQRRSARPPRAKEKHRAALSEERSCREELGQQHPRHSRPRKTAASPEKPQTTKATGRMNSHLAPPEKRKGRPEPSTKSGGGRCAIHPRRSKGADLERSNPLVAAVGEIGLVEEKEKGTARAGRRQLGKGAVCFVPALTSRSQGQSLEGKLRDLGQLWPADSSCRREAVSPASQCTLREKNKWQKELELAFEELFNINRKLKKHLCLYLALKPRMDQRPGEGHAFSEMQECGAGTPRGKKMADPEMLPAGEPRSPAEEEAQQAASKTDLKTFMGKAQNQKYQGTVKPTFRNGSQTLSPEAGIFINKEDSLLYSTESGQETPKLGTLAEGSLQLHLQDQADRVGSTASRQRQKAEMEQRRQKQLESLEQMEHPDMSLEIHYKAELEKERREQRRARLAHLKSSSTRAQERERGSELSTTSPSGTSLADDDRHSQMIRDQQQQILQQNRLHKQFLEEARKCLREFQNIC

SEQ ID NO: 16218 - protein, 81 aa, Homo sapiens
MEGAGAGSGFRKELVSRLLHLHFKDDKTKVSGDALQLMVELLKVFVVEAAVRGVRQAQAEDALRVDVDQLEKVLPQLLLDF

SEQ ID NO: 16219 - protein, 63 aa, Homo sapiens
MEGAGAGSGFRKELVSRLLHLHFKDDKTKEAAVRGVRQAQAEDALRVDVDQLEKVLPQLLLDF

SEQ ID NO: 16220 - protein, 58 aa, Homo sapiens
MEGAGAGSGFRKELVSRLLHLHFKDDKTKEAAVRGVRQAQAEDALRVDVDQLEKLLDF

SEQ ID NO: 16221 - protein, 895 aa, Homo sapiens
MRMSVGLSLLLPLSGRTFLLLLSVVMAQSHWPSEPSEAVRDWENQLEASMHSVLSDLHEAVPTVVGIPDGTAVVGRSFRVTIPTDLIASSGDIIKVSAAGKEALPSWLHWDSQSHTLEGLPLDTDKGVHYISVSATRLGANGSHIPQTSSVFSIEVYPEDHSELQSVRTASPDPGEVVSSACAADEPVTVLTVILDADLTKMTPKQRIDLLHRMRSFSEVELHNMKLVPVVNNRLFDMSAFMAGPGNAKKVVENGALLSWKLGCSLNQNSVPDIHGVEAPAREGAMSAQLGYPVVGWHIANKKPPLPKRVRRQIHATPTPVTAIGPPTTAIQEPPSRIVPTPTSPAIAPPTETMAPPVRDPVPGKPTVTIRTRGAIIQTPTLGPIQPTRVSEAGTTVPGQIRPTMTIPGYVEPTAVATPPTTTTKKPRVSTPKPATPSTDSTTTTTRRPTKKPRTPRPVPRVTTKVSITRLETASPPTRIRTTTSGVPRGGEPNQRPELKNHIDRVDAWVGTYFEVKIPSDTFYDHEDTTTDKLKLTLKLREQQLVGEKSWVQFNSNSQLMYGLPDSSHVGKHEYFMHATDKGGLSAVDAFEIHVHRRPQGDRAPARFKAKFVGDPALVLNDIHKKIALVKKLAFAFGDRNCSTITLQNITRGSIVVEWTNNTLPLEPCPKEQIAGLSRRIAEDDGKPRPAFSNALEPDFKATSITVTGSGSCRHLQFIPVVPPRRVPSEAPPTEVPDRDPEKSSEDDVYLHTVIPAVVVAAILLIAGIIAMICYRKKRKGKLTLEDQATFIKKGVPIIFADELDDSKPPPSSSMPLILQEEKAPLPPPEYPNQSVPETTPLNQDTMGEYTPLRDEDPNAPPYQPPPPFTAPMEGKGSRPKNMTPYRSPPPYVPP

SEQ ID NO: 16222 - protein, 333 aa, Homo sapiens
MLLLPFQLLAVLFPGGNSEHAFQGPTSFHVIQTSSFTNSTWAQTQGSGWLDDLQIHGWDSDSGTAIFLKPWSKGNFSDKEVAELEEIFRVYIFGFAREVQDFAGDFQMKYPFEIQGIAGCELHSGGAIVSFLRGALGGLDFLSVKNASCVPSPEGGSRAQKFCALIIQYQGIMETVRILLYETCPRYLLGVLNAGKADLQRQVKPEAWLSSGPSPGPGRLQLVCHVSGFYPKPVWVMWMRGEQEQQGTQLGDILPNANWTWYLRATLDVADGEAAGLSCRVKHSSLEGQDIILYWRNPTSIGSIVLAIIVPSLLLLLCLALWYMRRRSYQNIP

SEQ ID NO: 16223 - protein, 278 aa, Homo sapiens
MLLLPFQLLAVLFPGGNSEHAFQGPTSFHVIQTSSFTNSTWAQTQGSGWLDDLQIHGWDSDSGTAIFLKPWSKGNFSDKEVAELEEIFRVYIFGFAREVQDFAGDFQMKYPFEIQGIAGCELHSGGAIVSFLRGALGGLDFLSVKNASCVPSPEGGSRAQKFCALIIQYQGIMETVRILLYETCPRYLLGVLNAGKADLQRQVKPEAWLSSGPSPGPGRLQLVCHVSGFYPKPVWVMWMRGNPTSIGSIVLAIIVPSLLLLLCLALWYMRRRSYQNIP

SEQ ID NO: 16224 - protein, 335 aa, Homo sapiens
MGCLLFLLLWALLQAWGSAEVPQRLFPLRCLQISSFANSSWTRTDGLAWLGELQTHSWSNDSDTVRSLKPWSQGTFSDQQWETLQHIFRVYRSSFTRDVKEFAKMLRLSYPLELQVSAGCEVHPGNASNNFFHVAFQGKDILSFQGTSWEPTQEAPLWVNLAIQVLNQDKWTRETVQWLLNGTCPQFVSGLLESGKSELKKQVKPKAWLSRGPSPGPGRLLLVCHVSGFYPKPVWVKWMRGEQEQQGTQPGDILPNADETWYLRATLDVVAGEAAGLSCRVKHSSLEGQDIVLYWGGSYTSMGLIALAVLACLLFLLIVGFTSRFKRQTSYQGVL

SEQ ID NO: 16225 - protein, 428 aa, Homo sapiens
MARSLCPGAWLRKPYYLQARFSYVRMKYLFFSWLVVFVGSWIIYVQYSTYTELCRGKDCKKIICDKYKTGVIDGPACNSLCVTETLYFGKCLSTKPNNQMYLGIWDNLPGVVKCQMEQALHLDFGTELEPRKEIVLFDKPTRGTTVQKFKEMVYSLFKAKLGDQGNLSELVNLILTVADGDKDGQVSLGEAKSAWALLQLNEFLLMVILQDKEHTPKLMGFCGDLYVMESVEYTSLYGISLPWVIELFIPSGFRRSMDQLFTPSWPRKAKIAIGLLEFVEDVFHGPYGNFLMCDTSAKNLGYNDKYDLKMVDMRKIVPETNLKELIKDRHCESDLDCVYGTDCRTSCDQSTMKCTSEVIQPNLAKACQLLKDYLLRGAPSEIREELEKQLYSCIALKVTANQMEMEHSLILNNLKTLLWKKISYTNDS

SEQ ID NO: 16226 - protein, 162 aa, Homo sapiens
MARSLCPGAWLRKPYYLQARFSYVRMKYLFFSWLVVFVGSWIIYVQYSTYTELCRGKDCKKIICDKYKTGVIDGPACNSLCVTETLYFGKCLSTKPNNQMYLGIWDNLPGVVKCQMEQALHLDFGTELEPRKEIVLFDKPTRGTTVQKFKEMVYSLFKDQHR

SEQ ID NO: 16227 - protein, 464 aa, Homo sapiens
MDYDFKVKLSSERERVEDLFEYEGCKVGRGTYGHVYKAKRKDGKDDKDYALKQIEGTGISMSACREIALLRELKHPNVISLQKVFLSHADRKVWLLFDYAEHDLWHIIKFHRASKANKKPVQLPRGMVKSLLYQILDGIHYLHANWVLHRDLKPANILVMGEGPERGRVKIADMGFARLFNSPLKPLADLDPVVVTFWYRAPELLLGARHYTKAIDIWAIGCIFAELLTSEPIFHCRQEDIKTSNPYHHDQLDRIFNVMGFPADKDWEDIKKMPEHSTLMKDFRRNTYTNCSLIKYMEKHKVKPDSKAFHLLQKLLTMDPIKRITSEQAMQDPYFLEDPLPTSDVFAGCQIPYPKREFLTEEEPDDKGDKKNQQQQQGNNHTNGTGHPGNQDSSHTQGPPLKKVRVVPPTTTSGGLIMTSDYQRSNPHAAYPNPGPSTSQPQSSMGYSATSQQPPQYSHQTHRY

SEQ ID NO: 16228 - protein, 463 aa, Homo sapiens
MDYDFKVKLSSERERVEDLFEYEGCKVGRGTYGHVYKAKRKDGKDDKDYALKQIEGTGISMSACREIALLRELKHPNVISLQKVFLSHADRKVWLLFDYAEHDLWHIIKFHRASKANKKPVQLPRGMVKSLLYQILDGIHYLHANWVLHRDLKPANILVMGEGPERGRVKIADMGFARLFNSPLKPLADLDPVVVTFWYRAPELLLGARHYTKAIDIWAIGCIFAELLTSEPIFHCRQEDIKTSNPYHHDQLDRIFNVMGFPADKDWEDIKKMPEHSTLMKDFRRNTYTNCSLIKYMEKHKVKPDSKAFHLLQKLLTMDPIKRITSEQAMQDPYFLEDPLPTSDVFAGCQIPYPKREFLTEEEPDDKGDKNQQQQQGNNHTNGTGHPGNQDSSHTQGPPLKKVRVVPPTTTSGGLIMTSDYQRSNPHAAYPNPGPSTSQPQSSMGYSATSQQPPQYSHQTHRY

SEQ ID NO: 16229 - protein, 865 aa, Homo sapiens
MAVARVDAALPPGEGSVVNWSGQGLQKLGPNLPCEADIHTLILDKNQIIKLENLEKCKRLIQLSVANNRLVRMMGVAKLTLLRVLNLPHNSIGCVEGLKELVHLEWLNLAGNNLKAMEQINSCTALQHLDLSDNNISQIGDLSKLVSLKTLLLHGNIITSLRMAPAYLPRSLAILSLAENEIRDLNEISFLASLTELEQLSIMNNPCVMATPSIPGFDYRPYIVSWCLNLRVLDGYVISQKESLKAEWLYSQGKGRAYRPGQHIQLVQYLATVCPLTSTLGLQTAEDAKLEKILSKQRFHQRQLMNQSQNEELSPLVPVETRASLIPEHSSPVQDCQISQESEPVIQVNSWVGINSNDDQLFAVKNNFPASVHTTRYSRNDLHLEDIQTDEDKLNCSLLSSESTFMPVASGLSPLSPTVELRLQGINLGLEDDGVADESVKGLESQVLDKEEEQPLWAANENSVQMMRSEINTEVNEKAGLLPCPEPTIISAILKDDNHSLTFFPESTEQKQSDIKKPENTQPENKETISQATSEKLPMILTQRSVALGQDKVALQKLNDAATKLQACWRGFYARNYNPQAKDVRYEIRLRRMQEHIVCLTDEIRRLRKERDEERIKKFVQEEAFRFLWNQVRSLQVWQQTVDQRLSSWHTDVPPISSTLVPSKHPLFTQSQESSCDQNADWFIASDVAPQEKSLPEFPDSGFHSSLTEQVHSLQHSLDFEKSSTEGSESSIMGNSIDTVRYGKESDLGDVSEEHGEWNKESSNNEQDNSLLEQYLTSVQQLEDADERTNFDTETRDSKLHIACFPVQLDTLSDGASVDESHGISPPLQGEISQTQENSKLNAEVQGQQPECDSTFQLLHVGVTV

SEQ ID NO: 16230 - protein, 891 aa, Homo sapiens
MAVARVDAALPPGEGSVVNWSGQGLQKLGPNLPCEADIHTLILDKNQIIKLENLEKCKRLIQLSVANNRLVRMMGVAKLTLLRVLNLPHNSIGCVEGLKELVHLEWLNLAGNNLKAMEQINSCTALQHLDLSDNNISQIGDLSKLVSLKTLLLHGNIITSLRMAPAYLPRSLAILSLAENEIRDLNEISFLASLTELEQLSIMNNPCVMATPSIPGFDYRPYIVSWCLNLRVLDGYVISQKESLKAEWLYSQGKGRAYRPGQHIQLVQYLATVCPLTSTLGLQTAEDAKLEKILSKQRFHQRQLMNQSQNEELSPLVPVETRASLIPEHSSPVQDCQISQESEPVIQVNSWVGINSNDDQLFAVKNNFPASVHTTRYSRNDLHLEDIQTDEDKLNCSLLSSESTFMPVASGLSPLSPTVELRLQGINLGLEDDGVADESVKGLESQVLDKEEEQPLWAANENSVQMMRSEINTEVNEKAGLLPCPEPTIISAILKDDNHSLTFFPESTEQKQSDIKKPENTQPENKETISQATSEKLPMILTQRSVALGQDKVALQKLNDAATKLQACWRGFYARNYNPQAKDVRYEIRLRRMQEHIVCLTDEIRRLRKERDEERIKKFVQEEAFRFLWNQKWGLAILPRPVSNFWAQAVFPPQPPKVRSLQVWQQTVDQRLSSWHTDVPPISSTLVPSKHPLFTQSQESSCDQNADWFIASDVAPQEKSLPEFPDSGFHSSLTEQVHSLQHSLDFEKSSTEGSESSIMGNSIDTVRYGKESDLGDVSEEHGEWNKESSNNEQDNSLLEQYLTSVQQLEDADERTNFDTETRDSKLHIACFPVQLDTLSDGASVDESHGISPPLQGEISQTQENSKLNAEVQGQQPECDSTFQLLHVGVTV

SEQ ID NO: 16231 - protein, 262 aa, Homo sapiens
MAWLEDVDFLEDVPLLEDIPLLEDVPLLEDVPLLEDTSRLEDINLMEDMALLEDVDLLEDTDFLEDLDFSEAMDLREDKDFLEDMDSLEDMALLEDVDLLEDTDFLEDPDFLEAIDLREDKDFLEDMDSLEDLEAIGRCGFSGRHGFFGRRRFSGRPKLSGRLGLLGRRGFSGRLGGYWKTWIFWKTWIFWKTWIFRKTYIGWKTWIFSGRCGLTGRPGFGGRRRFFWKTLTDWKTWISFWKTLIDWKTWISFWKTLIDWKI

SEQ ID NO: 16232 - protein, 529 aa, Homo sapiens
MGSSRAPWMGRVGGHGMMALLLAGLLLPGTLAKSIGTFSDPCKDPTRITSPNDPCLTGKGDSSGFSSYSGSSSSGSSISSARSSGGGSSGSSSGSSIAQGGSAGSFKPGTGYSQVSYSSGSGSSLQGASGSSQLGSSSSHSGNSGSHSGSSSSHSSSSSSFQFSSSSFQVGNGSALPTNDNSYRGILNPSQPGQSSSSSQTSGVSSSGQSVSSNQRPCSSDIPDSPCSGGPIVSHSGPYIPSSHSVSGGQRPVVVVVDQHGSGAPGVVQGPPCSNGGLPGKPCPPITSVDKSYGGYEVVGGSSDSYLVPGMTYSKGKIYPVGYFTKENPVKGSPGVPSFAAGPPISEGKYFSSNPIIPSQSAASSAIAFQPVGTGGVQLCGGGSTGSKGPCSPSSSRVPSSSSISSSSGSPYHPCGSASQSPCSPPGTGSFSSSSSSQSSGKIILQPCGSKSSSSGHPCMSVSSLTLTGGPDGSPHPDPSAGAKPCGSSSAGKIPCRSIRDILAQVKPLGPQLADPEVFLPQGELLDSP

SEQ ID NO: 16233 - protein, 316 aa, Homo sapiens
MSDASLRSTSTMERLVARGTFPVLVRTSACRSLFGPVDHEELSRELQARLAELNAEDQNRWDYDFQQDMPLRGPGRLQWTEVDSDSVPAFYRETVQVGRCRLLLAPRPVAVAVAVSPPLEPAAESLDGLEEAPEQLPSVPVPAPASTPPPVPVLAPAPAPAPAPVAAPVAAPVAVAVLAPAPAPAPAPAPAPAPVAAPAPAPAPAPAPAPAPAPAPDAAPQESAEQGANQGQRGQEPLADQLHSGISGRPAAGTAAASANGAAIKKLSGPLISDFFAKRKRSAPEKSSGDVPAPCPSPSAAPGVGSVEQTPRKRLR

SEQ ID NO: 16234 - protein, 305 aa, Homo sapiens
MERLVARGTFPVLVRTSACRSLFGPVDHEELSRELQARLAELNAEDQNRWDYDFQQDMPLRGPGRLQWTEVDSDSVPAFYRETVQVGRCRLLLAPRPVAVAVAVSPPLEPAAESLDGLEEAPEQLPSVPVPAPASTPPPVPVLAPAPAPAPAPVAAPVAAPVAVAVLAPAPAPAPAPAPAPAPVAAPAPAPAPAPAPAPAPAPAPDAAPQESAEQGANQGQRGQEPLADQLHSGISGRPAAGTAAASANGAAIKKLSGPLISDFFAKRKRSAPEKSSGDVPAPCPSPSAAPGVGSVEQTPRKRLR

SEQ ID NO: 16235 - protein, 102 aa, Homo sapiens
MANTQLDHLHYTTEFTRNDLLIICKKFNLMLMDEDIISLLAIFIKMCLWLWKQFLKRGSKCSETSELLEKVKLQLAFTAYKYVDICFPEQMAYSRYIRWYIH

SEQ ID NO: 16236 - protein, 955 aa, Homo sapiens
MEVGSEEEKWEKLDAEFDHFVVDMKPFVLKLPHRTERQRCALWIRKLCEPSGTGAGIMGRKNRNLYAKLLLHMLKRGALEGPFTHRPEPGTLKILPSYMSIYFDEPNPARAKGSSPEGLPAWVLGELETSEHKLNESWKLSSGEDNTLVQSPTDVYSREQYTGKLRVRSHSLSPTHREDGQNITPKICEVYSKKSPVSLDDSDIEARLNSWNLGIENPRYLRQKPIPVSLMTPKFSLRKSSSFHDDHFLSRIREKELDMKTKMMEAKFHEEKLKLQQKHDADVQKILERKNNEIEELKTLYRSKQHETEETIRKLEKKVQTLIRDCQVIRETKEDQIAELKKICEQSTESLNNDWEKKLHNAVAEMEQEKFDLQKQHTENIQELLEDTNVRLNKMESEYMAQTQSTNHMIKELEARVQQLTGEAENSNLQRQKLIQEKAELERCYQITCSELQEVKARRNTLHKEKDHLVNDYEQNMKLLQTKYDADINLLKQEHALSASKASSMIEELEQNVCQLKQQLQESELQRKQQLRDQENKFQMEKSHLKHIYEKKAHDLQSELDKGKEDTQKKIHKFEEALKEKEEQLTRVTEVQRLQAQQADAALEEFKRQVELNSEKVYAEMKEQMEKVEADLTRSKSLREKQSKEFLWQLEDIRQRYEQQIVELKLEHEQEKTHLLQQHNAEKDSLVRDHEREIENLEKQLRAANMEHENQIQEFKKRDAQVIADMEAQVHKLREELINVNSQRKQQLVELGLLREEEKQRATREHEIVVNKLKAESEKMKIELKKTHAAETEMTLEKANSKLKQIEKEYTQKLAKSSQIIAELQTTISSLKEENSQQQLAAERRLQDVRQKFEDEKKQLIRDNDQAIKVLQDELENRSNQVRCAEKKLQHKELESQEQITYIRQEYETKLKGLMPASLRQELEDTISSLKSQVNFLQKRASILQEELTTYQGRR

SEQ ID NO: 16237 - protein, 211 aa, Homo sapiens
MWASLSLDHPSAKENQALRLIEMREENGNVPKTEQAGSLKPLRDTGKSNLKEKKANSKLKQIEKEYTQKLAKSSQIIAELQTTISSLKEENSQQQLAAERRLQDVRQKFEDEKKQLIRDNDQAIKVLQDELENRSNQVRCAEKKLQHKELESQEQITYIRQEYETKLKGLMPASLRQELEDTISSLKSQVNFLQKRASILQEELTTYQGRR

SEQ ID NO: 16238 - protein, 590 aa, Homo sapiens
MEVIHGRPYCCRELEGADILSNTFYSNELHNPLQTVTRPTASEDRYQELRESLQQCRLPWGAEREYGGIIPISLPEDHRPKYEPPRVMGKGHQHYGFGGETWPRKLPVEQFYYLTQNKKSDVYGNDSLIPKPPNSTVGEICLPYPIEHPYHTHICRGAMFPTFTSPEDLYTGIKARTQQPFPPTVPTKAYDSTVLKTRGNPYRYELIDIPMDSKKKALTWPGQGVYYDFPRGVEKNKPVFYPKPPKTFAPNTSLNSWDPICSAKEANIQRNLERSHWLTSYTHDFTGLGPMDPLELDDYHEKMVAELTRKIGFDPEPQEKFHPVFKPPRPLEGRIARLIQNRRSLEAIVQQRPRSCPDCTPRVLCNFHTFVPSSKEMVALSDNIPAGVTHKNQDIEEKIIEEQSLLSTYELPSCYPTKDLTSIYDIKPFPKITDTKKTEDLYWRQQSLKTQPTPYCKPDHWIHYENLKSPLRDQYNMCPDPVSLSKPSVLQNKQDTEAFTLEHFLSKPEEELFLNMENNEETRPVLGWIPRAGVTKPQTNLLELKNSFSKTGAQKRFHKSILEDHKDLRDNEHSGMKHQFYGHNSYYFYN

SEQ ID NO: 16239 - protein, 325 aa, Homo sapiens
MQGRVAGSCAPLGLLLVCLHLPGLFARSIGVVEEKVSQNLGTNLPQLGQPSSTGPSNSEHPQPALDPRSNDLARVPLKLSVPASDGFPPAGGSAVQRWPPSWGLPAMDSWPPEDPWQMMAAAAEDRLGEALPEELSYLSSAAALAPGSGPLPGESSPDATGLSPKASLLHQDSESRRLPRSNSLGAGGKILSQRPPWSLIHRVLPDHPWGTLNPSVSWGGGGPGTGWGTRPMPHPEGIWGINNQPPGTSWGNINRYPGGSWGNINRYPGGSWGNINRYPGGSWGNIHLYPGINNPFPPGVLRPPGSSWNIPAGFPNPPSPRLQWG

SEQ ID NO: 16240 - protein, 742 aa, Homo sapiens
MDKFWWHAAWGLCLVPLSLAQIDLNITCRFAGVFHVEKNGRYSISRTEAADLCKAFNSTLPTMAQMEKALSIGFETCRYGFIEGHVVIPRIHPNSICAANNTGVYILTSNTSQYDTYCFNASAPPEEDCTSVTDLPNAFDGPITITIVNRDGTRYVQKGEYRTNPEDIYPSNPTDDDVSSGSSSERSSTSGGYIFYTFSTVHPIPDEDSPWITDSTDRIPATTLMSTSATATETATKRQETWDWFSWLFLPSESKNHLHTTTQMAGTSSNTISAGWEPNEENEDERDRHLSFSGSGIDDDEDFISSTISTTPRAFDHTKQNQDWTQWNPSHSNPEVLLQTTTRMTDVDRNGTTAYEGNWNPEAHPPLIHHEHHEEEETPHSTSTIQATPSSTTEETATQKEQWFGNRWHEGYRQTPKEDSHSTTGTAAASAHTSHPMQGRTTPSPEDSSWTDFFNPISHPMGRGHQAGRRMDMDSSHSITLQPTANPNTGLVEDLDRTGPLSMTTQQSNSQSFSTSHEGLEEDKDHPTTSTLTSSNRNDVTGGRRDPNHSEGSTTLLEGYTSHYPHTKESRTFIPVTSAKTGSFGVTAVTVGDSNSNVNRSLSGDQDTFHPSGGSHTTHGSESDGHSHGSQEGGANTTSGPIRTPQIPEWLIILASLLALALILAVCIAVNSRRRCGQKKKLVINSGNGAVEDRKPSGLNGEASKSQEMVHLVNKESSETPDQFMTADETRNLQNVDMKIGV

SEQ ID NO: 16241 - protein, 29 aa, Homo sapiens
MDKFWWHAAWGLCLVPLSLAQIGVGRRKS

SEQ ID NO: 16242 - protein, 711 aa, Homo sapiens
MDKFWWHAAWGLCLVPLSLAQIDLNITCRFAGVFHVEKNGRYSISRTEAADLCKAFNSTLPTMAQMEKALSIGFETCRYGFIEGHVVIPRIHPNSICAANNTGVYILTSNTSQYDTYCFNASAPPEEDCTSVTDLPNAFDGPITITIVNRDGTRYVQKGEYRTNPEDIYPSNPTDDDVSSGSSSERSSTSGALMSTSATATETATKRQETWDWFSWLFLPSESKNHLHTTTQMAGTSSNTISAGWEPNEENEDERDRHLSFSGSGIDDDEDFISSTISTTPRAFDHTKQNQDWTQWNPSHSNPEVLLQTTTRMTDVDRNGTTAYEGNWNPEAHPPLIHHEHHEEEETPHSTSTIQATPSSTTEETATQKEQWFGNRWHEGYRQTPKEDSHSTTGTAAASAHTSHPMQGRTTPSPEDSSWTDFFNPISHPMGRGHQAGRRMDMDSSHSITLQPTANPNTGLVEDLDRTGPLSMTTQQSNSQSFSTSHEGLEEDKDHPTTSTLTSSNRNDVTGGRRDPNHSEGSTTLLEGYTSHYPHTKESRTFIPVTSAKTGSFGVTAVTVGDSNSNVNRSLSGDQDTFHPSGGSHTTHGSESDGHSHGSQEGGANTTSGPIRTPQIPEWLIILASLLALALILAVCIAVNSRRRCGQKKKLVINSGNGAVEDRKPSGLNGEASKSQEMVHLVNKESSETPDQFMTADETRNLQNVDMKIGV

SEQ ID NO: 16243 - protein, 699 aa, Homo sapiens
MDKFWWHAAWGLCLVPLSLAQIDLNITCRFAGVFHVEKNGRYSISRTEAADLCKAFNSTLPTMAQMEKALSIGFETCRYGFIEGHVVIPRIHPNSICAANNTGVYILTSNTSQYDTYCFNASAPPEEDCTSVTDLPNAFDGPITITIVNRDGTRYVQKGEYRTNPEDIYPSNPTDDDVSSGSSSERSSTSGGYIFYTFSTVHPIPDEDSPWITDSTDRIPATSTSSNTISAGWEPNEENEDERDRHLSFSGSGIDDDEDFISSTISTTPRAFDHTKQNQDWTQWNPSHSNPEVLLQTTTRMTDVDRNGTTAYEGNWNPEAHPPLIHHEHHEEEETPHSTSTIQATPSSTTEETATQKEQWFGNRWHEGYRQTPKEDSHSTTGTAAASAHTSHPMQGRTTPSPEDSSWTDFFNPISHPMGRGHQAGRRMDMDSSHSITLQPTANPNTGLVEDLDRTGPLSMTTQQSNSQSFSTSHEGLEEDKDHPTTSTLTSSNRNDVTGGRRDPNHSEGSTTLLEGYTSHYPHTKESRTFIPVTSAKTGSFGVTAVTVGDSNSNVNRSLSGDQDTFHPSGGSHTTHGSESDGHSHGSQEGGANTTSGPIRTPQIPEWLIILASLLALALILAVCIAVNSRRRCGQKKKLVINSGNGAVEDRKPSGLNGEASKSQEMVHLVNKESSETPDQFMTADETRNLQNVDMKIGV

SEQ ID NO: 16244 - protein, 734 aa, Homo sapiens
MDKFWWHAAWGLCLVPLSLAQIDLNITCRFAGVFHVEKNGRYSISRTEAADLCKAFNSTLPTMAQMEKALSIGFETCRYGFIEGHVVIPRIHPNSICAANNTGVYILTSNTSQYDTYCFNASAPPEEDCTSVTDLPNAFDGPITITIVNRDGTRYVQKGEYRTNPEDIYPSNPTDDDVSSGSSSERSSTSGGYIFYTFSTVHPIPDEDSPWITDSTDRIPATTLMSTSATATETATKRQETWDWFSWLFLPSESKNHLHTTTQMAAGWEPNEENEDERDRHLSFSGSGIDDDEDFISSTISTTPRAFDHTKQNQDWTQWNPSHSNPEVLLQTTTRMTDVDRNGTTAYEGNWNPEAHPPLIHHEHHEEEETPHSTSTIQATPSSTTEETATQKEQWFGNRWHEGYRQTPKEDSHSTTGTAAASAHTSHPMQGRTTPSPEDSSWTDFFNPISHPMGRGHQAGRRMDMDSSHSITLQPTANPNTGLVEDLDRTGPLSMTTQQSNSQSFSTSHEGLEEDKDHPTTSTLTSSNRNDVTGGRRDPNHSEGSTTLLEGYTSHYPHTKESRTFIPVTSAKTGSFGVTAVTVGDSNSNVNRSLSGDQDTFHPSGGSHTTHGSESDGHSHGSQEGGANTTSGPIRTPQIPEWLIILASLLALALILAVCIAVNSRRRCGQKKKLVINSGNGAVEDRKPSGLNGEASKSQEMVHLVNKESSETPDQFMTADETRNLQNVDMKIGV

SEQ ID NO: 16245 - protein, 699 aa, Homo sapiens
MDKFWWHAAWGLCLVPLSLAQIDLNITCRFAGVFHVEKNGRYSISRTEAADLCKAFNSTLPTMAQMEKALSIGFETCRYGFIEGHVVIPRIHPNSICAANNTGVYILTSNTSQYDTYCFNASAPPEEDCTSVTDLPNAFDGPITITIVNRDGTRYVQKGEYRTNPEDIYPSNPTDDDVSSGSSSERSSTSGGYIFYTFSTVHPIPDEDSPWITDSTDRIPATTLMSTSATATETATKRQETWDWFSWLFLPSESKNHLHTTTQMAGTSSNTISAGWEPNEENEDERDRHLSFSGSGIDDDEDFISSTISTTPRAFDHTKQNQDWTQWNPSHSNPEVLLQTTTRMTDVDRNGTTAYEGNWNPEAHPPLIHHEHHEEEETPHSTSTTASAHTSHPMQGRTTPSPEDSSWTDFFNPISHPMGRGHQAGRRMDMDSSHSITLQPTANPNTGLVEDLDRTGPLSMTTQQSNSQSFSTSHEGLEEDKDHPTTSTLTSSNRNDVTGGRRDPNHSEGSTTLLEGYTSHYPHTKESRTFIPVTSAKTGSFGVTAVTVGDSNSNVNRSLSGDQDTFHPSGGSHTTHGSESDGHSHGSQEGGANTTSGPIRTPQIPEWLIILASLLALALILAVCIAVNSRRRCGQKKKLVINSGNGAVEDRKPSGLNGEASKSQEMVHLVNKESSETPDQFMTADETRNLQNVDMKIGV

SEQ ID NO: 16246 - protein, 713 aa, Homo sapiens
MDKFWWHAAWGLCLVPLSLAQIDLNITCRFAGVFHVEKNGRYSISRTEAADLCKAFNSTLPTMAQMEKALSIGFETCRYGFIEGHVVIPRIHPNSICAANNTGVYILTSNTSQYDTYCFNASAPPEEDCTSVTDLPNAFDGPITITIVNRDGTRYVQKGEYRTNPEDIYPSNPTDDDVSSGSSSERSSTSGGYIFYTFSTVHPIPDEDSPWITDSTDRIPATTLMSTSATATETATKRQETWDWFSWLFLPSESKNHLHTTTQMAGTSSNTISAGWEPNEENEDERDRHLSFSGSGIDDDEDFISSTISTTPRAFDHTKQNQDWTQWNPSHSNPEVLLQTTTRMTDVDRNGTTAYEGNWNPEAHPPLIHHEHHEEEETPHSTSTIQATPSSTTEETATQKEQWFGNRWHEGYRQTPKEDSHSTTGTAAASAHTSHPMQGRTTPSPEDSSWTDFFNPISHPMGRGHQAGRRMDMDSSHSITLQPTANPNTGLVEDLDRTGPLSMTTRNRNDVTGGRRDPNHSEGSTTLLEGYTSHYPHTKESRTFIPVTSAKTGSFGVTAVTVGDSNSNVNRSLSGDQDTFHPSGGSHTTHGSESDGHSHGSQEGGANTTSGPIRTPQIPEWLIILASLLALALILAVCIAVNSRRRCGQKKKLVINSGNGAVEDRKPSGLNGEASKSQEMVHLVNKESSETPDQFMTADETRNLQNVDMKIGV

SEQ ID NO: 16247 - protein, 674 aa, Homo sapiens
MDKFWWHAAWGLCLVPLSLAQIDLNITCRFAGVFHVEKNGRYSISRTEAADLCKAFNSTLPTMAQMEKALSIGFETCRYGFIEGHVVIPRIHPNSICAANNTGVYILTSNTSQYDTYCFNASAPPEEDCTSVTDLPNAFDGPITITIVNRDGTRYVQKGEYRTNPEDIYPSNPTDDDVSSGSSSERSSTSGGYIFYTFSTVHPIPDEDSPWITDSTDRIPATTLMSTSATATETATKRQETWDWFSWLFLPSESKNHLHTTTQMAGTSSNTISAGWEPNEENEDERDRHLSFSGSGIDDDEDFISSTISTTPRAFDHTKQNQDWTQWNPSHSNPEVLLQTTTRMTDVDRNGTTAYEGNWNPEAHPPLIHHEHHEEEETPHSTSTIQATPSSTTEETATQKEQWFGNRWHEGYRQTPKEDSHSTTGTAAASAHTSHPMQGRTTPSPEDSSWTDFFNPISHPMGRGHQAGRRMDMDSSHSITLQPTANPNTGLVEDLDRTGPLSMTTQQSNSQSFSTSHEGLEEDKDHPTTSTLTSSRDQDTFHPSGGSHTTHGSESDGHSHGSQEGGANTTSGPIRTPQIPEWLIILASLLALALILAVCIAVNSRRRCGQKKKLVINSGNGAVEDRKPSGLNGEASKSQEMVHLVNKESSETPDQFMTADETRNLQNVDMKIGV

SEQ ID NO: 16248 - protein, 675 aa, Homo sapiens
MDKFWWHAAWGLCLVPLSLAQIDLNITCRFAGVFHVEKNGRYSISRTEAADLCKAFNSTLPTMAQMEKALSIGFETCRYGFIEGHVVIPRIHPNSICAANNTGVYILTSNTSQYDTYCFNASAPPEEDCTSVTDLPNAFDGPITITIVNRDGTRYVQKGEYRTNPEDIYPSNPTDDDVSSGSSSERSSTSGGYIFYTFSTVHPIPDEDSPWITDSTDRIPATTLMSTSATATETATKRQETWDWFSWLFLPSESKNHLHTTTQMAGTSSNTISAGWEPNEENEDERDRHLSFSGSGIDDDEDFISSTISTTPRAFDHTKQNQDWTQWNPSHSNPEVLLQTTTRMTDVDRNGTTAYEGNWNPEAHPPLIHHEHHEEEETPHSTSTIQATPSSTTEETATQKEQWFGNRWHEGYRQTPKEDSHSTTGTAAASAHTSHPMQGRTTPSPEDSSWTDFFNPISHPMGRGHQAGRRMDMDSSHSITLQPTANPNTGLVEDLDRTGPLSMTTQQSNSQSFSTSHEGLEEDKDHPTTSTLTSSNRNDVTGGRRDPNHSEGSTTLLEGYTSHYPHTKESRTFIPVTSAKTGSFGVTAVTVGDSNSNVNRSLSGDQDTFHPSGGSHTTHGSESDGHSHGSQEGGANTTSGPIRTPQIPEWLIILASLLALALILAVCIAVNSRRS

SEQ ID NO: 16249 - protein, 493 aa, Homo sapiens
MDKFWWHAAWGLCLVPLSLAQIDLNITCRFAGVFHVEKNGRYSISRTEAADLCKAFNSTLPTMAQMEKALSIGFETCRYGFIEGHVVIPRIHPNSICAANNTGVYILTSNTSQYDTYCFNASAPPEEDCTSVTDLPNAFDGPITITIVNRDGTRYVQKGEYRTNPEDIYPSNPTDDDVSSGSSSERSSTSGGYIFYTFSTVHPIPDEDSPWITDSTDRIPATNMDSSHSITLQPTANPNTGLVEDLDRTGPLSMTTQQSNSQSFSTSHEGLEEDKDHPTTSTLTSSNRNDVTGGRRDPNHSEGSTTLLEGYTSHYPHTKESRTFIPVTSAKTGSFGVTAVTVGDSNSNVNRSLSGDQDTFHPSGGSHTTHGSESDGHSHGSQEGGANTTSGPIRTPQIPEWLIILASLLALALILAVCIAVNSRRRCGQKKKLVINSGNGAVEDRKPSGLNGEASKSQEMVHLVNKESSETPDQFMTADETRNLQNVDMKIGV

SEQ ID NO: 16250 - protein, 429 aa, Homo sapiens
MDKFWWHAAWGLCLVPLSLAQIDLNITCRFAGVFHVEKNGRYSISRTEAADLCKAFNSTLPTMAQMEKALSIGFETCRYGFIEGHVVIPRIHPNSICAANNTGVYILTSNTSQYDTYCFNASAPPEEDCTSVTDLPNAFDGPITITIVNRDGTRYVQKGEYRTNPEDIYPSNPTDDDVSSGSSSERSSTSGGYIFYTFSTVHPIPDEDSPWITDSTDRIPATNRNDVTGGRRDPNHSEGSTTLLEGYTSHYPHTKESRTFIPVTSAKTGSFGVTAVTVGDSNSNVNRSLSGDQDTFHPSGGSHTTHGSESDGHSHGSQEGGANTTSGPIRTPQIPEWLIILASLLALALILAVCIAVNSRRRCGQKKKLVINSGNGAVEDRKPSGLNGEASKSQEMVHLVNKESSETPDQFMTADETRNLQNVDMKIGV

SEQ ID NO: 16251 - protein, 361 aa, Homo sapiens
MDKFWWHAAWGLCLVPLSLAQIDLNITCRFAGVFHVEKNGRYSISRTEAADLCKAFNSTLPTMAQMEKALSIGFETCRYGFIEGHVVIPRIHPNSICAANNTGVYILTSNTSQYDTYCFNASAPPEEDCTSVTDLPNAFDGPITITIVNRDGTRYVQKGEYRTNPEDIYPSNPTDDDVSSGSSSERSSTSGGYIFYTFSTVHPIPDEDSPWITDSTDRIPATRDQDTFHPSGGSHTTHGSESDGHSHGSQEGGANTTSGPIRTPQIPEWLIILASLLALALILAVCIAVNSRRRCGQKKKLVINSGNGAVEDRKPSGLNGEASKSQEMVHLVNKESSETPDQFMTADETRNLQNVDMKIGV

SEQ ID NO: 16252 - protein, 425 aa, Homo sapiens
MDKFWWHAAWGLCLVPLSLAQIDLNITCRFAGVFHVEKNGRYSISRTEAADLCKAFNSTLPTMAQMEKALSIGFETCRYGFIEGHVVIPRIHPNSICAANNTGVYILTSNTSQYDTYCFNASAPPEEDCTSVTDLPNAFDGPITITIVNRDGTRYVQKGEYRTNPEDIYPSNPTDDDVSSGSSSERSSTSGGYIFYTFSTVHPIPDEDSPWITDSTDRIPATNMDSSHSITLQPTANPNTGLVEDLDRTGPLSMTTQQSNSQSFSTSHEGLEEDKDHPTTSTLTSSRDQDTFHPSGGSHTTHGSESDGHSHGSQEGGANTTSGPIRTPQIPEWLIILASLLALALILAVCIAVNSRRRCGQKKKLVINSGNGAVEDRKPSGLNGEASKSQEMVHLVNKESSETPDQFMTADETRNLQNVDMKIGV

SEQ ID NO: 16253 - protein, 396 aa, Homo sapiens
MDKFWWHAAWGLCLVPLSLAQIDLNITCRFAGVFHVEKNGRYSISRTEAADLCKAFNSTLPTMAQMEKALSIGFETCRYGFIEGHVVIPRIHPNSICAANNTGVYILTSNTSQYDTYCFNASAPPEEDCTSVTDLPNAFDGPITITIVNRDGTRYVQKGEYRTNPEDIYPSNPTDDDVSSGSSSERSSTSGGYIFYTFSTVHPIPDEDSPWITDSTDRIPATNMDSSHSITLQPTANPNTGLVEDLDRTGPLSMTTRRDQDTFHPSGGSHTTHGSESDGHSHGSQEGGANTTSGPIRTPQIPEWLIILASLLALALILAVCIAVNSRRRCGQKKKLVINSGNGAVEDRKPSGLNGEASKSQEMVHLVNKESSETPDQFMTADETRNLQNVDMKIGV

SEQ ID NO: 16254 - protein, 294 aa, Homo sapiens
MDKFWWHAAWGLCLVPLSLAQIDLNITCRFAGVFHVEKNGRYSISRTEAADLCKAFNSTLPTMAQMEKALSIGFETCRYGFIEGHVVIPRIHPNSICAANNTGVYILTSNTSQYDTYCFNASAPPEEDCTSVTDLPNAFDGPITITIVNRDGTRYVQKGEYRTNPEDIYPSNPTDDDVSSGSSSERSSTSGGYIFYTFSTVHPIPDEDSPWITDSTDRIPATRDQDTFHPSGGSHTTHGSESDGHSHGSQEGGANTTSGPIRTPQIPEWLIILASLLALALILAVCIAVNSRRS

SEQ ID NO: 16255 - protein, 668 aa, Homo sapiens
MDKFWWHAAWGLCLVPLSLAQIDLNITCRFAGVFHVEKNGRYSISRTEAADLCKAFNSTLPTMAQMEKALSIGFETCRYGFIEGHVVIPRIHPNSICAANNTGVYILTSNTSQYDTYCFNASAPPEEDCTSVTDLPNAFDGPITITIVNRDGTRYVQKGEYRTNPEDIYPSNPTDDDVSSGSSSERSSTSGALMSTSATATETATKRQETWDWFSWLFLPSESKNHLHTTTQMAGTSSNTISAGWEPNEENEDERDRHLSFSGSGIDDDEDFISSTISTTPRAFDHTKQNQDWTQWNPSHSNPEVLLQTTTRMTDVDRNGTTAYEGNWNPEAHPPLIHHEHHEEEETPHSTSTTASAHTSHPMQGRTTPSPEDSSWTDFFNPISHPMGRGHQAGRRMDMDSSHSITLQPTANPNTGLVEDLDRTGPLSMTTQQSNSQSFSTSHEGLEEDKDHPTTSTLTSSNRNDVTGGRRDPNHSEGSTTLLEGYTSHYPHTKESRTFIPVTSAKTGSFGVTAVTVGDSNSNVNRSLSGDQDTFHPSGGSHTTHGSESDGHSHGSQEGGANTTSGPIRTPQIPEWLIILASLLALALILAVCIAVNSRRRCGQKKKLVINSGNGAVEDRKPSGLNGEASKSQEMVHLVNKESSETPDQFMTADETRNLQNVDMKIGV

SEQ ID NO: 16256 - protein, 691 aa, Homo sapiens
MDKFWWHAAWGLCLVPLSLAQIDLNITCRFAGVFHVEKNGRYSISRTEAADLCKAFNSTLPTMAQMEKALSIGFETCRYGFIEGHVVIPRIHPNSICAANNTGVYILTSNTSQYDTYCFNASAPPEEDCTSVTDLPNAFDGPITITIVNRDGTRYVQKGEYRTNPEDIYPSNPTDDDVSSGSSSERSSTSGGYIFYTFSTVHPIPDEDSPWITDSTDRIPATTLMSTSATATETATKRQETWDWFSWLFLPSESKNHLHTTTQMAAGWEPNEENEDERDRHLSFSGSGIDDDEDFISSTISTTPRAFDHTKQNQDWTQWNPSHSNPEVLLQTTTRMTDVDRNGTTAYEGNWNPEAHPPLIHHEHHEEEETPHSTSTTASAHTSHPMQGRTTPSPEDSSWTDFFNPISHPMGRGHQAGRRMDMDSSHSITLQPTANPNTGLVEDLDRTGPLSMTTQQSNSQSFSTSHEGLEEDKDHPTTSTLTSSNRNDVTGGRRDPNHSEGSTTLLEGYTSHYPHTKESRTFIPVTSAKTGSFGVTAVTVGDSNSNVNRSLSGDQDTFHPSGGSHTTHGSESDGHSHGSQEGGANTTSGPIRTPQIPEWLIILASLLALALILAVCIAVNSRRRCGQKKKLVINSGNGAVEDRKPSGLNGEASKSQEMVHLVNKESSETPDQFMTADETRNLQNVDMKIGV

SEQ ID NO: 16257 - protein, 340 aa, Homo sapiens
MDKFWWHAAWGLCLVPLSLAQIDLNITCRFAGVFHVEKNGRYSISRTEAADLCKAFNSTLPTMAQMEKALSIGFETCRYGFIEGHVVIPRIHPNSICAANNTGVYILTSNTSQYDTYCFNASAPPEEDCTSVTDLPNAFDGPITITIVNRDGTRYVQKGEYRTNPEDIYPSNPTDDDVSSGSSSERSSTSGGYIFYTFSTVHPIPDEDSPWITDSTDRIPATRHSHGSQEGGANTTSGPIRTPQIPEWLIILASLLALALILAVCIAVNSRRRCGQKKKLVINSGNGAVEDRKPSGLNGEASKSQEMVHLVNKESSETPDQFMTADETRNLQNVDMKIGV

SEQ ID NO: 16258 - protein, 139 aa, Homo sapiens
MDKFWWHAAWGLCLVPLSLAQIDLNITCRFAGVFHVEKNGRYSISRTEAADLCKAFNSTLPTMAQMEKALSIGFETCSLHCSQQSKKVWAEEKASDQQWQWSCGGQKAKWTQRRGQQVSGNGAFGEQGVVRNSRPVYDS

SEQ ID NO: 16259 - protein, 1584 aa, Homo sapiens
MSLTSWFLVSSGGTRHRLPREMIFVGRDDCELMLQSRSVDKQHAVINYDASTDEHLVKDLGSLNGTFVNDVRIPEQTYITLKLEDKLRFGYDTNLFTVVQGEMRVPEEALKHEKFTIQLQLSQKSSESELSKSASAKSIDSKVADAATEVQHKTTEALKSEEKAMDISAMPRGTPLYGQPSWWGDDEVDEKRAFKTNGKPEEKNHEAGTSGCGIDAKQVEEQSAAANEEVLFPFCREPSYFEIPTKEFQQPSQITESTIHEIPTKDTPSSHITGAGHASFTIEFDDSTPGKVTIRDHVTKFTSDQRHKSKKSSPGTQDLLGIQTGMMAPENKVADWLAQNNPPQMLWERTEEDSKSIKSDVPVYLKRLKGNKHDDGTQSDSENAGAHRRCSKRATLEEHLRRHHSEHKKLQKVQATEKHQDQAVTSSAHHRGGHGVPHGKLLKQKSEEPSVSIPFLQTALLRSSGSLGHRPSQEMDKMLKNQATSATSEKDNDDDQSDKGTYTIELENPNSEEVEARKMIDKVFGVDDNQDYNRPVINEKHKDLIKDWALSSAAAVMEERKPLTTSGFHHSEEGTSSSGSKRWVSQWASLAANHTRHDQEERIMEFSAPLPLENETEISESGMTVRSTGSATSLASQGERRRRTLPQLPNEEKSLESHRAKVVTQRSEIGEKQDTELQEKETPTQVYQKDKQDADRPLSKMNRAVNGETLKTGGDNKTLLHLGSSAPGKEKSETDKETSLVKQTLAKLQQQEQREEAQWTPTKLSSKNVSGQTDKCREETFKQESQPPEKNSGHSTSKGDRVAQSESKRRKAEEILKSQTPKGGDKKESSKSLVRQGSFTIEKPSPNIPIELIPHINKQTSSTPSSLALTSASRIRERSESLDPDSSMDTTLILKDTEAVMAFLEAKLREDNKTDEGPDTPSYNRDNSISPESDVDTASTISLVTGETERKSTQKRKSFTSLYKDRCSTGSPSKDVTKSSSSGAREKMEKKTKSRSTDVGSRADGRKFVQSSGRIRQPSVDLTDDDQTSSVPHSAISDIMSSDQETYSCKPHGRTPLTSADEHVHSKLEGSKVTKSKTSPVVSGSSSKSTTLPRPRPTRTSLLRRARLGEASDSELADADKASVASEVSTTSSTSKPPTGRRNISRIDLLAQPRRTRLGSLSARSDSEATISRSSASSRTAEAIIRSGARLVPSDKFSPRIRANSISRLSDSKVKSMTSAHGSASVNSRWRRFPTDYASTSEDEFGSNRNSPKHTRLRTSPALKTTRLQSAGSAMPTSSSFKHRIKEQEDYIRDWTAHREEIARISQDLALIAREINDVAGEIDSVTSSGTAPSTTVSTAATTPGSAIDTREELVDRVFDESLNFRKIPPLVHSKTPEGNNGRSGDPRPQAAEPPDHLTITRRRTWSRDEVMGDNLLLSSVFQFSKKIRQSIDKTAGKIRILFKDKDRNWDDIESKLRAESEVPIVKTSSMEISSILQELKRVEKQLQAINAMIDPDGTLEALNNMGFPSAMLPSPPKQKSSPVNNHHSPGQTPTLGQPEARALHPAAVSAAAEFENAESEADFSIHFNRFNPDGEEEDVTVQE

SEQ ID NO: 16260 - protein, 1460 aa, Homo sapiens
MSLTSWFLVSSGGTRHRLPREMIFVGRDDCELMLQSRSVDKQHAVINYDASTDEHLVKDLGSLNGTFVNDVRIPEQTYITLKLEDKLRFGYDTNLFTVVQGEMRVPEEALKHEKFTIQLQLSQKSSESELSKSASAKSIDSKVADAATEVQHKTTEALKSEEKAMDISAMPRGTPLYGQPSWWGDDEVDEKRAFKTNGKPEEKNHEAGTSGCGIDAKQVEEQSAAANEEVLFPFCREPSYFEIPTKEFQQPSQITESTIHEIPTKDTPSSHITGAGHASFTIEFDDSTPGKVTIRDHVTKFTSDQRHKSKKSSPGTQDLLGIQTGMMAPENKVADWLAQNNPPQMLWERTEEDSKSIKSDVPVYLKRLKGNKHDDGTQSDSENAGAHRRCSKRATLEEHLRRHHSEHKKLQKVQATEKHQDQAVVFGVDDNQDYNRPVINEKHKDLIKDWALSSAAAVMEERKPLTTSGFHHSEEGTSSSGSKRWVSQWASLAANHTRHDQEERIMEFSAPLPLENETEISESGMTVRSTGSATSLASQGERRRRTLPQLPNEEKSLESHRAKVVTQRSEIGEKQDTELQEKETPTQVYQKDKQDADRPLSKMNRAVNGETLKTGGDNKTLLHLGSSAPGKEKSETDKETSLVKQTLAKLQQQEQREEAQWTPTKLSSKNVSGQTDKCREETFKQESQPPEKNSGHSTSKGDRVAQSESKRRKAEEILKSQTPKGGDKKESSKSLVRQGSFTIEKPSPNIPIELIPHINKQTSSTPSSLALTSASRIRERSESLDPDSSMDTTLILKDTEAVMAFLEAKLREDNKTDEGPDTPSYNRDNSISPESDVDTASTISLVTGETERKSTQKRKSFTSLYKDRCSTGSPSKDVTKSSSSGAREKMEKKTKSRSTDVGSRADGRKFVQSSGRIRQPSVDLTDDDQTSSVPHSAISDIMSSDQETYSCKPHGRTPLTSADEHVHSKLEGSKVTKSKTSPVVSGSSSKSTTLPRPRPTRTSLLRRARLGEASDSELADADKASVASEVSTTSSTSKPPTGRRNISRIDLLAQPRRTRLGSLSARSDSEATISRSSASSRTAEAIIRSGARLVPSDKFSPRIRANSISRLSDSKVKSMTSAHGSASALKTTRLQSAGSAMPTSSSFKHRIKEQEDYIRDWTAHREEIARISQDLALIAREINDVAGEIDSVTSSGTAPSTTVSTAATTPGSAIDTREEVGDLHGEMHKLVDRVFDESLNFRKIPPLVHSKTPEGNNGRSGDPRPQAAEPPDHLTITRRRTWSRDEVMGDNLLLSSVFQFSKKIRQSIDKTAGKIRILFKDKDRNWDDIESKLRAESEVPIVKTSSMEISSILQELKRVEKQLQAINAMIDPDGTLEALNNMGFPSAMLPSPPKQKSSPVNNHHSPGQTPTLGQPEARALHPAAVSAAAEFENAESEADFSIHFNRFNPDGEEEDVTVQE

SEQ ID NO: 16261 - protein, 1486 aa, Homo sapiens
MSLTSWFLVSSGGTRHRLPREMIFVGRDDCELMLQSRSVDKQHAVINYDASTDEHLVKDLGSLNGTFVNDVRIPEQTYITLKLEDKLRFGYDTNLFTVVQGEMRVPEEALKHEKFTIQLQLSQKSSESELSKSASAKSIDSKVADAATEVQHKTTEALKSEEKAMDISAMPRGTPLYGQPSWWGDDEVDEKRAFKTNGKPEEKNHEAGTSGCGIDAKQVEEQSAAANEEVLFPFCREPSYFEIPTKEFQQPSQITESTIHEIPTKDTPSSHITGAGHASFTIEFDDSTPGKVTIRDHVTKFTSDQRHKSKKSSPGTQDLLGIQTGMMAPENKVADWLAQNNPPQMLWERTEEDSKSIKSDVPVYLKRLKGNKHDDGTQSDSENAGAHRRCSKRATLEEHLRRHHSEHKKLQKVQATEKHQDQAVVFGVDDNQDYNRPVINEKHKDLIKDWALSSAAAVMEERKPLTTSGFHHSEEGTSSSGSKRWVSQWASLAANHTRHDQEERIMEFSAPLPLENETEISESGMTVRSTGSATSLASQGERRRRTLPQLPNEEKSLESHRAKVVTQRSEIGEKQDTELQEKETPTQVYQKDKQDADRPLSKMNRAVNGETLKTGGDNKTLLHLGSSAPGKEKSETDKETSLVKQTLAKLQQQEQREEAQWTPTKLSSKNVSGQTDKCREETFKQESQPPEKNSGHSTSKGDRVAQSESKRRKAEEILKSQTPKGGDKKESSKSLVRQGSFTIEKPSPNIPIELIPHINKQTSSTPSSLALTSASRIRERSESLDPDSSMDTTLILKDTEAVMAFLEAKLREDNKTDEGPDTPSYNRDNSISPESDVDTASTISLVTGETERKSTQKRKSFTSLYKDRCSTGSPSKDVTKSSSSGAREKMEKKTKSRSTDVGSRADGRKFVQSSGRIRQPSVDLTDDDQTSSVPHSAISDIMSSDQETYSCKPHGRTPLTSADEHVHSKLEGSKVTKSKTSPVVSGSSSKSTTLPRPRPTRTSLLRRARLGEASDSELADADKASVASEVSTTSSTSKPPTGRRNISRIDLLAQPRRTRLGSLSARSDSEATISRSSASSRTAEAIIRSGARLVPSDKFSPRIRANSISRLSDSKVKSMTSAHGSASVNSRWRRFPTDYASTSEDEFGSNRNSPKHTRLRTSPALKTTRLQSAGSAMPTSSSFKHRIKEQEDYIRDWTAHREEIARISQDLALIAREINDVAGEIDSVTSSGTAPSTTVSTAATTPGSAIDTREELVDRVFDESLNFRKIPPLVHSKTPEGNNGRSGDPRPQAAEPPDHLTITRRRTWSRDEVMGDNLLLSSVFQFSKKIRQSIDKTAGKIRILFKDKDRNWDDIESKLRAESEVPIVKTSSMEISSILQELKRVEKQLQAINAMIDPDGTLEALNNMGFPSAMLPSPPKQKSSPVNNHHSPGQTPTLGQPEARALHPAAVSAAAEFENAESEADFSIHFNRFNPDGEEEDVTVQE

SEQ ID NO: 16262 - protein, 62 aa, Homo sapiens
MLQVVQEGNPAPFIINTVKRGRRDRERQRTPWAPHPLGFQGRRYIYESPNHRGKDSSFLAQK

SEQ ID NO: 16263 - protein, 805 aa, Homo sapiens
MWGRFLAPEASGRDSPGGARSFPAGPDYSSAWLPANESLWQATTVPSNHRNNHIRRHSIASDSGDTGIGTSCSDSVEDHSTSSGTLSFKPSQSLITLPTAHVMPSNSSASISKLRESLTPDGSKWSTSLMQTLGNHSRGEQDSSLDMKDFRPLRKWSSLSKLTAPDNCGQGGTVCREESRNGLEKIGKAKALTSQLRTIGPSCLHDSMEMLRLEDKEINKKRSSTLDCKYKFESCSKEDFRASSSTLRRQPVDMTYSALPESKPIMTSSEAFEPPKYLMLGQQAVGGVPIQPSVRTQMWLTEQLRTNPLEGRNTEDSYSLAPWQQQQIEDFRQGSETPMQVLTGSSRQSYSPGYQDFSKWESMLKIKEGLLRQKEIVIDRQKQQITHLHERIRDNELRAQHAMLGHYVNCEDSYVASLQPQYENTSLQTPFSEESVSHSQQGEFEQKLASTEKEVLQLNEFLKQRLSLFSEEKKKLEEKLKTRDRYISSLKKKCQKESEQNKEKQRRIETLEKYLADLPTLDDVQSQSLQLQILEEKNKNLQEALIDTEKKLEEIKKQCQDKETQLICQKKKEKELVTTVQSLQQKVERCLEDGIRLPMLDAKQLQNENDNLRQQNETASKIIDSQQDEIDRMILEIQSMQGKLSKEKLTTQKMMEELEKKERNVQRLTKALLENQRQTDETCSLLDQGQEPDQSRQQTVLSKRPLFDLTVIDQLFKEMSCCLFDLKALCSILNQRAQGKEPNLSLLLGIRSMNCSAEETENDHSTETLTKKLSDVCQLRRDIDELRTTISDRYAQDMGDNCITQ

SEQ ID NO: 16264 - protein, 499 aa, Homo sapiens
MIWRNNWKSTTGRLNVKLQSDKLQHGCGPDYSSAWLPANESLWQATTVPSNHRNNHIRRHSIASDSGDTGIGTSCSDSVEDHSTSSGTLSFKPSQSLITLPTAHVMPSNSSASISKLRESLTPDGSKWSTSLMQTLGNHSRGEQDSSLDMKDFRPLRKWSSLSKLTAPDNCGQGGTVCREESRNGLEKIGKAKALTSQLRTIGPSCLHDSMEMLRLEDKEINKKRSSTLDCKYKFESCSKEDFRASSSTLRRQPVDMTYSALPESKPIMTSSEAFEPPKYLMLGQQAVGGVPIQPSVRTQMWLTEQLRTNPLEGRNTEDSYSLAPWQQQQIEDFRQGSETPMQVLTGSSRQSYSPGYQDFSKWESMLKIKEGLLRQKEIVIDRQKQQITHLHERIRDNELRAQHAMLGHYVNCEDSYVASLQPQYENTSLQTPFSEESVSHSQQGEFEQKLASTEKEVLQLNEFLKQRLSLFSEEKKKLEEKVGFSNKVELGQQHFLSI

SEQ ID NO: 16265 - protein, 394 aa, Homo sapiens
MPSNSSASISKLRESLTPDGSKWSTSLMQTLGNHSRGEQDSSLDMKDFRPLRKWSSLSKLTAPDNCGQGGTVCREESRNGLEKIGKAKALTSQLRTIGPSCLHDSMEMLRLEDKEINKKRSSTLDCKYKFESCSKEDFRASSSTLRRQPVDMTYSALPESKPIMTSSEAFEPPKYLMLGQQAVGGVPIQPSVRTQMWLTEQLRTNPLEGRNTEDSYSLAPWQQQQIEDFRQGSETPMQVLTGSSRQSYSPGYQDFSKWESMLKIKEGLLRQKEIVIDRQKQQITHLHERIRDNELRAQHAMLGHYVNCEDSYVASLQPQYENTSLQTPFSEESVSHSQQGEFEQKLASTEKEVLQLNEFLKQRLSLFSEEKKKLEEKVGFSNKVELGQQHFLSI

SEQ ID NO: 16266 - protein, 808 aa, Homo sapiens
MIWRNNWKSTTGRLNVKLQSDKLQHGCGPDYSSAWLPANESLWQATTVPSNHRNNHIRRHSIASDSGDTGIGTSCSDSVEDHSTSSGTLSFKPSQSLITLPTAHVMPSNSSASISKLRESLTPDGSKWSTSLMQTLGNHSRGEQDSSLDMKDFRPLRKWSSLSKLTAPDNCGQGGTVCREESRNGLEKIGKAKALTSQLRTIGPSCLHDSMEMLRLEDKEINKKRSSTLDCKYKFESCSKEDFRASSSTLRRQPVDMTYSALPESKPIMTSSEAFEPPKYLMLGQQAVGGVPIQPSVRTQMWLTEQLRTNPLEGRNTEDSYSLAPWQQQQIEDFRQGSETPMQVLTGSSRQSYSPGYQDFSKWESMLKIKEGLLRQKEIVIDRQKQQITHLHERIRDNELRAQHAMLGHYVNCEDSYVASLQPQYENTSLQTPFSEESVSHSQQGEFEQKLASTEKEVLQLNEFLKQRLSLFSEEKKKLEEKLKTRDRYISSLKKKCQKESEQNKEKQRRIETLEKYLADLPTLDDVQSQSLQLQILEEKNKNLQEALIDTEKKLEEIKKQCQDKETQLICQKKKEKELVTTVQSLQQKVERCLEDGIRLPMLDAKQLQNENDNLRQQNETASKIIDSQQDEIDRMILEIQSMQGKLSKEKLTTQKMMEELEKKERNVQRLTKALLENQRQTDETCSLLDQGQEPDQSRQQTVLSKRPLFDLTVIDQLFKEMSCCLFDLKALCSILNQRAQGKEPNLSLLLGIRSMNCSAEETENDHSTETLTKKLSDVCQLRRDIDELRTTISDRYAQDMGDNCITQ

SEQ ID NO: 16267 - protein, 496 aa, Homo sapiens
MWGRFLAPEASGRDSPGGARSFPAGPDYSSAWLPANESLWQATTVPSNHRNNHIRRHSIASDSGDTGIGTSCSDSVEDHSTSSGTLSFKPSQSLITLPTAHVMPSNSSASISKLRESLTPDGSKWSTSLMQTLGNHSRGEQDSSLDMKDFRPLRKWSSLSKLTAPDNCGQGGTVCREESRNGLEKIGKAKALTSQLRTIGPSCLHDSMEMLRLEDKEINKKRSSTLDCKYKFESCSKEDFRASSSTLRRQPVDMTYSALPESKPIMTSSEAFEPPKYLMLGQQAVGGVPIQPSVRTQMWLTEQLRTNPLEGRNTEDSYSLAPWQQQQIEDFRQGSETPMQVLTGSSRQSYSPGYQDFSKWESMLKIKEGLLRQKEIVIDRQKQQITHLHERIRDNELRAQHAMLGHYVNCEDSYVASLQPQYENTSLQTPFSEESVSHSQQGEFEQKLASTEKEVLQLNEFLKQRLSLFSEEKKKLEEKVGFSNKVELGQQHFLSI

SEQ ID NO: 16268 - protein, 290 aa, Homo sapiens
MVLLHVKRGDESQFLLQAPGSTELEELTVQVARVYNGRLKVQRLCSEMEELAEHGIFLPPNMQGLTDDQIEELKLKDEWGEKCVPSGGAVFKKDDIGRRNGQAPNEKMKQVLKKTIEEAKAIISKKQVEAGVCVTMEMVKDALDQLRGAVMIVYPMGLPPYDPIRMEFENKEDLSGTQAGLNVIKEAEAQLWWAAKELRRTKKLSDYVGKNEKTKIIAKIQQRGQGAPAREPIISSEEQKQLMLYYHRRQEELKRLEENDDDAYLNSPWADNTALKRHFHGVKDIKWRPR

SEQ ID NO: 16269 - protein, 195 aa, Homo sapiens
MGSRASTLLRDEELEEIKKETGFSHSQITRLYSRFTSLDKGENGTLSREDFQRIPELAINPLGDRIINAFFPEGEDQVNFRGFMRTLAHFRPIEDNEKSKDVNGPEPLNSRSNKLHFAFRLYDLDKDEKISRDELLQVLRMMVGVNISDEQLGSIADRTIQEADQDGDSAISFTEFVKVLEKVDVEQKMSIRFLH

SEQ ID NO: 16270 - protein, 859 aa, Homo sapiens
MRRCRWAALALGLLRLCLAQANFAPHFFDNGVGSTNGNMALFSLPEDTPVGSHVYTLNGTDPEGDPISYHISFDPSTRSVFSVDPTFGNITLVEELDREREDEIEAIISISDGLNLVAEKVVILVTDANDEAPRFIQEPYVALVPEDIPAGSIIFKVHAVDRDTGSGGSVTYFLQNLHSPFAVDRHSGVLRLQAGATLDYERSRTHYITVVAKDGGGRLHGADVVFSATTTVTVNVEDVQDMAPVFVGTPYYGYVYEDTLPGSEVLKVVAMDGDRGKPNRILYSLVNGNDGAFEINETSGAISITQSPAQLQREVYELHVQVTEMSPAGSPAAQATVPVTIRIVDLNNHPPTFYGESGPQNRFELSMNEHPPQGEILRGLKITVNDSDQGANAKFNLQLVGPRGIFRVVPQTVLNEAQVTIIVENSAAIDFEKSKVLTFKLLAVEVNTPEKFSSTADVVIQLLDTNDNVPKFDSLYYVARIPENAPGGSSVVAVTAVDPDTGPWGEVKYSTYGTGADLFLIHPSTGLIYTQPWASLDAEATARYNFYVKAEDMEGKYSVAEVFITLLDVNDHPPQFGKSVQKKTMVLGTPVKIEAIDEDAEEPNNLVDYSITHAEPANVFDINSHTGEIWLKNSIRSLDALHNITPGRDCLWSLEVQAKDRGSPSFSTTALLKIDITDAETLSRSPMAAFLIQTKDNPMKAVGVLAGTMATVVAITVLISTATFWRNKKSNKVLPMRRVLRKRPSPAPRTIRIEWLKSKSTKAATKFMLKEKPPNENCNNNSPESSLLPRAPALPPPPSVAPSTGAAQWTVPTVSGSLTPQPTQPPPKPKTMGSPVQSTLISELKQKFEKKSVHNKAYF

SEQ ID NO: 16271 - protein, 745 aa, Homo sapiens
MRRCRWAALALGLLRLCLAQANFAPHFFDNGVGSTNGNMALFSLPEDTPVGSHVYTLNGTDPEGDPISYHISFDPSTRSVFSVDPTFGNITLVEELDREREDEIEAIISISDGLNLVAEKVVILVTDANDEAPRFIQEPYVALVPEDIPAGSIIFKVHAVDRDTGSGGSVTYFLQNLHSPFAVDRHSGVLRLQAGATLDYERSRTHYITVVAKDGGGRLHGADVVFSATTTVTVNVEDVQDMAPVFVGTPYYGYVYEDTLPGSEVLKVVAMDGDRGKPNRILYSLVNGNDGAFEINETSGAISITQSPAQLQREVYELHVQVTEMSPAGSPAAQATVPVTIRIVDLNNHPPTFYGESGPQNRFELSMNEHPPQGEILRGLKITVNDSDQGANAKFNLQLVGPRGIFRVVPQTVLNEAQVTIIVENSAAIDFEKSKVLTFKLLAVEVNTPEKFSSTADVVIQLLDTNDNVPKFDSLYYVARIPENAPGGSSVVAVTAVDPDTGPWGEVKYSTYGTGADLFLIHPSTGLIYTQPWASLDAEATARYNFYVKAEDMEGKYSVAEVFITLLDVNDHPPQFGKSVQKKTMVLGTPVKIEAIDEDAEEPNNLVDYSITHAEPANVFDINSHTGEIWLKNSIRSLDALHNITPGRDCLWSLEVQAKDRGSPSFSTTALLKIDITDAEVRRLRYMKNSNFPGTTKSVRKPKFKPKKPHSSQGLFLHPHCEIALFNLSNVNLYSRVFQGAAQAS

SEQ ID NO: 16272 - protein, 468 aa, Homo sapiens
MAASSNSSLSGSSVSSDAEEYQPPIWKSYLYQLQQEAPRPKRIICPREVENRPKYYGREFHGIISREQADELLGGVEGAYILRESQRQPGCYTLALRFGNQTLNYRLFHDGKHFVGEKRFESIHDLVTDGLITLYIETKAAEYISKMTTNPIYEHIGYATLLREKVSRRLSRSKNEPRKTNVTHEEHTAVEKISSLVRRAALTHNDNHFNYEKTHNFKVHTFRGPHWCEYCANFMWGLIAQGVRCSDCGLNVHKQCSKHVPNDCQPDLKRIKKVYCCDLTTLVKAHNTQRPMVVDICIREIEARGLKSEGLYRVSGFTEHIEDVKMAFDRDGEKADISANVYPDINIITGALKLYFRDLPIPVITYDTYSKFIDAAKISNADERLEAVHEVLMLLPPAHYETLRYLMIHLKKVTMNEKDNFMNAENLGIVFGPTLMRPPEDSTLTTLHDMRYQKLIVQILIENEDVLF

SEQ ID NO: 16273 - protein, 332 aa, Homo sapiens
MFSEELWLENEKKCAVVRKSKQGRKRQELLAVAFGVKVGVKGGFLWPPLKLFACSQISSLVRRAALTHNDNHFNYEKTHNFKVHTFRGPHWCEYCANFMWGLIAQGVRCSDCGLNVHKQCSKHVPNDCQPDLKRIKKVYCCDLTTLVKAHNTQRPMVVDICIREIEARGLKSEGLYRVSGFTEHIEDVKMAFDRDGEKADISANVYPDINIITGALKLYFRDLPIPVITYDTYSKFIDAAKISNADERLEAVHEVLMLLPPAHYETLRYLMIHLKKVTMNEKDNFMNAENLGIVFGPTLMRPPEDSTLTTLHDMRYQKLIVQILIENEDVLF

SEQ ID NO: 16274 - protein, 287 aa, Homo sapiens
MFSEELWLENEKKCAVVRKSKQGRKRQELLAVAFGVKVHTFRGPHWCEYCANFMWGLIAQGVRCSDCGLNVHKQCSKHVPNDCQPDLKRIKKVYCCDLTTLVKAHNTQRPMVVDICIREIEARGLKSEGLYRVSGFTEHIEDVKMAFDRDGEKADISANVYPDINIITGALKLYFRDLPIPVITYDTYSKFIDAAKISNADERLEAVHEVLMLLPPAHYETLRYLMIHLKKVTMNEKDNFMNAENLGIVFGPTLMRPPEDSTLTTLHDMRYQKLIVQILIENEDVLF

SEQ ID NO: 16275 - protein, 274 aa, Homo sapiens
MFSEELWLENEKKCAVVRKSKQGRKRQELLAVAFGVKVGVKGGFLWPPLKLFACSQISSLVRRAALTHNDNHFNYEKTHNFKVHTFRGPHWCEYCANFMWGLIAQGVRCSGLKSEGLYRVSGFTEHIEDVKMAFDRDGEKADISANVYPDINIITGALKLYFRDLPIPVITYDTYSKFIDAAKISNADERLEAVHEVLMLLPPAHYETLRYLMIHLKKVTMNEKDNFMNAENLGIVFGPTLMRPPEDSTLTTLHDMRYQKLIVQILIENEDVLF

SEQ ID NO: 16276 - protein, 241 aa, Homo sapiens
MFSEELWLENEKKCAVVRKSKQGRKRQELLAVAFGVKVHTFRGPHWCEYCANFMWGLIAQGVRCSDCGLNVHKQCSKHVPNDCQPDLKRIKKVYCCDLTTLVKAHNTQRPMVVDICIREIEARGLKSEGLYRVSGFTEHIEDVKMAFDREISNADERLEAVHEVLMLLPPAHYETLRYLMIHLKKVTMNEKDNFMNAENLGIVFGPTLMRPPEDSTLTTLHDMRYQKLIVQILIENEDVLF

SEQ ID NO: 16277 - protein, 286 aa, Homo sapiens
MFSEELWLENEKKCAVVRKSKQGRKRQELLAVAFGVKVGVKGGFLWPPLKLFACSQISSLVRRAALTHNDNHFNYEKTHNFKVHTFRGPHWCEYCANFMWGLIAQGVRCSDCGLNVHKQCSKHVPNDCQPDLKRIKKVYCCDLTTLVKAHNTQRPMVVDICIREIEARGLKSEGLYRVSGFTEHIEDVKMAFDREISNADERLEAVHEVLMLLPPAHYETLRYLMIHLKKVTMNEKDNFMNAENLGIVFGPTLMRPPEDSTLTTLHDMRYQKLIVQILIENEDVLF

SEQ ID NO: 16278 - protein, 324 aa, Homo sapiens
MAASSNSSLSGSSVSSDAEEYQPPIWKSYLYQLQQEAPRPKRIICPREISSLVRRAALTHNDNHFNYEKTHNFKVHTFRGPHWCEYCANFMWGLIAQGVRCSDCGLNVHKQCSKHVPNDCQPDLKRIKKVYCCDLTTLVKAHNTQRPMVVDICIREIEARGLKSEGLYRVSGFTEHIEDVKMAFDRDGEKADISANVYPDINIITGALKLYFRDLPIPVITYDTYSKFIDAAKISNADERLEAVHEVLMLLPPAHYETLRYLMIHLKKVTMNEKDNFMNAENLGIVFGPTLMRPPEDSTLTTLHDMRYQKLIVQILIENEDVLF

SEQ ID NO: 16279 - protein, 543 aa, Homo sapiens
MTQTHRAKSASSCPNLLVPETWPHQVSASHAGRSKQPQGGILKINEEHRRGAIQDLLASPGFTFGKRVVFDSHCLKRQHTFADGLHSSCTSDAEEYQPPIWKSYLYQLQQEAPRPKRIICPREVENRPKYYGREFHGIISREQADELLGGVEGAYILRESQRQPGCYTLALRFGNQTLNYRLFHDGKHFVGEKRFESIHDLVTDGLITLYIETKAAEYISKMTTNPIYEHIGYATLLREKVSRRLSRSKNEPRKTNVTHEEHTAVEKISSLVRRAALTHNDNHFNYEKTHNFKVHTFRGPHWCEYCANFMWGLIAQGVRCSDCGLNVHKQCSKHVPNDCQPDLKRIKKVYCCDLTTLVKAHNTQRPMVVDICIREIEARGLKSEGLYRVSGFTEHIEDVKMAFDRDGEKADISANVYPDINIITGALKLYFRDLPIPVITYDTYSKFIDAAKISNADERLEAVHEVLMLLPPAHYETLRYLMIHLKKVTMNEKDNFMNAENLGIVFGPTLMRPPEDSTLTTLHDMRYQKLIVQILIENEDVLF

SEQ ID NO: 16280 - protein, 1310 aa, Homo sapiens
MAQLWLSCFLLPALVVSVAANVAPKFLANMTSVILPEDLPVGAQAFWLVAEDQDNDPLTYGMSGPNAYFFAVTPKTGEVKLASALDYETLYTFKVTISVSDPYIQVQREMLVIVEDRNDNAPVFQNTAFSTSINETLPVGSVVFSVLAVDKDMGSAGMVVYSIEKVIPSTGDSEHLFRILANGSIVLNGSLSYNNKSAFYQLELKACDLGGMYHNTFTIQCSLPVFLSISVVDQPDLDPQFVREFYSASVAEDAAKGTSVLTVEAVDGDKGINDPVIYSISYSTRPGWFDIGADGVIRVNGSLDREQLLEADEEVQLQVTATETHLNIYGQEAKVSIWVTVRVMDVNDHKPEFYNCSLPACTFTPEEAQVNFTGYVDEHASPRIPIDDLTMVVYDPDKGSNGTFLLSLGGPDAEAFSVSPERAVGSASVQVLVRVSALVDYERQTAMAVQVVATDSVSQNFSVAMVTIHLRDINDHRPTFPQSLYVLTVPEHSATGSVVTDSIHATDPDTGAWGQITYSLLPGNGADLFQVDPVSGTVTVRNGELLDRESQAVYYLTLQATDGGNLSSSTTLQIHLLDINDNAPVVSGSYNIFVQEEEGNVSVTIQAHDNDEPGTNNSRLLFNLLPGPYSHNFSLDPDTGLLRNLGPLDREAIDPALEGRIVLTVLVSDCGEPVLGTKVNVTITVEDINDNLPIFNQSSYNFTVKEEDPGVLVGVVKAWDADQTEANNRISFSLSGSGANYFMIRGLVLGAGWAEGYLRLPPDVSLDYETQPVFNLTVSAENPDPQGGETIVDVCVNVKDVNDNPPTLDVASLRGIRVAENGSQHGQVAVVVASDVDTSAQLEIQLVNILCTKAGVDVGSLCWGWFSVAANGSVYINQSKAIDYEACDLVTLVVRACDLATDPGFQAYSNNGSLLITIEDVNDNAPYFLPENKTFVIIPELVLPNREVASVRARDDDSGNNGVILFSILRVDFISKDGATIPFQGVFSIFTSSEADVFAGSIQPVTSLDSTLQGTYQVTVQARDRPSLGPFLEATTTLNLFTVDQSYRSRLQFSTPKEEVGANRQAINAALTQATRTTVYIVDIQDIDSAARARPHSYLDAYFVFPNGSALTLDELSVMIRNDQDSLTQLLQLGLVVLGSQESQESDLSKQLISVIIGLGVALLLVLVIMTMAFVCVRKSYNRKLQAMKAAKEARKTAAGVMPSAPAIPGTNMYNTERANPMLNLPNKDLGLEYLSPSNDLDSVSVNSLDDNSVDVDKNSQEIKEHRPPHTPPEPDPEPLSVVLLGRQAGASGQLEGPSYTNAGLDTTDL

SEQ ID NO: 16281 - protein, 359 aa, Homo sapiens
MVRPMLLLSLGLLAGLLPALAACPQNCHCHSDLQHVICDKVGLQKIPKVSEKTKLLNLQRNNFPVLAANSFRAMPNLVSLHLQHCQIREVAAGAFRGLKQLIYLYLSHNDIRVLRAGAFDDLTELTYLYLDHNKVTELPRGLLSPLVNLFILQLNNNKIRELRAGAFQGAKDLRWLYLSENALSSLQPGALDDVENLAKFHVDRNQLSSYPSAALSKLRVVEELKLSHNPLKSIPDNAFQSFGRYLETLWLDNTNLEKFSDGAFLGVTTLKHVHLENNRLNQLPSNFPFDSLETLALTNNPWKCTCQLRGLRRWLEAKASRPDATCASPAKFKGQHIRDTDAFRSCKFPTKRSKKAGRH

SEQ ID NO: 16282 - protein, 425 aa, Homo sapiens
MALTGYSWLLLSATFLNVGAEISITLEPAQPSEGDNVTLVVHGLSGELLAYSWYAGPTLSVSYLVASYIVSTGDETPGPAHTGREAVRPDGSLDIQGILPRHSGTYILQTFNRQLQTEVGYGHVQVHEILAQPTVLANSTALVERRDTLRLMCSSPSPTAEVRWFFNGGALPVALRLGLSPDGRVLARHGIRREEAGAYQCEVWNPVSVSRSEPINLTVYFGPERVAILQDSTTRTGCTIKVDFNTSLTLWCVSRSCPEPEYVWTFNGQALKNGQDHLNISSMTAAQEGTYTCIAKNTKTLLSGSASVVVKLSAAAVATMIVPVPTKPTEGQDVTLTVQGYPKDLLVYAWYRGPASEPNRLLSQLPSGTWIAGPAHTGREVGFPNCSLLVQKLNLTDTGRYTLKTVTVQGKTETLEVELQVAPLG

SEQ ID NO: 16283 - protein, 223 aa, Homo sapiens
MRPLGKGLLPAEELIRSNLGVGRSLRDCLSQSGKLAEELGSKRLKPAKFGTEGKERVEQRTERQRTGSSKEPRMQIICRRRWREPPPRLLWGCLMPRAQPLLHVTAYENTGHWERLASVVSSKTQQPTVISHSSISITFSHYPPATLDSFLVLEPIKLFPVSSLRSPLCLNCGSCRESIRISGELIGNAHSPAPPRTPELETLGWDKQAVLSGAQVILVCAEV

SEQ ID NO: 16284 - protein, 140 aa, Homo sapiens
MRPLGKGLLPAEELIRSNLGVGRSLRDCLSQSGKLAEELGSKRLKPAKFGTEGKERVEQRTERQRTGSSKEPRMQIICRRRWREPPPRLLWGCLMPRAQPLLHVTPPQSSLLELWLLQRKHQNLRGTDWKCTFSSPAQNS

SEQ ID NO: 16285 - protein, 406 aa, Homo sapiens
MAAGAGAGSAPRWLRALSEPLSAAQLRRLEEHRYSAAGVSLLEPPLQLYWTWLLQWIPLWMAPNSITLLGLAVNVVTTLVLISYCPTATEEAPYWTYLLCALGLFIYQSLDAIDGKQARRTNSCSPLGELFDHGCDSLSTVFMAVGASIAARLGTYPDWFFFCSFIGMFVFYCAHWQTYVSGMLRFGKVDVTEIQIALVIVFVLSAFGGATMWDYTIPILEIKLKILPVLGFLGGVIFSCSNYFHVILHGGVGKNGSTIAGTSVLSPGLHIGLIIILAIMIYKKSATDVFEKHPCLYILMFGCVFAKVSQKLVVAHMTKSELYLQDTVFLGPGLLFLDQYFNNFIDEYVVLWMAMVISSFDMVIYFSALCLQISRHLHLNIFKTACHQAPEQVQVLSSKSHQNNMD

SEQ ID NO: 16286 - protein, 218 aa, Homo sapiens
MAAGAGAGSAPRWLRALSEPLSAAQLRRLEEHRYSAAGVSLLEPPLQLYWTWLLQWIPLWMAPNSITLLGLAVNVVTTLVLISYCPTATEEAPYWTYLLCALGLFIYQSLDAIDGKQARRTNSCSPLGELFDHGCDSLSTVFMAVGASIAARLGTYPDWFFFCSFIGMFVFYCAHWQTYVSGMLRFGKVDVTEIQIALVIVFVLSAFGGATMWDYTFS

SEQ ID NO: 16287 - protein, 199 aa, Homo sapiens
MDFKIEHTWDGFPVKHEPVFIRLNPGDRGVMMDISAPFFRDPPAPLGEPGKPFNELWDYEVVEAFFLNDITEQYLEVELCPHGQHLVLLLSGRRNVWKQELPLSFRMSRGETKWEGKAYLPWSYFPPNVTKFNSFAIHGSKDKRSYEALYPVPQHELQQGQKPDFHCLEYFKSFNFNTLLGEEWKQPESDLWLIEKCDI

SEQ ID NO: 16288 - protein, 171 aa, Homo sapiens
MLSKKQEFLEKKIEQRHGTKNKPAALQALKRKKRYEKQLAQIDGTLSTIEFQQQALENANTNTEVLKNMGSAAKAKKAAHDNMDIDKVDELMQDIADQQELGEEISTAISKPVGFGEKSDEDELMAELEELEQEEPDKNLLEVSGPETVPLPNVPSIALPSKPAKKRKTTT

SEQ ID NO: 16289 - protein, 287 aa, Homo sapiens
MGVAGWARAPEAAGAMGRVRNRATAQRRRRKRPGDPPAACAAIAVMGASRAQCPRVQVGVGSHAAAKRWLGKLRRKRRWRRAREAGSRDPLPSAPLPDPPAPAESPKELDLGAQRERWETFRKLWGLSCEGAAKVLLDTFEYPGLVHHTGGCHCGAVRFAVWAPADLRVVDCSCRLCRKKQHRHFLVPASRFTLLQGAESIVTYRSNTHPALHSFCSRCGVQSFHAAVSDPRVYGVAPHCLDEGTVRSVVIEEVGGGDPGEEAAEEHKAIHKTSSQSAPACPREQEQ

SEQ ID NO: 16290 - protein, 216 aa, Homo sapiens
MQSHLAPLACAAAAGRAGGSCQAAQPEDRRVLRYPGTAVMVTCPNRPLVPRPLLTPGGSRASLALCAFVAVPQRIPQPLLPAYILLMLPSLVVDMALPSSRLLRSIKPIQPASQVVRKERNPNPNCPQSDPLMKASSTSFLSHTYLINKTRSTTRKVEEHSWFTCTGAKYFAIPLAERNTKRLTKRSTHAQLLRGKQDGSEWVVPRSSASSNVLYH

SEQ ID NO: 16291 - protein, 480 aa, Homo sapiens
MSAEVIHQVEEALDTDEKEMLLFLCRDVAIDVVPPNVRDLLDILRERGKLSVGDLAELLYRVRRFDLLKRILKMDRKAVETHLLRNPHLVSDYRVLMAEIGEDLDKSDVSSLIFLMKDYMGRGKISKEKSFLDLVVELEKLNLVAPDQLDLLEKCLKNIHRIDLKTKIQKYKQSVQGAGTSYRNVLQAAIQKSLKDPSNNFRLHNGRSKEQRLKEQLGAQQEPVKKSIQESEAFLPQSIPEERYKMKSKPLGICLIIDCIGNETELLRDTFTSLGYEVQKFLHLSMHGISQILGQFACMPEHRDYDSFVCVLVSRGGSQSVYGVDQTHSGLPLHHIRRMFMGDSCPYLAGKPKMFFIQNYVVSEGQLEDSSLLEVDGPAMKNVEFKAQKRGLCTVHREADFFWSLCTADMSLLEQSHSSPSLYLQCLSQKLRQERKRPLLDLHIELNGYMYDWNSRVSAKEKYYVWLQHTLRKKLILSYT

SEQ ID NO: 16292 - protein, 221 aa, Homo sapiens
MSAEVIHQVEEALDTDEKEMLLFLCRDVAIDVVPPNVRDLLDILRERGKLSVGDLAELLYRVRRFDLLKRILKMDRKAVETHLLRNPHLVSDYRVLMAEIGEDLDKSDVSSLIFLMKDYMGRGKISKEKSFLDLVVELEKLNLVAPDQLDLLEKCLKNIHRIDLKTKIQKYKQSVQGAGTSYRNVLQAAIQKSLKDPSNNFRMITPYAHCPDLKILGNCSM

SEQ ID NO: 16293 - protein, 366 aa, Homo sapiens
MAEIGEDLDKSDVSSLIFLMKDYMGRGKISKEKSFLDLVVELEKLNLVAPDQLDLLEKCLKNIHRIDLKTKIQKYKQSVQGAGTSYRNVLQAAIQKSLKDPSNNFRLHNGRSKEQRLKEQLGAQQEPVKKSIQESEAFLPQSIPEERYKMKSKPLGICLIIDCIGNETELLRDTFTSLGYEVQKFLHLSMHGISQILGQFACMPEHRDYDSFVCVLVSRGGSQSVYGVDQTHSGLPLHHIRRMFMGDSCPYLAGKPKMFFIQNYVVSEGQLEDSSLLEVDGPAMKNVEFKAQKRGLCTVHREADFFWSLCTADMSLLEQSHSSPSLYLQCLSQKLRQERGTIPGSGITESKDMHFSSLGCILLDVL

SEQ ID NO: 16294 - protein, 235 aa, Homo sapiens
MKSKPLGICLIIDCIGNETELLRDTFTSLGYEVQKFLHLSMHGISQILGQFACMPEHRDYDSFVCVLVSRGGSQSVYGVDQTHSGLPLHHIRRMFMGDSCPYLAGKPKMFFIQNYVVSEGQLEDSSLLEVDGPAMKNVEFKAQKRGLCTVHREADFFWSLCTADMSLLEQSHSSPSLYLQCLSQKLRQERKRPLLDLHIELNGYMYDWNSRVSAKEKYYVWLQHTLRKKLILSYT

SEQ ID NO: 16295 - protein, 449 aa, Homo sapiens
MSAEVIHQVEEALDTDEKEMLLFLCRDVAIDVVPPNVRDLLDILRERGKLSVGDLAELLYRVRRFDLLKRILKMDRKAVETHLLRNPHLVSDYRVLMAEIGEDLDKSDVSSLIFLMKDYMGRGKISKEKSFLDLVVELEKLNLVAPDQLDLLEKCLKNIHRIDLKTKIQKYKQSVQGAGTSYRNVLQAAIQKSLKDPSNNFRLHNGRSKEQRLKEQLGAQQEPVKKSIQESEAFLPQSIPEERYKMKSKPLGICLIIDCIGNETELLRDTFTSLGYEVQKFLHLSMHGISQILGQFACMPEHRDYDSFVCVLVSRGGSQSVYGVDQTHSGLPLHHIRRMFMGDSCPYLAGKPKMFFIQNYVVSEGQLEDSSLLEVDGPAMKNVEFKAQKRGLCTVHREADFFWSLCTADMSLLEQSHSSPSLYLQCLSQKLRQERKRPLLDLHIELNGL

SEQ ID NO: 16296 - protein, 442 aa, Homo sapiens
MLERPPVCSKVDVVPPNVRDLLDILRERGKLSVGDLAELLYRVRRFDLLKRILKMDRKAVETHLLRNPHLVSDYRVLMAEIGEDLDKSDVSSLIFLMKDYMGRGKISKEKSFLDLVVELEKLNLVAPDQLDLLEKCLKNIHRIDLKTKIQKYKQSVQGAGTSYRNVLQAAIQKSLKDPSNNFRLHNGRSKEQRLKEQLGAQQEPVKKSIQESEAFLPQSIPEERYKMKSKPLGICLIIDCIGNETELLRDTFTSLGYEVQKFLHLSMHGISQILGQFACMPEHRDYDSFVCVLVSRGGSQSVYGVDQTHSGLPLHHIRRMFMGDSCPYLAGKPKMFFIQNYVVSEGQLEDSSLLEVDGPAMKNVEFKAQKRGLCTVHREADFFWSLCTADMSLLEQSHSSPSLYLQCLSQKLRQERKRPLLDLHIELNGYMYDSLEHTGGRY

SEQ ID NO: 16297 - protein, 348 aa, Homo sapiens
MAEIGEDLDKSDVSSLIFLMKDYMGRGKISKEKSFLDLVVELEKLNLVAPDQLDLLEKCLKNIHRIDLKTKIQKYKQSVQGAGTSYRNVLQAAIQKSLKDPSNNFREEPVKKSIQESEAFLPQSIPEERYKMKSKPLGICLIIDCIGNETELLRDTFTSLGYEVQKFLHLSMHGISQILGQFACMPEHRDYDSFVCVLVSRGGSQSVYGVDQTHSGLPLHHIRRMFMGDSCPYLAGKPKMFFIQNYVVSEGQLEDSSLLEVDGPAMKNVEFKAQKRGLCTVHREADFFWSLCTADMSLLEQSHSSPSLYLQCLSQKLRQERGTIPGSGITESKDMHFSSLGCILLDVL

SEQ ID NO: 16298 - protein, 445 aa, Homo sapiens
MSAEVIHQVEEALDTDEKEMLLFLCRDVAIDVVPPNVRDLLDILRERGKLSVGDLAELLYRVRRFDLLKRILKMDRKAVETHLLRNPHLVSDYRVLMAEIGEDLDKSDVSSLIFLMKDYMGRGKISKEKSFLDLVVELEKLNLVAPDQLDLLEKCLKNIHRIDLKTKIQKYKQSVQGAGTSYRNVLQAAIQKSLKDPSNNFRSIPEERYKMKSKPLGICLIIDCIGNETELLRDTFTSLGYEVQKFLHLSMHGISQILGQFACMPEHRDYDSFVCVLVSRGGSQSVYGVDQTHSGLPLHHIRRMFMGDSCPYLAGKPKMFFIQNYVVSEGQLEDSSLLEVDGPAMKNVEFKAQKRGLCTVHREADFFWSLCTADMSLLEQSHSSPSLYLQCLSQKLRQERKRPLLDLHIELNGYMYDWNSRVSAKEKYYVWLQHTLRKKLILSYT

SEQ ID NO: 16299 - protein, 270 aa, Homo sapiens
MSAEVIHQVEEALDTDEKEMLLFLCRDVAIDVVPPNVRDLLDILRERGKLSVGDLAELLYRVRRFDLLKRILKMDRKAVETHLLRNPHLVSDYRVLMAEIGEDLDKSDVSSLIFLMKDYMGRGKISKEKSFLDLVVELEKLNLVAPDQLDLLEKCLKNIHRIDLKTKIQKYKQSVQGAGTSYRNVLQAAIQKSLKDPSNNFRSIPEERYKMKSKPLGICLIIDCIGNETELCGVRGPAGGQQPLGGGWASDEECGIQGSEARAVHSSPRS

SEQ ID NO: 16300 - protein, 300 aa, Homo sapiens
MSAEVIHQVEEALDTDEKEMLLFLCRDVAIDVVPPNVRDLLDILRERGKLSVGDLAELLYRVRRFDLLKRILKMDRKAVETHLLRNPHLVSDYRVLMAEIGEDLDKSDVSSLIFLMKDYMGRGKISKEKSFLDLVVELEKLNLVAPDQLDLLEKCLKNIHRIDLKTKIQKYKQSVQGAGTSYRNVLQAAIQKSLKDPSNNFRLHNGRSKEQRLKEQLGAQQEPVKKSIQESEAFLPQSIPEERYKMKSKPLGICLIIDCIGNETENAHSWIFTLNSMATCMIGTAEFLPRRNIMFGCSTL

SEQ ID NO: 16301 - protein, 462 aa, Homo sapiens
MSAEVIHQVEEALDTDEKEMLLFLCRDVAIDVVPPNVRDLLDILRERGKLSVGDLAELLYRVRRFDLLKRILKMDRKAVETHLLRNPHLVSDYRVLMAEIGEDLDKSDVSSLIFLMKDYMGRGKISKEKSFLDLVVELEKLNLVAPDQLDLLEKCLKNIHRIDLKTKIQKYKQSVQGAGTSYRNVLQAAIQKSLKDPSNNFRLHNGRSKEQRLKEQLGAQQEPVKKSIQESEAFLPQSIPEERYKMKSKPLGICLIIDCIGNETELLRDTFTSLGYEVQKFLHLSMHGISQILGQFACMPEHRDYDSFVCVLVSRGGSQSVYGVDQTHSGLPLHHIRRMFMGDSCPYLAGKPKMFFIQNYVVSEGQLEDSSLLEVDGPAMKNVEFKAQKRGLCTVHREADFFWSLCTADMSLLEQSHSSPSLYLQCLSQKLRQERGTIPGSGITESKDMHFSSLGCILLDVL

SEQ ID NO: 16302 - protein, 292 aa, Homo sapiens
MSAEVIHQVEEALDTDEKEMLLFLCRDVAIDVVPPNVRDLLDILRERGKLSVGDLAELLYRVRRFDLLKRILKMDRKAVETHLLRNPHLVSDYRVLMAEIGEDLDKSDVSSLIFLMKDYMGRGKISKEKSFLDLVVELEKLNLVAPDQLDLLEKCLKNIHRIDLKTKIQKYKQSVQGAGTSYRNVLQAAIQKSLKDPSNNFRLHNGRSKEQRLKEQLGAQQEPVKKSIQESEAFLPQSIPEERYKMKSKPLGICLIIDCIGNETGWSAMAQSQLTAISTSQVQAILLPQPPE

SEQ ID NO: 16303 - protein, 202 aa, Homo sapiens
MSAEVIHQVEEALDTDEKEMLLFLCRDVAIDVVPPNVRDLLDILRERGKLSVGDLAELLYRVRRFDLLKRILKMDRKAVETHLLRNPHLVSDYRVLMAEIGEDLDKSDVSSLIFLMKDYMGRGKISKEKSFLDLVVELEKLNLVAPDQLDLLEKCLKNIHRIDLKTKIQKYKQSVQGAGTSYRNVLQAAIQKSLKDPSNNFR

SEQ ID NO: 16304 - protein, 435 aa, Homo sapiens
MSAEVIHQVEEALDTDEKEMLLFLCRDVAIDVVPPNVRDLLDILRERGKLSVGDLAELLYRVRRFDLLKRILKMDRKAVETHLLRNPHLVSDYRVLMAEIGEDLDKSDVSSLIFLMKDYMGRGKISKEKSFLDLVVELEKLNLVAPDQLDLLEKCLKNIHRIDLKTKIQKYKQSVQGAGTSYRNVLQAAIQKSLKDPSNNFRLHNGRSKEQRLKEQLGAQQEPVKKSIQESEAFLPQSIPEERYKMKSKPLGICLIIDCIGNETELLRDTFTSLGYEVQKFLHLSMHGISQILGQFACMPEHRDYDSFVCVLVSRGGSQSVYGVDQTHSGLPLHHIRRMFMGDSCPYLAGKPKMFFIQNYVVSEGQLEDSSLLEVDGPAMKNVEFKAQKRGLCTVHREADFFWSLCTADMSLLEQSHSSPSLYLQCLSQKLRQER

SEQ ID NO: 16305 - protein, 384 aa, Homo sapiens
MAEIGEDLDKSDVSSLIFLMKDYMGRGKISKEKSFLDLVVELEKLNLVAPDQLDLLEKCLKNIHRIDLKTKIQKYKQSVQGAGTSYRNVLQAAIQKSLKDPSNNFRLHNGRSKEQRLKEQLGAQQEPVKKSIQESEAFLPQSIPEERYKMKSKPLGICLIIDCIGNETELLRDTFTSLGYEVQKFLHLSMHGISQILGQFACMPEHRDYDSFVCVLVSRGGSQSVYGVDQTHSGLPLHHIRRMFMGDSCPYLAGKPKMFFIQNYVVSEGQLEDSSLLEVDGPAMKNVEFKAQKRGLCTVHREADFFWSLCTADMSLLEQSHSSPSLYLQCLSQKLRQERKRPLLDLHIELNGYMYDWNSRVSAKEKYYVWLQHTLRKKLILSYT

SEQ ID NO: 16306 - protein, 252 aa, Homo sapiens
MSGRRTRSGGAAQRSGPRAPSPTKPLRRSQRKSGSELPSILPEIWPKTPSAAAVRKPIVLKRIVAHAVEVPAVQSPRRSPRISFFLEKENEPPGRELTKEDLFKTHSVPATPTSTPVPNPEAESSSKEGELDARDLEMSKKVRRSYSRLETLGSASTSTPGRRSCFGFEGLLGAEDLSGVSPVVCSKLTEVPRVCAKPWAPDMTLPGISPPPEKQKRKKKKMPEILKTELDEWAAAMNAEFEAAEQFDLLVE

SEQ ID NO: 16307 - protein, 367 aa, Homo sapiens
MGTVLSLSPASSAKGRRPGGLPEEKKKAPPAGDEALGGYGAPPVGKGGKGESRLKRPSVLISALTWKRLVAASAKKKKGSKKVTPKPASTGPDPLVQQRNRENLLRKGRDPPDGGGTAKPLAVPVPTVPAAAATCEPPSGGSAAAQPPGSGGGKPPPPPPPAPQVAPPVPGGSPRRVIVQASTGELLRCLGDFVCRRCYRLKELSPGELVGWFRGVDRSLLLQGWQDQAFITPANLVFVYLLCRESLRGDELASAAELQAAFLTCLYLAYSYMGNEISYPLKPFLVEPDKERFWQRCLRLIQRLSPQMLRLNADPHFFTQVFQDLKNEGEAAASGGGPPSGGAPAASSAARDSCAAGTKHWTMNLDR

SEQ ID NO: 16308 - protein, 61 aa, Homo sapiens
MKRFLFLLLTISLLVMVQIQTGLSGQNDTSQTSSPSASSNISGGIFLFFVANAIIHLFCFS

SEQ ID NO: 16309 - protein, 485 aa, Homo sapiens
MARLTESEARRQQQQLLQPRPSPVGSSGPEPPGGQPDGMKDLDAIKLFVGQIPRHLDEKDLKPLFEQFGRIYELTVLKDPYTGMHKGCAFLTYCARDSAIKAQTALHEQKTLPGMARPIQVKPADSESRGGRDRKLFVGMLNKQQSEEDVLRLFQPFGVIDECTVLRGPDGSSKGCAFVKFSSHTEAQAAIHALHGSQTMPGASSSLVVKFADTDKERTLRRMQQMVGQLGILTPSLTLPFSPYSAYAQALMQQQTTVLSTSGSYLSPGVAFSPCHIQQIGAVSLNGLPATPIAPASGLHSPPLLGTTAVPGLVAPITNGFAGVVPFPGGHPALETVYANGLVPYPAQSPTVAETLHPAFSGVQQYTAMYPTAAITPIAHSVPQPPPLLQQQQREGPEGCNLFIYHLPQEFGDTELTQMFLPFGNIISSKVFMDRATNQSKCFGFVSFDNPASAQAAIQAMNGFQIGMKRLKVQLKRPKDPGHPY

SEQ ID NO: 16310 - protein, 409 aa, Homo sapiens
MARLTESEARRQQQQLLQPRPSPVGSSGPEPPGGQPDGMKDLDAIKLFVGQIPRHLDEKDLKPLFEQFGRIYELTVLKDPYTGMHKGCAFLTYCARDSAIKAQTALHEQKTLPGMARPIQVKPADSESRGGRDRKLFVGMLNKQQSEEDVLRLFQPFGVIDECTVLRGPDGSSKGCAFVKFSSHTEAQAAIHALHGSQTMPGASSSLVVKFADTDKERTLRRMQQMVGQLGILTPSLTLPFSPYSAYAQALMQQQTTVLSTSGSYLSPGVAFSPCHIQQIGAVSLNGLPATPIAPASGVVPFPGGHPALETVYANGLVPYPAQSPTVAETLHPAFSGVQQYTAMYPTAAITPIAHSVPQPPPLLQQQQREGVWRHGADADVPTLRQYHFLQGVYGSSYQPEQVFRLREL

SEQ ID NO: 16311 - protein, 128 aa, Homo sapiens
MKHKYNTLSWYKKERSTQLRRFIVHQPEVGLFFFLRDVVYNYITEKTTCRCPLTQERPCDTGGKFGRIWICQPEELGKMQIWICQPEELGKMQIDKNRTMVQQMWYIWYGGLDTSTNSLLPILVRGMA

SEQ ID NO: 16312 - protein, 3312 aa, Homo sapiens
MMARRPPWRGLGGRSTPILLLLLLSLFPLSQEELGGGGHQGWDPGLAATTGPRAHIGGGALALCPESSGVREDGGPGLGVREPIFVGLRGRRQSARNSRGPPEQPNEELGIEHGVQPLGSRERETGQGPGSVLYWRPEVSSCGRTGPLQRGSLSPGALSSGVPGSGNSSPLPSDFLIRHHGPKPVSSQRNAGTGSRKRVGTARCCGELWATGSKGQGERATTSGAERTAPRRNCLPGASGSGPELDSAPRTARTAPASGSAPRESRTAPEPAPKRMRSRGLFRCRFLPQRPGPRPPGLPARPEARKVTSANRARFRRAANRHPQFPQYNYQTLVPENEAAGTAVLRVVAQDPDAGEAGRLVYSLAALMNSRSLELFSIDPQSGLIRTAAALDRESMERHYLRVTAQDHGSPRLSATTMVAVTVADRNDHSPVFEQAQYRETLRENVEEGYPILQLRATDGDAPPNANLRYRFVGPPAARAAAAAAFEIDPRSGLISTSGRVDREHMESYELVVEASDQGQEPGPRSATVRVHITVLDENDNAPQFSEKRYVAQVREDVRPHTVVLRVTATDRDKDANGLVHYNIISGNSRGHFAIDSLTGEIQVVAPLDFEAEREYALRIRAQDAGRPPLSNNTGLASIQVVDINDHIPIFVSTPFQVSVLENAPLGHSVIHIQAVDADHGENARLEYSLTGVAPDTPFVINSATGWVSVSGPLDRESVEHYFFGVEARDHGSPPLSASASVTVTVLDVNDNRPEFTMKEYHLRLNEDAAVGTSVVSVTAVDRDANSAISYQITGGNTRNRFAISTQGGVGLVTLALPLDYKQERYFKLVLTASDRALHDHCYVHINITDANTHRPVFQSAHYSVSVNEDRPMGSTIVVISASDDDVGENARITYLLEDNLPQFRIDADSGAITLQAPLDYEDQVTYTLAITARDNGIPQKADTTYVEVMVNDVNDNAPQFVASHYTGLVSEDAPPFTSVLQISATDRDAHANGRVQYTFQNGEDGDGDFTIEPTSGIVRTVRRLDREAVSVYELTAYAVDRGVPPLRTPVSIQVMVQDVNDNAPVFPAEEFEVRVKENSIVGSVVAQITAVDPDEGPNAHIMYQIVEGNIPELFQMDIFSGELTALIDLDYEARQEYVIVVQATSAPLVSRATVHVRLVDQNDNSPVLNNFQILFNNYVSNRSDTFPSGIIGRIPAYDPDVSDHLFYSFERGNELQLLVVNQTSGELRLSRKLDNNRPLVASMLVTVTDGLHSVTAQCVLRVVIITEELLANSLTVRLENMWQERFLSPLLGRFLEGVAAVLATPAEDVFIFNIQNDTDVGGTVLNVSFSALAPRGAGAGAAGPWFSSEELQEQLYVRRAALAARSLLDVLPFDDNVCLREPCENYMKCVSVLRFDSSAPFLASASTLFRPIQPIAGLRCRCPPGFTGDFCETELDLCYSNPCRNGGACARREGGYTCVCRPRFTGEDCELDTEAGRCVPGVCRNGGTCTDAPNGGFRCQCPAGGAFEGPRCEVAARSFPPSSFVMFRGLRQRFHLTLSLSFATVQQSGLLFYNGRLNEKHDFLALELVAGQVRLTYSTGESNTVVSPTVPGGLSDGQWHTVHLRYYNKPRTDALGGAQGPSKDKVAVLSVDDCDVAVALQFGAEIGNYSCAAAGVQTSSKKSLDLTGPLLLGGVPNLPENFPVSHKDFIGCMRDLHIDGRRVDMAAFVANNGTMAGCQAKLHFCDSGPCKNSGFCSERWGSFSCDCPVGFGGKDCQLTMAHPHHFRGNGTLSWNFGSDMAVSVPWYLGLAFRTRATQGVLMQVQAGPHSTLLCQLDRGLLSVTVTRGSGRASHLLLDQVTVSDGRWHDLRLELQEEPGGRRGHHVLMVSLDFSLFQDTMAVGSELQGLKVKQLHVGGLPPGSAEEAPQGLVGCIQGVWLGSTPSGSPALLPPSHRVNAEPGCVVTNACASGPCPPHADCRDLWQTFSCTCQPGYYGPGCVDACLLNPCQNQGSCRHLPGAPHGYTCDCVGGYFGHHCEHRMDQQCPRGWWGSPTCGPCNCDVHKGFDPNCNKTNGQCHCKEFHYRPRGSDSCLPCDCYPVGSTSRSCAPHSGQCPCRPGALGRQCNSCDSPFAEVTASGCRVLYDACPKSLRSGVWWPQTKFGVLATVPCPRGALGAAVRLCDEAQGWLEPDLFNCTSPAFRELSLLLDGLELNKTALDTMEAKKLAQRLREVTGHTDHYFSQDVRVTARLLAHLLAFESHQQGFGLTATQDAHFNENLLWAGSALLAPETGDLWAALGQRAPGGSPGSAGLVRHLEEYAATLARNMELTYLNPMGLVTPNIMLSIDRMEHPSSPRGARRYPRYHSNLFRGQDAWDPHTHVLLPSQSPRPSPSEVLPTSSSIENSTTSSVVPPPAPPEPEPGISIIILLVYRTLGGLLPAQFQAERRGARLPQNPVMNSPVVSVAVFHGRNFLRGILESPISLEFRLLQTANRSKAICVQWDPPGLAEQHGVWTARDCELVHRNGSHARCRCSRTGTFGVLMDASPRERLEGDLELLAVFTHVVVAVSVAALVLTAAILLSLRSLKSNVRGIHANVAAALGVAELLFLLGIHRTHNQLVCTAVAILLHYFFLSTFAWLFVQGLHLYRMQVEPRNVDRGAMRFYHALGWGVPAVLLGLAVGLDPEGYGNPDFCWISVHEPLIWSFAGPVVLVIVMNGTMFLLAARTSCSTGQREAKKTSALTLRSSFLLLLLVSASWLFGLLAVNHSILAFHYLHAGLCGLQGLAVLLLFCVLNADARAAWMPACLGRKAAPEEARPAPGLGPGAYNNTALFEESGLIRITLGASTVSSVSSARSGRTQDQDSQRGRSYLRDNVLVRHGSAADHTDHSLQAHAGPTDLDVAMFHRDAGADSDSDSDLSLEEERSLSIPSSESEDNGRTRGRFQRPLCRAAQSERLLTHPKDVDGNDLLSYWPALGECEAAPCALQTWGSERRLGLDTSKDAANNNQPDPALTSGDETSLGRAQRQRKGILKNRLQYPLVPQTRGAPELSWCRAATLGHRAVPAASYGRIYAGGGTGSLSQPASRYSSREQLDLLLRRQLSRERLEEAPAPVLRPLSRPGSQECMDAAPGRLEPKDRGSTLPRRQPPRDYPGAMAGRFGSRDALDLGAPREWLSTLPPPRRTRDLDPQPPPLPLSPQRQLSRDPLLPSRPLDSLSRSSNSREQLDQVPSRHPSREALGPLPQLLRAREDSVSGPSHGPSTEQLDILSSILASFNSSALSSVQSSSTPLGPHTTATPSATASVLGPSTPRSATSHSISELSPDSEVPRSEGHS

SEQ ID NO: 16313 - protein, 3317 aa, Homo sapiens
MMARRPPWRGLGGRSTPILLLLLLSLFPLSQEELGGGGHQGWDPGLAATTGPRAHIGGGALALCPESSGVREDGGPGLGVREPIFVGLRGRRQSARNSRGPPEQPNEELGIEHGVQPLGSRERETGQGPGSVLYWRPEVSSCGRTGPLQRGSLSPGALSSGVPGSGNSSPLPSDFLIRHHGPKPVSSQRNAGTGSRKRVGTARCCGELWATGSKGQGERATTSGAERTAPRRNCLPGASGSGPELDSAPRTARTAPASGSAPRESRTAPEPAPKRMRSRGLFRCRFLPQRPGPRPPGLPARPEARKVTSANRARFRRAANRHPQFPQYNYQTLVPENEAAGTAVLRVVAQDPDAGEAGRLVYSLAALMNSRSLELFSIDPQSGLIRTAAALDRESMERHYLRVTAQDHGSPRLSATTMVAVTVADRNDHSPVFEQAQYRETLRENVEEGYPILQLRATDGDAPPNANLRYRFVGPPAARAAAAAAFEIDPRSGLISTSGRVDREHMESYELVVEASDQGQEPGPRSATVRVHITVLDENDNAPQFSEKRYVAQVREDVRPHTVVLRVTATDRDKDANGLVHYNIISGNSRGHFAIDSLTGEIQVVAPLDFEAEREYALRIRAQDAGRPPLSNNTGLASIQVVDINDHIPIFVSTPFQVSVLENAPLGHSVIHIQAVDADHGENARLEYSLTGVAPDTPFVINSATGWVSVSGPLDRESVEHYFFGVEARDHGSPPLSASASVTVTVLDVNDNRPEFTMKEYHLRLNEDAAVGTSVVSVTAVDRDANSAISYQITGGNTRNRFAISTQGGVGLVTLALPLDYKQERYFKLVLTASDRALHDHCYVHINITDANTHRPVFQSAHYSVSVNEDRPMGSTIVVISASDDDVGENARITYLLEDNLPQFRIDADSGAITLQAPLDYEDQVTYTLAITARDNGIPQKADTTYVEVMVNDVNDNAPQFVASHYTGLVSEDAPPFTSVLQISATDRDAHANGRVQYTFQNGEDGDGDFTIEPTSGIVRTVRRLDREAVSVYELTAYAVDRGVPPLRTPVSIQVMVQDVNDNAPVFPAEEFEVRVKENSIVGSVVAQITAVDPDEGPNAHIMYQIVEGNIPELFQMDIFSGELTALIDLDYEARQEYVIVVQATSAPLVSRATVHVRLVDQNDNSPVLNNFQILFNNYVSNRSDTFPSGIIGRIPAYDPDVSDHLFYSFERGNELQLLVVNQTSGELRLSRKLDNNRPLVASMLVTVTDGLHSVTAQCVLRVVIITEELLANSLTVRLENMWQERFLSPLLGRFLEGVAAVLATPAEDVFIFNIQNDTDVGGTVLNVSFSALAPRGAGAGAAGPWFSSEELQEQLYVRRAALAARSLLDVLPFDDNVCLREPCENYMKCVSVLRFDSSAPFLASASTLFRPIQPIAGLRCRCPPGFTGDFCETELDLCYSNPCRNGGACARREGGYTCVCRPRFTGEDCELDTEAGRCVPGVCRNGGTCTDAPNGGFRCQCPAGGAFEGPRCEVAARSFPPSSFVMFRGLRQRFHLTLSLSFATVQQSGLLFYNGRLNEKHDFLALELVAGQVRLTYSTGESNTVVSPTVPGGLSDGQWHTVHLRYYNKPRTDALGGAQGPSKDKVAVLSVDDCDVAVALQFGAEIGNYSCAAAGVQTSSKKSLDLTGPLLLGGVPNLPENFPVSHKDFIGCMRDLHIDGRRVDMAAFVANNGTMAGCQAKLHFCDSGPCKNSGFCSERWGSFSCDCPVGFGGKDCQLTMAHPHHFRGNGTLSWNFGSDMAVSVPWYLGLAFRTRATQGVLMQVQAGPHSTLLCQLDRGLLSVTVTRGSGRASHLLLDQVTVSDGRWHDLRLELQEEPGGRRGHHVLMVSLDFSLFQDTMAVGSELQGLKVKQLHVGGLPPGSAEEAPQGLVGCIQGVWLGSTPSGSPALLPPSHRVNAEPGCVVTNACASGPCPPHADCRDLWQTFSCTCQPGYYGPGCVDACLLNPCQNQGSCRHLPGAPHGYTCDCVGGYFGHHCEHRMDQQCPRGWWGSPTCGPCNCDVHKGFDPNCNKTNGQCHCKEFHYRPRGSDSCLPCDCYPVGSTSRSCAPHSGQCPCRPGALGRQCNSCDSPFAEVTASGCRVLYDACPKSLRSGVWWPQTKFGVLATVPCPRGALGLRGAGAAVRLCDEAQGWLEPDLFNCTSPAFRELSLLLDGLELNKTALDTMEAKKLAQRLREVTGHTDHYFSQDVRVTARLLAHLLAFESHQQGFGLTATQDAHFNENLLWAGSALLAPETGDLWAALGQRAPGGSPGSAGLVRHLEEYAATLARNMELTYLNPMGLVTPNIMLSIDRMEHPSSPRGARRYPRYHSNLFRGQDAWDPHTHVLLPSQSPRPSPSEVLPTSSSIENSTTSSVVPPPAPPEPEPGISIIILLVYRTLGGLLPAQFQAERRGARLPQNPVMNSPVVSVAVFHGRNFLRGILESPISLEFRLLQTANRSKAICVQWDPPGLAEQHGVWTARDCELVHRNGSHARCRCSRTGTFGVLMDASPRERLEGDLELLAVFTHVVVAVSVAALVLTAAILLSLRSLKSNVRGIHANVAAALGVAELLFLLGIHRTHNQLVCTAVAILLHYFFLSTFAWLFVQGLHLYRMQVEPRNVDRGAMRFYHALGWGVPAVLLGLAVGLDPEGYGNPDFCWISVHEPLIWSFAGPVVLVIVMNGTMFLLAARTSCSTGQREAKKTSALTLRSSFLLLLLVSASWLFGLLAVNHSILAFHYLHAGLCGLQGLAVLLLFCVLNADARAAWMPACLGRKAAPEEARPAPGLGPGAYNNTALFEESGLIRITLGASTVSSVSSARSGRTQDQDSQRGRSYLRDNVLVRHGSAADHTDHSLQAHAGPTDLDVAMFHRDAGADSDSDSDLSLEEERSLSIPSSESEDNGRTRGRFQRPLCRAAQSERLLTHPKDVDGNDLLSYWPALGECEAAPCALQTWGSERRLGLDTSKDAANNNQPDPALTSGDETSLGRAQRQRKGILKNRLQYPLVPQTRGAPELSWCRAATLGHRAVPAASYGRIYAGGGTGSLSQPASRYSSREQLDLLLRRQLSRERLEEAPAPVLRPLSRPGSQECMDAAPGRLEPKDRGSTLPRRQPPRDYPGAMAGRFGSRDALDLGAPREWLSTLPPPRRTRDLDPQPPPLPLSPQRQLSRDPLLPSRPLDSLSRSSNSREQLDQVPSRHPSREALGPLPQLLRAREDSVSGPSHGPSTEQLDILSSILASFNSSALSSVQSSSTPLGPHTTATPSATASVLGPSTPRSATSHSISELSPDSEVPRSEGHS

SEQ ID NO: 16314 - protein, 374 aa, Homo sapiens
MLSTSRSRFIRNTNESGEEVTTFFDYDYGAPCHKFDVKQIGAQLLPPLYSLVFIFGFVGNMLVVLILINCKKLKCLTDIYLLNLAISDLLFLITLPLWAHSAANEWVFGNAMCKLFTGLYHIGYFGGIFFIILLTIDRYLAIVHAVFALKARTVTFGVVTSVITWLVAVFASVPGIIFTKCQKEDSVYVCGPYFPRGWNNFHTIMRNILGLVLPLLIMVICYSGILKTLLRCRNEKKRHRAVRVIFTIMIVYFLFWTPYNIVILLNTFQEFFGLSNCESTSQLDQATQVTETLGMTHCCINPIIYAFVGEKFRSLFHIALGCRIAPLQKPVCGGPGVRPGKNVKVTTQGLLDGRGKGKSIGRAPEASLQDKEGA

SEQ ID NO: 16315 - protein, 360 aa, Homo sapiens
MLSTSRSRFIRNTNESGEEVTTFFDYDYGAPCHKFDVKQIGAQLLPPLYSLVFIFGFVGNMLVVLILINCKKLKCLTDIYLLNLAISDLLFLITLPLWAHSAANEWVFGNAMCKLFTGLYHIGYFGGIFFIILLTIDRYLAIVHAVFALKARTVTFGVVTSVITWLVAVFASVPGIIFTKCQKEDSVYVCGPYFPRGWNNFHTIMRNILGLVLPLLIMVICYSGILKTLLRCRNEKKRHRAVRVIFTIMIVYFLFWTPYNIVILLNTFQEFFGLSNCESTSQLDQATQVTETLGMTHCCINPIIYAFVGEKFRRYLSVFFRKHITKRFCKQCPVFYRETVDGVTSTNTPSTGEQEVSAGL

SEQ ID NO: 16316 - protein, 93 aa, Homo sapiens
MPKNAVVILRYGPYSAAGLPVEHHTFRLQGLQAVLAIDGHEVILEKIEDWNVVELMVNEEVIFHCNIKDLEFGGDGKLDPLCEKARIAVLNAY

SEQ ID NO: 16317 - protein, 93 aa, Homo sapiens
MPKNAVVILRYGPYSAAGLPVEHHTFRLQGLQAVLAIDGHEVILEKIEDWNVVELMVNEEVIFHCNIKDLEFGKPFGDASSQQFASSEESLNF

SEQ ID NO: 16318 - protein, 157 aa, Homo sapiens
MPKNAVVILRYGPYSAAGLPVEHHTFRLQGLQAVLAIDGHEVILEKIEDWNVVELMVNEEVIFHCNIKDLEFGKLTPSSDKRTTSSSRLTFHQLSSPCGMKVSPLQQFPQKTQDLTCIVLAQIGSCIHFQTNLCDLGWPGLDHMLISGLEKRGTQPY

SEQ ID NO: 16319 - protein, 157 aa, Homo sapiens
MPKNAVVILRYGPYSAAGLPVEHHTFRLQGLQAVLAIDGHEVILEKIEDWNVVELMVNEEVIFHCNIKDLEFGKLTPSSDKRTTSSSRLTFHQLSSPCRMKVSPLQQFPQKTQDLTCTVLAQIGSCIHFQTNLCDLGWPGLDHMLISGLEKRGTQPY

SEQ ID NO: 16320 - protein, 1309 aa, Homo sapiens
MLLNGDCPESLKKEAAAAEPPRENGLDEAGPGDETTGQEVIVIQDTGFSVKILAPGIEPFSLQVSPQEMVQEIHQVLMDREDTCHRTCFSLHLDGNVLDHFSELRSVEGLQEGSVLRVVEEPYTVREARIHVRHVRDLLKSLDPSDAFNGVDCNSLSFLSVFTDGDLGDSGKRKKGLEMDPIDCTPPEYILPGSRERPLCPLQPQNRDWKPLQCLKVLTMSGWNPPPGNRKMHGDLMYLFVITAEDRQVSITASTRGFYLNQSTAYHFNPKPASPRFLSHSLVELLNQISPTFKKNFAVLQKKRVQRHPFERIATPFQVYSWTAPQAEHAMDCVRAEDAYTSRLGYEEHIPGQTRDWNEELQTTRELPRKNLPERLLRERAIFKVHSDFTAAATRGAMAVIDGNVMAINPSEETKMQMFIWNNIFFSLGFDVRDHYKDFGGDVAAYVAPTNDLNGVRTYNAVDVEGLYTLGTVVVDYRGYRVTAQSIIPGILERDQEQSVIYGSIDFGKTVVSHPRYLELLERTSRPLKILRHQVLNDRDEEVELCSSVECKGIIGNDGRHYILDLLRTFPPDLNFLPVPGEELPEECARAGFPRAHRHKLCCLRQELVDAFVEHRYLLFMKLAALQLMQQNASQLETPSSLENGGPSSLESKSEDPPGQEAGSEEEGSSASGLAKVKELAETIAADDGTDPRSREVIRNACKAVGSISSTAFDIRFNPDIFSPGVRFPESCQDEVRDQKQLLKDAAAFLLSCQIPGLVKDCMEHAVLPVDGATLAEVMRQRGINMRYLGKVLELVLRSPARHQLDHVFKIGIGELITRSAKHIFKTYLQGVELSGLSAAISHFLNCFLSSYPNPVAHLPADELVSKKRNKRRKNRPPGAADNTAWAVMTPQELWKNICQEAKNYFDFDLECETVDQAVETYGLQKITLLREISLKTGIQVLLKEYSFDSRHKPAFTEEDVLNIFPVVKHVNPKASDAFHFFQSGQAKVQQGFLKEGCELINEALNLFNNVYGAMHVETCACLRLLARLHYIMGDYAEALSNQQKAVLMSERVMGTEHPNTIQEYMHLALYCFASSQLSTALSLLYRARYLMLLVFGEDHPEMALLDNNIGLVLHGVMEYDLSLRFLENALAVSTKYHGPKALKVALSHHLVARVYESKAEFRSALQHEKEGYTIYKTQLGEDHEKTKESSEYLKCLTQQAVALQRTMNEIYRNGSSANIPPLKFTAPSMASVLEQLNVINGILFIPLSQKDLENLKAEVARRHQLQEASRNRDRAEEPMATEPAPAGAPGDLGSQPPAAKDPSPSVQG

SEQ ID NO: 16321 - protein, 150 aa, Homo sapiens
MAASQCLCCSKFLFQRQNLACFLTNPHCGSLVNADGHGEVWTDWNNMSKFFQYGWRCTTNENTYSNRTLMGNWNQERYDLRNIVQPKPLPSQFGHYFETTYDTSYNNKMPLSTHRFKREPHWFPGHQPELDPPRYKCTEKSTYMNSYSKP

SEQ ID NO: 16322 - protein, 212 aa, Homo sapiens
MEKDTGTTHRRHRPGLRALPSGVALGHLKAASEASELQRSRSLGGLQPEGDPPSRPRKPHKELESEDQGKDPSSNAEDASCQKNLAQDKKESFSTLGKLGHESGKQDPEREKSDLEASMQEVQEGEHADGGLQEAKEQEAESIKLNDLQEEEKASVFVEIDLGDHAEEVVTDAKKEEKPSQMDVEDLSEDEMQTSWVCCIPYSTRKRAKEST

SEQ ID NO: 16323 - protein, 1339 aa, Homo sapiens
MTGEVGSEVHLEINDPNVISQEEADSPSDSGQGSYETIGPLSEGDSDEEIFVSKKLKNRKVLQDSDSETEDTNASPEKTTYDSAEEENKENLYAGKNTKIKRIYKTVADSDESYMEKSLYQENLEAQVKPCLELSLQSGNSTDFTTDRKSSKKHIHDKEGTAGKAKVKSKRRLEKEERKMEKIRQLKKKETKNQEDDVEQPFNDSGCLLVDKDLFETGLEDENNSPLEDEESLESIRAAVKNKVKKHKKKEPSLESGVHSFEEGSELSKGTTRKERKAARLSKEALKQLHSETQRLIRESALNLPYHMPENKTIHDFFKRKPRPTCHGNAMALLKSSKYQSSHHKEIIDTANTTEMNSDHHSKGSEQTTGAENEVETNALPVVSKETQIITGSDESCRKDLVKNEELEIQEKQKQSDIRPSPGDSSVLQQESNFLGNNHSEECQVGGLVAFEPHALEGEGPQNPEETDEKVEEPEQQNKSSAVGPPEKVRRFTLDRLKQLGVDVSIKPRLGADEDSFVILEPETNRELEALKQRFWKHANPAAKPRAGQTVNVNVIVKDMGTDGKEELKADVVPVTLAPKKLDGASHTKPGEKLQVLKAKLQEAMKLRRFEERQKRQALFKLDNEDGFEEEEEEEEEMTDESEEDGEEKVEKEEKEEELEEEEEKEEEEEEEGNQETAEFLLSSEEIETKDEKEMDKENNDGSSEIGKAVGFLSVPKSLSSDSTLLLFKDSSSKMGYFPTEEKSETDENSGKQPSKLDEDDSCSLLTKESSHNSSFELIGSTIPSYQPCNRQTGRGTSFFPTAGGFRSPSPGLFRASLVSSASKSSGKLSEPSLPIEDSQDLYNASPEPKTLFLGAGDFQFCLEDDTQSQLLDADGFLNVRNHRNQYQALKPRLPLASMDENAMDANMDELLDLCTGKFTSQAEKHLPRKSDKKENMEELLNLCSGKFTSQDASTPASSELNKQEKESSMGDPMEEALALCSGSFPTDKEEEDEEEEFGDFRLVSNDNEFDSDEDEHSDSGNDLALEDHEDDDEEELLKRSEKLKRQMRLRKYLEDEAEVSGSDVGSEDEYDGEEIDEYEEDVIDEVLPSDEELQSQIKKIHMKTMLDDDKRQLRLYQERYLADGDLHSDGPGRMRKFRWKNIDDASQMDLFHRDSDDDQTEEQLDESEARWRKERIEREQWLRDMAQQGKITAEEEEEIGEDSQFMILAKKVTAKALQKNASRPMVIQESKSLLRNPFEAIRPGSAQQVKTGSLLNQPKAVLQKLAALSDHNPSAPRNSRNFVFHTLSPVKAEAAKESSKSQVKKRGPSFMTSPSPKHLKTDDSTSGLTRSIFKYLES

SEQ ID NO: 16324 - protein, 1275 aa, Homo sapiens
MTGEVGSEVHLEINDPNVISQEEADSPSDSGQGSYETIGPLSEGDSDEEIFVSKKLKNRKVLQDSDSETEDTNASPEKTTYDSAEEENKENLYAGKNTKIKRIYKTVADSDESYMEKSLYQENLEAQVKPCLELSLQSGNSTDFTTDRKSSKKHIHDKEGTAGKAKVKSKRRLEKEERKMEKIRQLKKKETKNQEDDVEQPFNDSGCLLVDKDLFETGLEDENNSPLEDEESLESIRAAVKNKVKKHKKKEPSLESGVHSFEEGSELSKGTTRKERKAARLSKEALKQLHSETQRLIRESALNLPYHMPENKTIHDFFKRKPRPTCHGNAMALLKSSKYQSSHHKEIIDTANTTEMNSDHHSKGSEQTTGAENEVETNALPVVSKETQIITGSDESCRKDLVKNEELEIQEKQKQSDIRPSPGDSSVLQQESNFLGNNHSEECQVGGLVAFEPHALEGEGPQNPEETDEKVEEPEQQNKSSAVGPPEKVRRFTLDRLKQLGVDVSIKPRLGADEDSFVILEPETNRGEKLQVLKAKLQEAMKLRRFEERQKRQALFKLDNEDGFEEEEEEEEEMTDESEEDGEEKVEKEEKEEELEEEEEKEEEEEEEGNQETAEFLLSSEEIETKDEKEMDKENNDGSSEIGKAVGFLSVPKSLSSDSTLLLFKDSSSKMGYFPTEEKSETDENSGKQPSKLDEDDSCSLLTKESSHNSSFELIGSTIPSYQPCNRQTGRGTSFFPTAGGFRSPSPGLFRASLVSSASKSSGKLSEPSLPIEDSQDLYNASPEPKTLFLGAGDFQFCLEDDTQSQLLDADGFLNVRNHRNQYQALKPRLPLASMDENAMDANMDELLDLCTGKFTSQAEKHLPRKSDKKENMEELLNLCSGKFTSQDASTPASSELNKQEKESSMGDPMEEALALCSGSFPTDKEEEDEEEEFGDFRLVSNDNEFDSDEDEHSDSGNDLALEDHEDDDEEELLKRSEKLKRQMRLRKYLEDEAEVSGSDVGSEDEYDGEEIDEYEEDVIDEVLPSDEELQSQIKKIHMKTMLDDDKRQLRLYQERYLADGDLHSDGPGRMRKFRWKNIDDASQMDLFHRDSDDDQTEEQLDESEARWRKERIEREQWLRDMAQQGKITAEEEEEIGEDSQFMILAKKVTAKALQKNASRPMVIQESKSLLRNPFEAIRPGSAQQVKTGSLLNQPKAVLQKLAALSDHNPSAPRNSRNFVFHTLSPVKAEAAKESSKSQVKKRGPSFMTSPSPKHLKTDDSTSGLTRSIFKYLES

SEQ ID NO: 16325 - protein, 1332 aa, Homo sapiens
MTGEVGSEVHLEINDPNVISQEEADSPSDSGQGSYETIGPLSEGDSDEEIFVSKKLKNRKVLQDSDSETEDTNASPEKTTYDSAEEENKENLYAGKNTKIKRIYKTVADSDESYMEKSLYQENLEAQVKPCLELSLQSGNSTDFTTDRKSSKKHIHDKEGTAGKAKVKSKRRLEKEERKMEKIRQLKKKETKNQEDDVEQPFNDSGCLLVDKDLFETGLEDENNSPLEDEESLESIRAAVKNKVKKHKKKEPSLESGVHSFEEGSELSKGTTRKERKAARLSKEALKQLHSETQRLIRESALNLPYHMPENKTIHDFFKRKPRPTCHGNAMALLKSSKYQSSHHKEIIDTANTTEMNSDHHSKGSEQTTGAENEVETNALPVVSKETQIITGSDESCRKDLVKNEELEIQEKQKQSDIRPSPGDSSVLQQESNFLGNNHSEECQVGGLVAFEPHALEGEGPQNPEETDEKVEEPEQQNKSSAVGPPEKVRRFTLDRLKQLGVDVSIKPRLGADEDSFVILEPETNRELEALKQRFWKHANPAAKPRAGQTVNVNVIVKDMGTDGKEELKADVVPVTLAPKKLDGASHTKPGEKLQVLKAKLQEAMKLRRFEERQKRQALFKLDNEDGFEEEEEEEEEMTDESEEDGEEKVEKEEKEEELEEEEEKEEEEEEEGNQETAEFLLSSEEIETKDEKEMDKENNDGSSEIGKAVGFLSVPKSLSSDSTLLLFKDSSSKMGYFPTEEKSETDENSGKQPSKLDEDDSCSLLTKESSHNSSFELIGSTIPSYQPCNRQTGRGTSFFPTAGGFRSPSPGLFRASLVSSASKSSGKLSEPSLPIEDSQDLYNASPEPKTLFLGAGDFQFCLEDDTQSQLLDADGFLNVRNHRNQYQALKPRLPLASMDENAMDANMDELLDLCTGKFTSQAEKHLPRKSDKKENMEELLNLCSGKFTSQDASTPASSELNKQEKESSMGDPMEEALALCSGSFPTDKEEEDEEEEFGDFRLVSNDNEFDSDEDEHSDSGNDLALEDHEDDDEEELLKRSEKLKRQMRLRKYLEDEAEVSGSDVGSEDEYDGEEIDEYEEDVIDEVLPSDEELQSQIKKIHMKTMLDDDKRQLRLYQERYLADGDLHSDGPGRMRKFRWKNIDDASQMDLFHRDSDDDQTEEQLDESEARWRKERIEREQWLRDMAQQGKITAEEEEEIGEDSQFMILAKKVTAKALQKNASRPMVIQESKSLLRNPFEAIRPGSAQQVKTGSLLNQPKAVLQKLAALSDHNPSAPRNSRNFVFHTLSPVKAEAAKESSKSQKIPEKDSDWLTWSGAPIPGFFRLSFDPHG

SEQ ID NO: 16326 - protein, 105 aa, Homo sapiens
MGIGTGHTSMNKGGKDVTLLELSVEKRRWRINMETSKIILEKMQSDDVLDGNRERSNEREGRDSLSEKLKSKQNLKDEEKLRYIKTGKSIQVEGTVRAKALRWVQ

SEQ ID NO: 16327 - protein, 538 aa, Homo sapiens
MSFSATILFSPPSGSEARCCCCACKSETNGGNTGSQGGNPPPSTPITVTGHGLAVQSSEQLLHVIYQRVDKAVGLAEAALGLARANNELLKRLQEEVGDLRQGKVSIPDEDGESRAHSSPPEEPGPLKESPGEAFKALSAVEEECDSVGSGVQVVIEELRQLGAASVGPGPLGFPATQRDMRLPGCTLAASEAAPLLNPLVDDYVASEGAVQRVLVPAYAKQLSPATQLAIQRATPETGPENGTKLPPPRPEDMLNAAAALDSALEESGPGSTGELRHSLGLTVSPCRTRGSGQKNSRRKRDLVLSKLVHNVHNHITNDKRFNGSESIKSSWNISVVKFLLEKLKQELVTSPHNYTDKELKGACVAYFLTKRREYRNSLNPFKGLKEKEEKKLRSRRYRLFANRSSIMRHFGPEDQRLWNDVTEELMSDEEDSLNEPGVWVARPPRFRAQRLTELCYHLDANSKHGTKANRVYGPPSDRLPSAEAQLLPPELYNPNFQEEEDEGGDENAPGSPSFDQPHKTCCPDLNSFIEIKVEKDE

SEQ ID NO: 16328 - protein, 498 aa, Homo sapiens
MSFSATILFSPPSGSEARCCCCACKSETNGGNTGSQGGNPPPSTPITVTGHGLAVQSSEQLLHVIYQRVDKAVGLAEAALGLARANNELLKRLQEEVGDLRQGKVSIPDEDGESRAHSSPPEEPGPLKESPGEAFKALSAVEEECDSVGSGVQVVIEELRQLGAASVGPGPLGFPATQRDMRLPGCTLAASEAAPLLNPLVDDYVASEGAVQRVLVPAYAKQLSPATQLAIQRATPETGPENGTKLPPPRPEDMLNAAAALDSALEESGPGSTGELRHSLGLTVSPCRTRGSGQKNSRRKRDLVLSKLVHNVHNHITNDKRFNGSESIKSSWNISVVKFLLEKLKQELVTSPHNYTDKELKGACVAYFLTKRREYRNSLNPFKGLKEKEEKKLRSRRYRLFANRSSIMRHFGPEDQRLWNDVTEELMSDEEDSLNEPDRLPSAEAQLLPPELYNPNFQEEEDEGGDENAPGSPSFDQPHKTCCPDLNSFIEIKVEKDE

SEQ ID NO: 16329 - protein, 167 aa, Homo sapiens
MELSSMKICAAIPTSRALPEVVRRMPRKRISGLEWLLQQDPGFSLVNTVKAGMIISFPSNNIYSSVCCCQSEIFKYEFSNSKKSSWIQEERHLGKNNVLYSAHDVSPEKVTSALKKTNKQTTTINNFPLQYLPGSKLLDRFLSLSRSLLCLNSWSSSLPLAPQVKKK

SEQ ID NO: 16330 - protein, 310 aa, Homo sapiens
MKTLFEEIKASIKNNYNQDRSFCRPVLPWGGVFTIKAGRKAVSCTPLYVEIRLKNTCTIDGFLMLLYVILNENENFPRELSLHFGREFVDCFLYLMDTYSFTTVKLLWIWDKMEKQQYKSEVHKASLIIDLFGNEHDNFTKNLENLMSTIQESYCSNWRCPTRVQEDQQRTININPPQEIPHGNLIRLAVNELFCSKIELCEEHGCGGLREFSQRIFCHGAPPFVVLNMQHWKSEDLAYVPYYLDLSDHKYLLEGATLFNKEEHHYSAAFQIGGHWMHYDGLRNVNLILLNKPPEFLLLSSLVYIRATEK

SEQ ID NO: 16331 - protein, 235 aa, Homo sapiens
MAWQGLAAEFLQVPAVTRAYTAACVLTTAAVQLELLSPFQLYFNPHLVFRKFQVWRLVTNFLFFGPLGFSFFFNMLFVFRYCRMLEEGSFRGRTADFVFMFLFGGVLMTLLGLLGSLFFLGQALMAMLVYVWSRRSPRVRVNFFGLLTFQAPFLPWALMGFSLLLGNSILVDLLGIAVGHIYYFLEDVFPNQPGGKRLLQTPGFLKLLLDAPAEDPNYLPLPEEQPGPHLPPPQQ

SEQ ID NO: 16332 - protein, 239 aa, Homo sapiens
MAWQGLAAEFLQVPAVTRAYTAACVLTTAAVQLELLSPFQLYFNPHLVFRKFQVWRLVTNFLFFGPLGFSFFFNMLFVFRYCRMLEEGSFRGRTADFVFMFLFGGVLMTLLGLLGSLFFLGQALMAMLVYVWSRRSPRVRVNFFGLLTFQAPFLPWALMGFSLLLGNSILVDLLGIAVGHIYYFLEDVFPNQPGGKRLLQTPGFLGLQSSKAPAGSSLTIWTQQSQGGPGTAGELAAPS

SEQ ID NO: 16333 - protein, 233 aa, Homo sapiens
MAWQGLAAEFLQVPAVTRAYTAACVLTTAAVQLELLSPFQLYFNPHLVFRKFQVWRLVTNFLFFGPLGFSFFFNMLFVFRYCRMLEEGSFRGRTADFVFMFLFGGVLMTLLGLLGSLFFLGQALMAMLVYVWSRRSPRVRVNFFGLLTFQAPFLPWALMGFSLLLGNSILVDLLGIAVGHIYYFLEDVFPNQPGGKRLLQTPGFLLATAQQCPHRTGPSAGDFRAARPQLAVA

SEQ ID NO: 16334 - protein, 225 aa, Homo sapiens
MLFVFRYCRMLEEGSFRGRTADFVFMFLFGGVLMTVSFPQALEPRARAPRRPACVGPGANTAMPERDTVAVSSLVCVEGPLCAQLQGSGLDLQCCMQNTKPRTKEPGTVPALGAHGLLAAAGQLHPRGPAGDCGGPYLLLPGGRLPQPAWRQEAPADPWLPVSVESPPSLSPPSEGSPPMGTCAGLCSTRAPPHRKLLLDAPAEDPNYLPLPEEQPGPHLPPPQQ

SEQ ID NO: 16335 - protein, 205 aa, Homo sapiens
MAWQGLAAEFLQVPAVTRAYTAACVLTTAAVQLELLSPFQLYFNPHLVFRKFQVWRLVTNFLFFGPLGFSFFFNMLFVFRYCRMLEEGSFRGRTADFVFMFLFGGVLMTLLGLLGSLFFLGQALMAMLVYVWSRRSPRVRVNFFGLLTFQAPFLPWALMGFSLLLGNSILVDLLGIAVGHIYYFLEDVFPNQPGGKRLLQTPGFL

SEQ ID NO: 16336 - protein, 2032 aa, Homo sapiens
MGDDSEWLKLPVDQKCEHKLWKARLSGYEEALKIFQKIKDEKSPEWSKFLGLIKKFVTDSNAVVQLKGLEAALVYVENAHVAGKTTGEVVSGVVSKVFNQPKAKAKELGIEICLMYIEIEKGEAVQEELLKGLDNKNPKIIVACIETLRKALSEFGSKIILLKPIIKVLPKLFESREKAVRDEAKLIAVEIYRWIRDALRPPLQNINSVQLKELEEEWVKLPTSAPRPTRFLRSQQELEAKLEQQQSAGGDAEGGGDDGDEVPQIDAYELLEAVEILSKLPKDFYDKIEAKKWQERKEALESVEVLIKNPKLEAGDYADLVKALKKVVGKDTNVMLVALAAKCLTGLAVGLRKKFGQYAGHVVPTILEKFKEKKPQVVQALQEAIDAIFLTTTLQNISEDVLAVMDNKNPTIKQQTSLFIARSFRHCTASTLPKSLLKPFCAALLKHINDSAPEVRDAAFEALGTALKVVGEKAVNPFLADVDKLKLDKIKECSEKVELIHGKKAGLAADKKEFKPLPGRTAASGAAGDKDTKDISAPKPGPLKKAPAAKAGGPPKKGKPAAPGGAGNTGTKNKKGLETKEIVEPELSIEVCEEKASAVLPPTCIQLLDSSNWKERLACMEEFQKAVELMDRTEMPCQALVRMLAKKPGWKETNFQVMQMKLHIVALIAQKGNFSKTSAQVVLDGLVDKIGDVKCGNNAKEAMTAIAEACMLPWTAEQVVSMAFSQKNPKNQSETLNWLSNAIKEFGFSGLNVKAFISNVKTALAATNPAVRTAAITLLGVMYLYVGPSLRMFFEDEKPALLSQIDAEFEKMQGQSPPAPTRGISKHSTSGTDEGEDGDEPDDGSNDVVDLLPRTEISDKITSELVSKIGDKNWKIRKEGLDEVAGIINDAKFIQPNIGELPTALKGRLNDSNKILVQQTLNILQQLAVAMGPNIKQHVKNLGIPIITVLGDSKNNVRAAALATVNAWAEQTGMKEWLEGEDLSEELKKENPFLRQELLGWLAEKLPTLRSTPTDLILCVPHLYSCLEDRNGDVRKKAQDALPFFMMHLGYEKMAKATGKLKPTSKDQVLAMLEKAKVNMPAKPAPPTKATSKPMGGSAPAKFQPASAPAEDCISSSTEPKPDPKKAKAPGLSSKAKSAQGKKMPSKTSLKEDEDKSGPIFIVVPNGKEQRMKDEKGLKVLKWNFTTPRDEYIEQLKTQMSSCVAKWLQDEMFHSDFQHHNKALAVMVDHLESEKEGVIGCLDLILKWLTLRFFDTNTSVLMKALEYLKLLFTLLSEEEYHLTENEASSFIPYLVVKVGEPKDVIRKDVRAILNRMCLVYPASKMFPFIMEGTKSKNSKQRAECLEELGCLVESYGMNVCQPTPGKALKEIAVHIGDRDNAVRNAALNTIVTVYNVHGDQVFKLIGNLSEKDMSMLEERIKRSAKRPSAAPIKQVEEKPQRAQNISSNANMLRKGPAEDMSSKLNQARSMSGHPEAAQMVRREFQLDLDEIENDNGTVRCEMPELVQHKLDDIFEPVLIPEPKIRAVSPHFDDMHSNTASTINFIISQVASGDINTSIQALTQIDEVLRQEDKAEAMSGHIDQFLIATFMQLRLIYNTHMADEKLEKDEIIKLYSCIIGNMISLFQIESLAREASTGVLKDLMHGLITLMLDSRIEDLEEGQQVIRSVNLLVVKVLEKSDQTNILSALLVLLQDSLLATASSPKFSELVMKCLWRMVRLLPDTINSINLDRILLDIHIFMKVFPKEKLKQCKSEFPIRTLKTLLHTLCKLKGPKILDHLTMIDNKNESELEAHLCRMMKHSMDQTGSKSDKETEKGASRIDEKSSKAKVNDFLAEIFKKIGSKENTKEGLAELYEYKKKYSDADIEPFLKNSSQFFQSYVERGLRVIEMEREGKGRISTSTGISPQMEVTCVPTPTSTVSSIGNTNGEEVGPSVYLERLKILRQRCGLDNTKQDDRPPLTSLLSKPAVPTVASSTDMLHSKLSQLRESREQHQHSDLDSNQTHSSGTVTSSSSTANIDDLKKRLERIKSSRK

SEQ ID NO: 16337 - protein, 1972 aa, Homo sapiens
MGDDSEWLKLPVDQKCEHKLWKARLSGYEEALKIFQKIKDEKSPEWSKFLGLIKKFVTDSNAVVQLKGLEAALVYVENAHVAGKTTGEVVSGVVSKVFNQPKAKAKELGIEICLMYIEIEKGEAVQEELLKGLDNKNPKIIVACIETLRKALSEFGSKIILLKPIIKVLPKLFESREKAVRDEAKLIAVEIYRWIRDALRPPLQNINSVQLKELEEEWVKLPTSAPRPTRFLRSQQELEAKLEQQQSAGGDAEGGGDDGDEVPQIDAYELLEAVEILSKLPKDFYDKIEAKKWQERKEALESVEVLIKNPKLEAGDYADLVKALKKVVGKDTNVMLVALAAKCLTGLAVGLRKKFGQYAGHVVPTILEKFKEKKPQVVQALQEAIDAIFLTTTLQNISEDVLAVMDNKNPTIKQQTSLFIARSFRHCTASTLPKSLLKPFCAALLKHINDSAPEVRDAAFEALGTALKVVGEKAVNPFLADVDKLKLDKIKECSEKVELIHGKKAGLAADKKEFKPLPGRTAASGAAGDKDTKDISAPKPGPLKKAPAAKAGGPPKKGKPAAPGGAGNTGTKNKKGLETKEIVEPELSIEVCEEKASAVLPPTCIQLLDSSNWKERLACMEEFQKAVELMDRTEMPCQALVRMLAKKPGWKETNFQVMQMKLHIVALIAQKGNFSKTSAQVVLDGLVDKIGDVKCGNNAKEAMTAIAEACMLPWTAEQVVSMAFSQKNPKNQSETLNWLSNAIKEFGFSGLNVKAFISNVKTALAATNPAVRTAAITLLGVMYLYVGPSLRMFFEDEKPALLSQIDAEFEKMQGQSPPAPTRGISKHSTSGTDEGEDGDEPDDGSNDVVDLLPRTEISDKITSELVSKIGDKNWKIRKEGLDEVAGIINDAKFIQPNIGELPTALKGRLNDSNKILVQQTLNILQQLAVAMGPNIKQHVKNLGIPIITVLGDSKNNVRAAALATVNAWAEQTGMKEWLEGEDLSEELKKENPFLRQELLGWLAEKLPTLRSTPTDLILCVPHLYSCLEDRNGDVRKKAQDALPFFMMHLGYEKMAKATGKLKPTSKDQVLAMLEKAKVNMPAKPAPPTKATSKPMGGSAPAKFQPASAPAEDCISSSTEPKPDPKKAKAPGLSSKAKSAQGKKMPSKTSLKEDEDKSGPIFIVVPNGKEQRMKDEKGLKVLKWNFTTPRDEYIEQLKTQMSSCVAKWLQDEMFHSDFQHHNKALAVMVDHLESEKEGVIGCLDLILKWLTLRFFDTNTSVLMKALEYLKLLFTLLSEEEYHLTENEASSFIPYLVVKVGEPKDVIRKDVRAILNRMCLVYPASKMFPFIMEGTKSKNSKQRAECLEELGCLVESYGMNVCQPTPGKALKEIAVHIGDRDNAVRNAALNTIVTVYNVHGDQVFKLIGNLSEKDMSMLEERIKRSAKRPSAAPIKQVEEKPQRAQNISSNANMLRKGPAEDMSSKLNQARSMSGHPEAAQMVRREFQLDLDEIENDNGTVRCEMPELVQHKLDDIFEPVLIPEPKIRAVSPHFDDMHSNTASTINFIISQVASGDINTSIQALTQLFQIESLAREASTGVLKDLMHGLITLMLDSRIEDLEEGQQVIRSVNLLVVKVLEKSDQTNILSALLVLLQDSLLATASSPKFSELVMKCLWRMVRLLPDTINSINLDRILLDIHIFMKVFPKEKLKQCKSEFPIRTLKTLLHTLCKLKGPKILDHLTMIDNKNESELEAHLCRMMKHSMDQTGSKSDKETEKGASRIDEKSSKAKVNDFLAEIFKKIGSKENTKEGLAELYEYKKKYSDADIEPFLKNSSQFFQSYVERGLRVIEMEREGKGRISTSTGISPQMEVTCVPTPTSTVSSIGNTNGEEVGPSVYLERLKILRQRCGLDNTKQDDRPPLTSLLSKPAVPTVASSTDMLHSKLSQLRESREQHQHSDLDSNQTHSSGTVTSSSSTANIDDLKKRLERIKSSRK

SEQ ID NO: 16338 - protein, 2039 aa, Homo sapiens
MGDDSEWLKLPVDQKCEHKLWKARLSGYEEALKIFQKIKDEKSPEWSKFLGLIKKFVTDSNAVVQLKGLEAALVYVENAHVAGKTTGEVVSGVVSKVFNQPKAKAKELGIEICLMYIEIEKGEAVQEELLKGLDNKNPKIIVACIETLRKALSEFGSKIILLKPIIKVLPKLFESREKAVRDEAKLIAVEIYRWIRDALRPPLQNINSVQLKELEEEWVKLPTSAPRPTRFLRSQQELEAKLEQQQSAGGDAEGGGDDGDEVPQIDAYELLEAVEILSKLPKDFYDKIEAKKWQERKEALESVEVLIKNPKLEAGDYADLVKALKKVVGKDTNVMLVALAAKCLTGLAVGLRKKFGQYAGHVVPTILEKFKEKKPQVVQALQEAIDAIFLTTTLQNISEDVLAVMDNKNPTIKQQTSLFIARSFRHCTASTLPKSLLKPFCAALLKHINDSAPEVRDAAFEALGTALKVVGEKAVNPFLADVDKLKLDKIKECSEKVELIHGKKAGLAADKKEFKPLPGRTAASGAAGDKDTKDISAPKPGPLKKAPAAKAGGPPKKGKPAAPGGAGNTGTKNKKGLETKEIVEPELSIEVCEEKASAVLPPTCIQLLDSSNWKERLACMEEFQKAVELMDRTEMPCQALVRMLAKKPGWKETNFQVMQMKLHIVALIAQKGNFSKTSAQVVLDGLVDKIGDVKCGNNAKEAMTAIAEACMLPWTAEQVVSMAFSQKNPKNQSETLNWLSNAIKEFGFSGLNVKAFISNVKTALAATNPAVRTAAITLLGVMYLYVGPSLRMFFEDEKPALLSQIDAEFEKMQGQSPPAPTRGISKHSTSGTDEGEDGDEPDDGSNDVVDLLPRTEISDKITSELVSKIGDKNWKIRKEGLDEVAGIINDAKFIQPNIGELPTALKGRLNDSNKILVQQTLNILQQLAVAMGPNIKQHVKNLGIPIITVLGDSKNNVRAAALATVNAWAEQTGMKEWLEGEDLSEELKKENPFLRQELLGWLAEKLPTLRSTPTDLILCVPHLYSCLEDRNGDVRKKAQDALPFFMMHLGYEKMAKATGKLKPTSKDQVLAMLEKAKVNMPAKPAPPTKATSKPMGGSAPAKFQPASAPAEDCISSSTEPKPDPKKAKAPGLSSKAKSAQGKKMPSKTSLKEDEDKSGPIFIVVPNGKEQRMKDEKGLKVLKWNFTTPRDEYIEQLKTQMSSCVAKWLQDEMFHSDFQHHNKALAVMVDHLESEKEGVIGCLDLILKWLTLRFFDTNTSVLMKALEYLKLLFTLLSEEEYHLTENEASSFIPYLVVKVGEPKDVIRKDVRAILNRMCLVYPASKMFPFIMEGTKSKNSKQRAECLEELGCLVESYGMNVCQPTPGKALKEIAVHIGDRDNAVRNAALNTIVTVYNVHGDQVFKLIGNLSEKDMSMLEERIKRSAKRPSAAPIKQVEEKPQRAQNISSNANMLRKGPAEDMSSKLNQARSMSGHPEAAQMVRREFQLDLDEIENDNGTVRCEMPELVQHKLDDIFEPVLIPEPKIRAVSPHFDDMHSNTASTINFIISQVASGDINTSIQALTQIDEVLRQEDKAEAMSGHIDQFLIATFMQLRLIYNTHMADEKLEKDEIIKLYSCIIGNMISLFQIESLAREASTGVLKDLMHGLITLMLDSRIEDLEEGQQVIRSVNLLVVKVLEKSDQTNILSALLVLLQDSLLATASSPKFSELVMKCLWRMVRLLPDTINSINLDRILLDIHIFMKVFPKEKLKQCKSEFPIRTLKTLLHTLCKLKGPKSCMCLPQILDHLTMIDNKNESELEAHLCRMMKHSMDQTGSKSDKETEKGASRIDEKSSKAKVNDFLAEIFKKIGSKENTKEGLAELYEYKKKYSDADIEPFLKNSSQFFQSYVERGLRVIEMEREGKGRISTSTGISPQMEVTCVPTPTSTVSSIGNTNGEEVGPSVYLERLKILRQRCGLDNTKQDDRPPLTSLLSKPAVPTVASSTDMLHSKLSQLRESREQHQHSDLDSNQTHSSGTVTSSSSTANIDDLKKRLERIKSSRK

SEQ ID NO: 16339 - protein, 421 aa, Homo sapiens
MNRGFSRKSHTFLPKIFFRKMSSSGAKDKPELQFPFLQDEDTVATLLECKTLFILRGLPGSGKSTLARVIVDKYRDGTKMVSADAYKITPGARGAFSEEYKRLDEDLAAYCRRRDIRILVLDDTNHERERLEQLFEMADQYQYQVVLVEPKTAWRLDCAQLKEKNQWQLSADDLKKLKPGLEKDFLPLYFGWFLTKKSSETLRKAGQVFLEELGNHKAFKKELRQFVPGDEPREKMDLVTYFGKRPPGVLHCTTKFCDYGKAPGAEEYAQQDVLKKSYSKAFTLTISALFVTPKTTGARVELSEQQLQLWPSDVDKLSPTDNLPRGSRAHITLGCAADVEAVQTGLDLLEILRQEKGGSRGEEVGELSRGKLYSLGNGRWMLTLAKNMEVRAIFTGYYGKGKPVPTQGSRKGGALQSCTII

SEQ ID NO: 16340 - protein, 401 aa, Homo sapiens
MSSSGAKDKPELQFPFLQDEDTVATLLECKTLFILRGLPGSGKSTLARVIVDKYRDGTKMVSADAYKITPGARGAFSEEYKRLDEDLAAYCRRRDIRILVLDDTNHERERLEQLFEMADQYQYQVVLVEPKTAWRLDCAQLKEKNQWQLSADDLKKLKPGLEKDFLPLYFGWFLTKKSSETLRKAGQVFLEELGNHKAFKKELRQFVPGDEPREKMDLVTYFGKRPPGVLHCTTKFCDYGKAPGAEEYAQQDVLKKSYSKAFTLTISALFVTPKTTGARVELSEQQLQLWPSDVDKLSPTDNLPRGSRAHITLGCAADVEAVQTGLDLLEILRQEKGGSRGEEVGELSRGKLYSLGNGRWMLTLAKNMEVRAIFTGYYGKGKPVPTQGSRKGGALQSCTII

SEQ ID NO: 16341 - protein, 148 aa, Homo sapiens
MGRAGPRSTADTRPRATVITTRRPRPWQKPTSPRRLHRRRPRGQPASENAAEPSQVAISKGKSPDYANGGKAAMDSRASDAINKSKVDTSASNPSQRRPSRLRGKRSLALPPRLECLFPSSCGSRRATSRPGFPPLEGSHLGCQLLPL

SEQ ID NO: 16342 - protein, 160 aa, Homo sapiens
MVPKLFTSQICLLLLLGLMGVEGSLHARPPQFTRAQWFAIQHISLNPPRCTIAMRAINNYRWRCKNQNTFLRTTFANVVNVCGNQSIRCPHNRTLNNCHRSRFRVPLLHCDLINPGAQNISNCTYADRPGRRFYVVACDNRDPRDSPRYPVVPVHLDTTI

SEQ ID NO: 16343 - protein, 79 aa, Homo sapiens
MHHVRQLMMPICPMALNSTTSSSTTFGAFRIMTLNVEEWATAWKVLILLEAAVEEEKRSEEKRILVCGTCGTRSSQKNL

SEQ ID NO: 16344 - protein, 1306 aa, Homo sapiens
MDSLPRLTSVLTLLFSGLWHLGLTATNYNCDDPLASLLSPMAFSSSSDLTGTHSPAQLNWRVGTGGWSPADSNAQQWLQMDLGNRVEITAVATQGRYGSSDWVTSYSLMFSDTGRNWKQYKQEDSIWTFAGNMNADSVVHHKLLHSVRARFVRFVPLEWNPSGKIGMRVEVYGCSYKSDVADFDGRSSLLYRFNQKLMSTLKDVISLKFKSMQGDGVLFHGEGQRGDHITLELQKGRLALHLNLGDSKARLSSSLPSATLGSLLDDQHWHSVLIERVGKQVNFTVDKHTQHFRTKGETDALDIDYELSFGGIPVPGKPGTFLKKNFHGCIENLYYNGVNIIDLAKRRKHQIYTGNVTFSCSEPQIVPITFVNSSGSYLLLPGTPQIDGLSVSFQFRTWNKDGLLLSTELSEGSGTLLLSLEGGILRLVIQKMTERVAEILTGSNLNDGLWHSVSINARRNRITLTLDDEAAPPAPDSTWVQIYSGNSYYFGGCPDNLTDSQCLNPIKAFQGCMRLIFIDNQPKDLISVQQGSLGNFSDLHIDLCSIKDRCLPNYCEHGGSCSQSWTTFYCNCSDTSYTGATCHNSIYEQSCEVYRHQGNTAGFFYIDSDGSGPLGPLQVYCNITEDKIWTSVQHNNTELTRVRGANPEKPYAMALDYGGSMEQLEAVIDGSEHCEQEVAYHCRRSRLLNTPDGTPFTWWIGRSNERHPYWGGSPPGVQQCECGLDESCLDIQHFCNCDADKDEWTNDTGFLSFKDHLPVTQIVITDTDRSNSEAAWRIGPLRCYGDRRFWNAVSFYTEASYLHFPTFHAEFSADISFFFKTTALSGVFLENLGIKDFIRLEISSPSEITFAIDVGNGPVELVVQSPSLLNDNQWHYVRAERNLKETSLQVDNLPRSTRETSEEGHFRLQLNSQLFVGGTSSRQKGFLGCIRSLHLNGQKMDLEERAKVTSGVRPGCPGHCSSYGSICHNGGKCVEKHNGYLCDCTNSPYEGPFCKKEVSAVFEAGTSVTYMFQEPYPVTKNISLSSSAIYTDSAPSKENIALSFVTTQAPSLLLFINSSSQDFVVVLLCKNGSLQVRYHLNKEETHVFTIDADNFANRRMHHLKINREGRELTIQMDQQLRLSYNFSPEVEFRVIRSLTLGKVTENLGLDSEVAKANAMGFAGCMSSVQYNHIAPLKAALRHATVAPVTVHGTLTESSCGFMVDSDVNAVTTVHSSSDPFGKTDEREPLTNAVRSDSAVIGGVIAVVIFIIFCIIGIMTRFLYQHKQSHRTSQMKEKEYPENLDSSFRNEIDLQNTVSECKREYFI

SEQ ID NO: 16345 - protein, 373 aa, Homo sapiens
MRMEDEDYNTSISYGDEYPDYLDSIVVLEDLSPLEARVTRIFLVVVYSIVCFLGILGNGLVIIIATFKMKKTVNMVWFLNLAVADFLFNVFLPIHITYAAMDYHWVFGTAMCKISNFLLIHNMFTSVFLLTIISSDRCISVLLPVWSQNHRSVRLAYMACMVIWVLAFFLSSPSLVFRDTANLHGKISCFNNFSLSTPGSSSWPTHSQMDPVGYSRHMVVTVTRFLCGFLVPVLIITACYLTIVCKLQRNRLAKTKKPFKIIVTIIITFFLCWCPYHTLNLLELHHTAMPGSVFSLGLPLATALAIANSCMNPILYVFMGQDFKKFKVALFSRLVNALSEDTGHSSYPSHRSFTKMSSMNERTSMNERETGML

SEQ ID NO: 16346 - protein, 371 aa, Homo sapiens
MEDEDYNTSISYGDEYPDYLDSIVVLEDLSPLEARVTRIFLVVVYSIVCFLGILGNGLVIIIATFKMKKTVNMVWFLNLAVADFLFNVFLPIHITYAAMDYHWVFGTAMCKISNFLLIHNMFTSVFLLTIISSDRCISVLLPVWSQNHRSVRLAYMACMVIWVLAFFLSSPSLVFRDTANLHGKISCFNNFSLSTPGSSSWPTHSQMDPVGYSRHMVVTVTRFLCGFLVPVLIITACYLTIVCKLQRNRLAKTKKPFKIIVTIIITFFLCWCPYHTLNLLELHHTAMPGSVFSLGLPLATALAIANSCMNPILYVFMGQDFKKFKVALFSRLVNALSEDTGHSSYPSHRSFTKMSSMNERTSMNERETGML

SEQ ID NO: 16347 - protein, 1015 aa, Homo sapiens
MGAERRLLSIKEAFRLAQQPHQNQAKLVVALSRTYRTMDDKTVFHEEFIHYLKYVMVVYKREPAVERVIEFAAKFVTSFHQSDMEDDEEEEDGGLLNYLFTFLLKSHEANSNAVRFRVCLLINKLLGSMPENAQIDDDVFDKINKAMLIRLKDKIPNVRIQAVLALSRLQDPKDDECPVVNAYATLIENDSNPEVRRAVLSCIAPSAKTLPKIVGRTKDVKEAVRKLAYQVLAEKVHMRAMSIAQRVMLLQQGLNDRSDAVKQAMQKHLLQGWLRFSEGNILELLHRLDVENSSEVAVSVLNALFSITPLSELVGLCKNNDGRKLIPVETLTPEIALYWCALCEYLKSKGDEGEEFLEQILPEPVVYADYLLSYIQSIPVVNEEHRGDFSYIGNLMTKEFIGQQLILIIKSLDTSEEGGRKKLLAVLQEILILPTIPISLVSFLVERLLHIIIDDNKRTQIVTEIISEIRAPIVTVGVNNDPADVRKKELKMAEIKVKLIEAKEALENCITLQDFNRASELKEEIKALEDARINLLKETEQLEIKEVHIEKNDAETLQKCLILCYELLKQMSISTGLSATMNGIIESLILPGIISIHPVVRNLAVLCLGCCGLQNQDFARKHFVLLLQVLQIDDVTIKISALKAIFDQLMTFGIEPFKTKKIKTLHCEGTEINSDDEQESKEVEETATAKNVLKLLSDFLDSEVSELRTGAAEGLAKLMFSGLLVSSRILSRLILLWYNPVTEEDVQLRHCLGVFFPVFAYASRTNQECFEEAFLPTLQTLANAPASSPLAEIDITNVAELLVDLTRPSGLNPQAKTSQDYQALTVHDNLAMKICNEILTSPCSPEIRVYTKALSSLELSSHLAKDLLVLLNEILEQVKDRTCLRALEKIKIQLEKGNKEFGDQAEAAQDATLTTTTFQNEDEKNKEVYMTPLRGVKATQASKSTQLKTNRGQRKVTVSARTNRRCQTAEADSESDHEVPEPESEMKMRLPRRAKTAALEKSKLNLAQFLNEDLS

SEQ ID NO: 16348 - protein, 716 aa, Homo sapiens
MGETKIIYHLDGQETPYLVKLPLPAERVTLADFKGVLQRPSYKFFFKSMDDDFGVVKEEISDDNAKLPCFNGRVVSWLVSAEGSHPDPAPFCADNPSELPPPMERTGGIGDSRPPSFHPHAGGGSQENLDNDTETDSLVSAQRERPRRRDGPEHATRLNGTAKGERRREPGGYDSSSTLMSSELETTSFFDSDEDDSTSRFSSSTEQSSASRLMRRHKRRRRKQKVSRIERSSSFSSITDSTMSLNIITVTLNMEKYNFLGISIVGQSNERGDGGIYIGSIMKGGAVAADGRIEPGDMLLQVNEINFENMSNDDAVRVLREIVHKPGPITLTVAKCWDPSPRGCFTLPRSEPIRPIDPAAWVSHTAAMTGTFPAYGMSPSLSTITSTSSSITSSIPDTERLDDFHLSIHSDMAAIVKAMASPESGLEVRDRMWLKITIPNAFIGSDVVDWLYHNVEGFTDRREARKYASNLLKAGFIRHTVNKITFSEQCYYIFGDLCGNMANLSLHDHDGSSGASDQDTLAPLPHPGAAPWPMAFPYQYPPPPHPYNPHPGFPELGYSYGGGSASSQHSEGSRSSGSNRSGSDRRKEKDPKAGDSKSGGSGSESDHTTRSSLRGPRERAPSERSGPAASEHSHRSHHSLASSLRSHHTHPSYGPPGVPPLYGPPMLMMPPPPAAMGPPGAPPGRDLASVPPELTASRQSFRMAMGNPSEFFVDVM

SEQ ID NO: 16349 - protein, 699 aa, Homo sapiens
MGETKIIYHLDGQETPYLVKLPLPAERVTLADFKGVLQRPSYKFFFKSMDDDFGVVKEEISDDNAKLPCFNGRVVSWLVSAEGSHPDPAPFCADNPSELPPPMERTGGIGDSRPPSFHPHAGGGSQENLDNDTETDSLVSAQRERPRRRDGPEHATRLNGTAKGERRREPGGYDSSSTLMSSELETTSFFDSDEDDSTSRFSSSTEQSSASRLMRRHKRRRRKQKVSRIERSSSFSSITDSTMSLNIITVTLNMEKYNFLGISIVGQSNERGDGGIYIGSIMKGGAVAADGRIEPGDMLLQVNEINFENMSNDDAVRVLREIVHKPGPITLTVAKCWDPSPRGCFTLPRTMTGTFPAYGMSPSLSTITSTSSSITSSIPDTERLDDFHLSIHSDMAAIVKAMASPESGLEVRDRMWLKITIPNAFIGSDVVDWLYHNVEGFTDRREARKYASNLLKAGFIRHTVNKITFSEQCYYIFGDLCGNMANLSLHDHDGSSGASDQDTLAPLPHPGAAPWPMAFPYQYPPPPHPYNPHPGFPELGYSYGGGSASSQHSEGSRSSGSNRSGSDRRKEKDPKAGDSKSGGSGSESDHTTRSSLRGPRERAPSERSGPAASEHSHRSHHSLASSLRSHHTHPSYGPPGVPPLYGPPMLMMPPPPAAMGPPGAPPGRDLASVPPELTASRQSFRMAMGNPSEFFVDVM

SEQ ID NO: 16350 - protein, 193 aa, Homo sapiens
MPTTSRPALDVKGGTSPAKEDANQEMSSVAYSNLAVKDRKAVAILHYPGVASNGTKASGAPTSSSGSPIGSPTTTPPTKPPSFNLHPAPHLLASMHLQKLNSQYQGMAAATPGQPGEAGPLQNWDFGAQAGGAESLSPSAGAQSPAIIDSDPVDEEVLMSLVVELGLDRANELPELWLGQNEFDFTADFPSSC

SEQ ID NO: 16351 - protein, 219 aa, Homo sapiens
MEPSAQQLQLAASLPANLSNFCQGSEMPTTSRPALDVKGGTSPAKEDANQEMSSVAYSNLAVKDRKAVAILHYPGVASNGTKASGAPTSSSGSPIGSPTTTPPTKPPSFNLHPAPHLLASMHLQKLNSQYQGMAAATPGQPGEAGPLQNWDFGAQAGGAESLSPSAGAQSPAIIDSDPVDEEVLMSLVVELGLDRANELPELWLGQNEFDFTADFPSSC

SEQ ID NO: 16352 - protein, 704 aa, Homo sapiens
MAEAAEPEGVAPGPQGPPEVPAPLAERPGEPGAAGGEAEGPEGSEGAEEAPRGAAAVKEAGGGGPDRGPEAEARGTRGAHGETEAEEGAPEGAEVPQGGEETSGAQQVEGASPGRGAQGEPRGEAQREPEDSAAPERQEEAEQRPEVPEGSASGEAGDSVDAEGPLGDNIEAEGPAGDSVEAEGRVGDSVDAEGPAGDSVDAEGPLGDNIQAEGPAGDSVDAEGRVGDSVDAEGPAGDSVDAEGRVGDSVEAGDPAGDGVEAGVPAGDSVEAEGPAGDSMDAEGPAGRARRVSGEPQQSGDGSLSPQAEAIEVAAGESAGRSPGELAWDAAEEAEVPGVKGSEEAAPGDARADAGEDRVGDGPQQEPGEDEERRERSPEGPREEEAAGGEEESPDSSPHGEASRGAAEPEAQLSNHLAEEGPAEGSGEAARVNGRREDGEASEPRALGQEHDITLFVKVKLTALGCSRIAIKKYLRAGYDGESIGNCPFSQRLFMILWLKGVIFNVTTVDLKRKPADLQNLAPGTNPPFMTFDGEVKTDVNKIEEFLEEKLAPPRYPKLGTQHPESNSAGNDVFAKFSAFIKNTKKDANEIHEKNLLKALRKLDNYLNSPLPDEIDAYSTEDVTVSGRKFLDGDELTLADCNLLPKLHIIKIVAKKYRDFEFPSEMTGIWRYLNNAYARDEFTNTCPADQEIEHAYSDVAKRMK

SEQ ID NO: 16353 - protein, 686 aa, Homo sapiens
MAEAAEPEGVAPGPQGPPEVPAPLAERPGEPGAAGGEAEGPEGSEGAEEAPRGAAAVKEAGGGGPDRGPEAEARGTRGAHGETEAEEGAPEGAEVPQGGEETSGAQQVEGASPGRGAQGEPRGEAQREPEDSAAPERQEEAEQRPEVPEGSASGEAGDSVDAEGPLGDNIEAEGPAGDSVEAEGRVGDSVDAEGPAGDSVDAEGPLGDNIQAEGPAGDSVDAEGRVGDSVDAEGPAGDSVDAEGRVGDSVEAGDPAGDGVEAGVPAGDSVEAEGPAGDSMDAEGPAGRARRVSGEPQQSGDGSLSPQAEAIEVAAGESAGRSPGELAWDAAEEAEVPGVKGSEEAAPGDARADAGEDRVGDGPQQEPGEDEERRERSPEGPREEEAAGGEEESPDSSPHGEASRGAAEPEAQLSNHLAEEGPAEGSGEAARVNGRREDGEASEPRALGQEHDITLFVKAGYDGESIGNCPFSQRLFMILWLKGVIFNVTTVDLKRKPADLQNLAPGTNPPFMTFDGEVKTDVNKIEEFLEEKLAPPRYPKLGTQHPESNSAGNDVFAKFSAFIKNTKKDANEIHEKNLLKALRKLDNYLNSPLPDEIDAYSTEDVTVSGRKFLDGDELTLADCNLLPKLHIIKIVAKKYRDFEFPSEMTGIWRYLNNAYARDEFTNTCPADQEIEHAYSDVAKRMK

SEQ ID NO: 16354 - protein, 507 aa, Homo sapiens
MDPKLGRMAASLLAVLLLLLERGMFSSPSPPPALLEKVFQYIDLHQDEFVQTLKEWVAIESDSVQPVPRFRQELFRMMAVAADTLQRLGARVASVDMGPQQLPDGQSLPIPPIILAELGSDPTKGTVCFYGHLDVQPADRGDGWLTDPYVLTEVDGKLYGRGATDNKGPVLAWINAVSAFRALEQDLPVNIKFIIEGMEEAGSVALEELVEKEKDRFFSGVDYIVISDNLWISQRKPAITYGTRGNSYFMVEVKCRDQDFHSGTFGGILHEPMADLVALLGSLVDSSGHILVPGIYDEVVPLTEEEINTYKAIHLDLEEYRNSSRVEKFLFDTKEEILMHLWRYPSLSIHGIEGAFDEPGTKTVIPGRVIGKFSIRLVPHMNVSAVEKQVTRHLEDVFSKRNSSNKMVVSMTLGLHPWIANIDDTQYLAAKRAIRTVFGTEPDMIRDGSTIPIAKMFQEIVHKSVVLIPLGAVDDGEHSQNEKINRWNYIEGTKLFAAFFLEMAQLH

SEQ ID NO: 16355 - protein, 355 aa, Homo sapiens
MEDLEETLFEEFENYSYDLDYYSLESDLEEKVQLGVVHWVSLVLYCLAFVLGIPGNAIVIWFTGFKWKKTVTTLWFLNLAIADFIFLLFLPLYISYVAMNFHWPFGIWLCKANSFTAQLNMFASVFFLTVISLDHYIHLIHPVLSHRHRTLKNSLIVIIFIWLLASLIGGPALYFRDTVEFNNHTLCYNNFQKHDPDLTLIRHHVLTWVKFIIGYLFPLLTMSICYLCLIFKVKKRSILISSRHFWTILVVVVAFVVCWTPYHLFSIWELTIHHNSYSHHVMQAGIPLSTGLAFLNSCLNPILYVLISKKFQARFRSSVAEILKYTLWEVSCSGTVSEQLRNSETKNLCLLETAQ

SEQ ID NO: 16356 - protein, 238 aa, Homo sapiens
MEYAMKSLSLLYPKSLSRHVSVRTSVVTQQLLSEPSPKAPRARPCRVSTADRSVRKGIMAYSLEDLLLKVRDTLMLADKPFFLVLEEDGTTVETEEYFQALAGDTVFMVLQKGQKWQPPSEQGTRHPLSLSHKPAKKIDVARVTFDLYKLNPQDFIGCLNVKATFYDTYSLSYDLHCCGAKRIMKEAFRWALFSMQATGHVLLGTSCYLQQLLDATEEGQPPKGKASSLIPTCLKILQ

SEQ ID NO: 16357 - protein, 164 aa, Homo sapiens
MLADKPFFLVLEEDGTTVETEEYFQALAGDTVFMVLQKGQKWQPPSEQGTRHPLSLSHKPAKKIDVARVTFDLYKLNPQDFIGCLNVKATFYDTYSLSYDLHCCGAKRIMKEAFRWALFSMQATGHVLLGTSCYLQQLLDATEEGQPPKGKASSLIPTCLKILQ

SEQ ID NO: 16358 - protein, 129 aa, Homo sapiens
MEYAMKSLSLLYPKSLSRHVSVRTSVVTQQLLSEPSPKAPRARPCRVSTADRSVRKGIMAYSLEDLLLKGSFPLGPLQHAGHRPRTAWHLLLPAAAPRCYGGRAAPQGQGLIPYPDLSEDTAVKAQVLG

SEQ ID NO: 16359 - protein, 248 aa, Homo sapiens
MEYAMKSLSLLYPKSLSRHVSVRTSVVTQQLLSEPSPKAPRARPCRVSTADRSVRKGIMAYSLEDLLLKTRNPEARSQEVRDTLMLADKPFFLVLEEDGTTVETEEYFQALAGDTVFMVLQKGQKWQPPSEQGTRHPLSLSHKPAKKIDVARVTFDLYKLNPQDFIGCLNVKATFYDTYSLSYDLHCCGAKRIMKEAFRWALFSMQATGHVLLGTSCYLQQLLDATEEGQPPKGKASSLIPTCLKILQ

SEQ ID NO: 16360 - protein, 323 aa, Homo sapiens
MQAAWLLGALVVPQLLGFGHGARGAEREWEGGWGGAQEEEREREALMLKHLQEALGLPAGRGDENPAGTVEGKEDWEMEEDQGEEEEEEATPTPSSGPSPSPTPEDIVTYILGRLAGLDAGLHQLHVRLHALDTRVVELTQGLRQLRNAAGDTRDAVQALQEAQGRAEREHGRLEGCLKGLRLGHKCFLLSRDFEAQAAAQARCTARGGSLAQPADRQQMEALTRYLRAALAPYNWPVWLGVHDRRAEGLYLFENGQRVSFFAWHRSPRPELGAQPSASPHPLSPDQPNGGTLENCVAQASDDGSWWDHDCQRRLYYVCEFPF

SEQ ID NO: 16361 - protein, 244 aa, Homo sapiens
MMRTQCLLGLRTFVAFAAKLWSFFIYLLRRQIRTVIQYQTVRYDILPLSPVSRNRLAQVKRKILVLDLDETLIHSHHDGVLRPTVRPGTPPDFILKVVIDKHPVRFFVHKRPHVDFFLEVVSQWYELVVFTASMEIYGSAVADKLDNSRSILKRRYYRQHCTLELGSYIKDLSVVHSDLSSIVILDNSPGAYRSHPDNAIPIKSWFSDPSDTALLNLLPMLDALRFTADVRSVLSRNLHQHRLW

SEQ ID NO: 16362 - protein, 1806 aa, Homo sapiens
MEPWSSRWKTKRWLWDFTVTTLALTFLFQAREVRGAAPVDVLKALDFHNSPEGISKTTGFCTNRKNSKGSDTAYRVSKQAQLSAPTKQLFPGGTFPEDFSILFTVKPKKGIQSFLLSIYNEHGIQQIGVEVGRSPVFLFEDHTGKPAPEDYPLFRTVNIADGKWHRVAISVEKKTVTMIVDCKKKTTKPLDRSERAIVDTNGITVFGTRILDEEVFEGDIQQFLITGDPKAAYDYCEHYSPDCDSSAPKAAQAQEPQIDEYAPEDIIEYDYEYGEAEYKEAESVTEGPTVTEETIAQTEANIVDDFQEYNYGTMESYQTEAPRHVSGTNEPNPVEEIFTEEYLTGEDYDSQRKNSEDTLYENKEIDGRDSDLLVDGDLGEYDFYEYKEYEDKPTSPPNEEFGPGVPAETDITETSINGHGAYGEKGQKGEPAVVEPGMLVEGPPGPAGPAGIMGPPGLQGPTGPPGDPGDRGPPGRPGLPGADGLPGPPGTMLMLPFRYGGDGSKGPTISAQEAQAQAILQQARIALRGPPGPMGLTGRPGPVGGPGSSGAKGESGDPGPQGPRGVQGPPGPTGKPGKRGRPGADGGRGMPGEPGAKGDRGFDGLPGLPGDKGHRGERGPQGPPGPPGDDGMRGEDGEIGPRGLPGEAGPRGLLGPRGTPGAPGQPGMAGVDGPPGPKGNMGPQGEPGPPGQQGNPGPQGLPGPQGPIGPPGEKGPQGKPGLAGLPGADGPPGHPGKEGQSGEKGALGPPGPQGPIGYPGPRGVKGADGVRGLKGSKGEKGEDGFPGFKGDMGLKGDRGEVGQIGPRGEDGPEGPKGRAGPTGDPGPSGQAGEKGKLGVPGLPGYPGRQGPKGSTGFPGFPGANGEKGARGVAGKPGPRGQRGPTGPRGSRGARGPTGKPGPKGTSGGDGPPGPPGERGPQGPQGPVGFPGPKGPPGPPGKDGLPGHPGQRGETGFQGKTGPPGPGGVVGPQGPTGETGPIGERGHPGPPGPPGEQGLPGAAGKEGAKGDPGPQGISGKDGPAGLRGFPGERGLPGAQGAPGLKGGEGPQGPPGPVGSPGERGSAGTAGPIGLPGRPGPQGPPGPAGEKGAPGEKGPQGPAGRDGVQGPVGLPGPAGPAGSPGEDGDKGEIGEPGQKGSKGDKGENGPPGPPGLQGPVGAPGIAGGDGEPGPRGQQGMFGQKGDEGARGFPGPPGPIGLQGLPGPPGEKGENGDVGPMGPPGPPGPRGPQGPNGADGPQGPPGSVGSVGGVGEKGEPGEAGNPGPPGEAGVGGPKGERGEKGEAGPPGAAGPPGAKGPPGDDGPKGNPGPVGFPGDPGPPGEPGPAGQDGVGGDKGEDGDPGQPGPPGPSGEAGPPGPPGKRGPPGAAGAEGRQGEKGAKGEAGAEGPPGKTGPVGPQGPAGKPGPEGLRGIPGPVGEQGLPGAAGQDGPPGPMGPPGLPGLKGDPGSKGEKGHPGLIGLIGPPGEQGEKGDRGLPGTQGSPGAKGDGGIPGPAGPLGPPGPPGLPGPQGPKGNKGSTGPAGQKGDSGLPGPPGSPGPPGEVIQPLPILSSKKTRRHTEGMQADADDNILDYSDGMEEIFGSLNSLKQDIEHMKFPMGTQTNPARTCKDLQLSHPDFPDGEYWIDPNQGCSGDSFKVYCNFTSGGETCIYPDKKSEGVRISSWPKEKPGSWFSEFKRGKLLSYLDVEGNSINMVQMTFLKLLTASARQNFTYHCHQSAAWYDVSSGSYDKALRFLGSNDEEMSYDNNPFIKTLYDGCASRKGYEKTVIEINTPKIDQVPIVDVMINDFGDQNQKFGFEVGPVCFLG

SEQ ID NO: 16363 - protein, 1818 aa, Homo sapiens
MEPWSSRWKTKRWLWDFTVTTLALTFLFQAREVRGAAPVDVLKALDFHNSPEGISKTTGFCTNRKNSKGSDTAYRVSKQAQLSAPTKQLFPGGTFPEDFSILFTVKPKKGIQSFLLSIYNEHGIQQIGVEVGRSPVFLFEDHTGKPAPEDYPLFRTVNIADGKWHRVAISVEKKTVTMIVDCKKKTTKPLDRSERAIVDTNGITVFGTRILDEEVFEGDIQQFLITGDPKAAYDYCEHYSPDCDSSAPKAAQAQEPQIDEKKKSNFKKKMRTVATKSKEKSKKFTPPKSEKFSSKKKKSYQASAKAKLGVKANIVDDFQEYNYGTMESYQTEAPRHVSGTNEPNPVEEIFTEEYLTGEDYDSQRKNSEDTLYENKEIDGRDSDLLVDGDLGEYDFYEYKEYEDKPTSPPNEEFGPGVPAETDITETSINGHGAYGEKGQKGEPAVVEPGMLVEGPPGPAGPAGIMGPPGLQGPTGPPGDPGDRGPPGRPGLPGADGLPGPPGTMLMLPFRYGGDGSKGPTISAQEAQAQAILQQARIALRGPPGPMGLTGRPGPVGGPGSSGAKGESGDPGPQGPRGVQGPPGPTGKPGKRGRPGADGGRGMPGEPGAKGDRGFDGLPGLPGDKGHRGERGPQGPPGPPGDDGMRGEDGEIGPRGLPGEAGPRGLLGPRGTPGAPGQPGMAGVDGPPGPKGNMGPQGEPGPPGQQGNPGPQGLPGPQGPIGPPGEKGPQGKPGLAGLPGADGPPGHPGKEGQSGEKGALGPPGPQGPIGYPGPRGVKGADGVRGLKGSKGEKGEDGFPGFKGDMGLKGDRGEVGQIGPRGEDGPEGPKGRAGPTGDPGPSGQAGEKGKLGVPGLPGYPGRQGPKGSTGFPGFPGANGEKGARGVAGKPGPRGQRGPTGPRGSRGARGPTGKPGPKGTSGGDGPPGPPGERGPQGPQGPVGFPGPKGPPGPPGKDGLPGHPGQRGETGFQGKTGPPGPGGVVGPQGPTGETGPIGERGHPGPPGPPGEQGLPGAAGKEGAKGDPGPQGISGKDGPAGLRGFPGERGLPGAQGAPGLKGGEGPQGPPGPVGSPGERGSAGTAGPIGLPGRPGPQGPPGPAGEKGAPGEKGPQGPAGRDGVQGPVGLPGPAGPAGSPGEDGDKGEIGEPGQKGSKGDKGENGPPGPPGLQGPVGAPGIAGGDGEPGPRGQQGMFGQKGDEGARGFPGPPGPIGLQGLPGPPGEKGENGDVGPMGPPGPPGPRGPQGPNGADGPQGPPGSVGSVGGVGEKGEPGEAGNPGPPGEAGVGGPKGERGEKGEAGPPGAAGPPGAKGPPGDDGPKGNPGPVGFPGDPGPPGEPGPAGQDGVGGDKGEDGDPGQPGPPGPSGEAGPPGPPGKRGPPGAAGAEGRQGEKGAKGEAGAEGPPGKTGPVGPQGPAGKPGPEGLRGIPGPVGEQGLPGAAGQDGPPGPMGPPGLPGLKGDPGSKGEKGHPGLIGLIGPPGEQGEKGDRGLPGTQGSPGAKGDGGIPGPAGPLGPPGPPGLPGPQGPKGNKGSTGPAGQKGDSGLPGPPGSPGPPGEVIQPLPILSSKKTRRHTEGMQADADDNILDYSDGMEEIFGSLNSLKQDIEHMKFPMGTQTNPARTCKDLQLSHPDFPDGEYWIDPNQGCSGDSFKVYCNFTSGGETCIYPDKKSEGVRISSWPKEKPGSWFSEFKRGKLLSYLDVEGNSINMVQMTFLKLLTASARQNFTYHCHQSAAWYDVSSGSYDKALRFLGSNDEEMSYDNNPFIKTLYDGCASRKGYEKTVIEINTPKIDQVPIVDVMINDFGDQNQKFGFEVGPVCFLG

SEQ ID NO: 16364 - protein, 1767 aa, Homo sapiens
MEPWSSRWKTKRWLWDFTVTTLALTFLFQAREVRGAAPVDVLKALDFHNSPEGISKTTGFCTNRKNSKGSDTAYRVSKQAQLSAPTKQLFPGGTFPEDFSILFTVKPKKGIQSFLLSIYNEHGIQQIGVEVGRSPVFLFEDHTGKPAPEDYPLFRTVNIADGKWHRVAISVEKKTVTMIVDCKKKTTKPLDRSERAIVDTNGITVFGTRILDEEVFEGDIQQFLITGDPKAAYDYCEHYSPDCDSSAPKAAQAQEPQIDEANIVDDFQEYNYGTMESYQTEAPRHVSGTNEPNPVEEIFTEEYLTGEDYDSQRKNSEDTLYENKEIDGRDSDLLVDGDLGEYDFYEYKEYEDKPTSPPNEEFGPGVPAETDITETSINGHGAYGEKGQKGEPAVVEPGMLVEGPPGPAGPAGIMGPPGLQGPTGPPGDPGDRGPPGRPGLPGADGLPGPPGTMLMLPFRYGGDGSKGPTISAQEAQAQAILQQARIALRGPPGPMGLTGRPGPVGGPGSSGAKGESGDPGPQGPRGVQGPPGPTGKPGKRGRPGADGGRGMPGEPGAKGDRGFDGLPGLPGDKGHRGERGPQGPPGPPGDDGMRGEDGEIGPRGLPGEAGPRGLLGPRGTPGAPGQPGMAGVDGPPGPKGNMGPQGEPGPPGQQGNPGPQGLPGPQGPIGPPGEKGPQGKPGLAGLPGADGPPGHPGKEGQSGEKGALGPPGPQGPIGYPGPRGVKGADGVRGLKGSKGEKGEDGFPGFKGDMGLKGDRGEVGQIGPRGEDGPEGPKGRAGPTGDPGPSGQAGEKGKLGVPGLPGYPGRQGPKGSTGFPGFPGANGEKGARGVAGKPGPRGQRGPTGPRGSRGARGPTGKPGPKGTSGGDGPPGPPGERGPQGPQGPVGFPGPKGPPGPPGKDGLPGHPGQRGETGFQGKTGPPGPGGVVGPQGPTGETGPIGERGHPGPPGPPGEQGLPGAAGKEGAKGDPGPQGISGKDGPAGLRGFPGERGLPGAQGAPGLKGGEGPQGPPGPVGSPGERGSAGTAGPIGLPGRPGPQGPPGPAGEKGAPGEKGPQGPAGRDGVQGPVGLPGPAGPAGSPGEDGDKGEIGEPGQKGSKGDKGENGPPGPPGLQGPVGAPGIAGGDGEPGPRGQQGMFGQKGDEGARGFPGPPGPIGLQGLPGPPGEKGENGDVGPMGPPGPPGPRGPQGPNGADGPQGPPGSVGSVGGVGEKGEPGEAGNPGPPGEAGVGGPKGERGEKGEAGPPGAAGPPGAKGPPGDDGPKGNPGPVGFPGDPGPPGEPGPAGQDGVGGDKGEDGDPGQPGPPGPSGEAGPPGPPGKRGPPGAAGAEGRQGEKGAKGEAGAEGPPGKTGPVGPQGPAGKPGPEGLRGIPGPVGEQGLPGAAGQDGPPGPMGPPGLPGLKGDPGSKGEKGHPGLIGLIGPPGEQGEKGDRGLPGTQGSPGAKGDGGIPGPAGPLGPPGPPGLPGPQGPKGNKGSTGPAGQKGDSGLPGPPGSPGPPGEVIQPLPILSSKKTRRHTEGMQADADDNILDYSDGMEEIFGSLNSLKQDIEHMKFPMGTQTNPARTCKDLQLSHPDFPDGEYWIDPNQGCSGDSFKVYCNFTSGGETCIYPDKKSEGVRISSWPKEKPGSWFSEFKRGKLLSYLDVEGNSINMVQMTFLKLLTASARQNFTYHCHQSAAWYDVSSGSYDKALRFLGSNDEEMSYDNNPFIKTLYDGCASRKGYEKTVIEINTPKIDQVPIVDVMINDFGDQNQKFGFEVGPVCFLG

SEQ ID NO: 16365 - protein, 1690 aa, Homo sapiens
MEPWSSRWKTKRWLWDFTVTTLALTFLFQAREVRGAAPVDVLKALDFHNSPEGISKTTGFCTNRKNSKGSDTAYRVSKQAQLSAPTKQLFPGGTFPEDFSILFTVKPKKGIQSFLLSIYNEHGIQQIGVEVGRSPVFLFEDHTGKPAPEDYPLFRTVNIADGKWHRVAISVEKKTVTMIVDCKKKTTKPLDRSERAIVDTNGITVFGTRILDEEVFEGDIQQFLITGDPKAAYDYCEHYSPDCDSSAPKAAQAQEPQIDEYAPEDIIEYDYEYGEAEYKEAESVTEGPTVTEETIAQTEINGHGAYGEKGQKGEPAVVEPGMLVEGPPGPAGPAGIMGPPGLQGPTGPPGDPGDRGPPGRPGLPGADGLPGPPGTMLMLPFRYGGDGSKGPTISAQEAQAQAILQQARIALRGPPGPMGLTGRPGPVGGPGSSGAKGESGDPGPQGPRGVQGPPGPTGKPGKRGRPGADGGRGMPGEPGAKGDRGFDGLPGLPGDKGHRGERGPQGPPGPPGDDGMRGEDGEIGPRGLPGEAGPRGLLGPRGTPGAPGQPGMAGVDGPPGPKGNMGPQGEPGPPGQQGNPGPQGLPGPQGPIGPPGEKGPQGKPGLAGLPGADGPPGHPGKEGQSGEKGALGPPGPQGPIGYPGPRGVKGADGVRGLKGSKGEKGEDGFPGFKGDMGLKGDRGEVGQIGPRGEDGPEGPKGRAGPTGDPGPSGQAGEKGKLGVPGLPGYPGRQGPKGSTGFPGFPGANGEKGARGVAGKPGPRGQRGPTGPRGSRGARGPTGKPGPKGTSGGDGPPGPPGERGPQGPQGPVGFPGPKGPPGPPGKDGLPGHPGQRGETGFQGKTGPPGPGGVVGPQGPTGETGPIGERGHPGPPGPPGEQGLPGAAGKEGAKGDPGPQGISGKDGPAGLRGFPGERGLPGAQGAPGLKGGEGPQGPPGPVGSPGERGSAGTAGPIGLPGRPGPQGPPGPAGEKGAPGEKGPQGPAGRDGVQGPVGLPGPAGPAGSPGEDGDKGEIGEPGQKGSKGDKGENGPPGPPGLQGPVGAPGIAGGDGEPGPRGQQGMFGQKGDEGARGFPGPPGPIGLQGLPGPPGEKGENGDVGPMGPPGPPGPRGPQGPNGADGPQGPPGSVGSVGGVGEKGEPGEAGNPGPPGEAGVGGPKGERGEKGEAGPPGAAGPPGAKGPPGDDGPKGNPGPVGFPGDPGPPGEPGPAGQDGVGGDKGEDGDPGQPGPPGPSGEAGPPGPPGKRGPPGAAGAEGRQGEKGAKGEAGAEGPPGKTGPVGPQGPAGKPGPEGLRGIPGPVGEQGLPGAAGQDGPPGPMGPPGLPGLKGDPGSKGEKGHPGLIGLIGPPGEQGEKGDRGLPGTQGSPGAKGDGGIPGPAGPLGPPGPPGLPGPQGPKGNKGSTGPAGQKGDSGLPGPPGSPGPPGEVIQPLPILSSKKTRRHTEGMQADADDNILDYSDGMEEIFGSLNSLKQDIEHMKFPMGTQTNPARTCKDLQLSHPDFPDGEYWIDPNQGCSGDSFKVYCNFTSGGETCIYPDKKSEGVRISSWPKEKPGSWFSEFKRGKLLSYLDVEGNSINMVQMTFLKLLTASARQNFTYHCHQSAAWYDVSSGSYDKALRFLGSNDEEMSYDNNPFIKTLYDGCASRKGYEKTVIEINTPKIDQVPIVDVMINDFGDQNQKFGFEVGPVCFLG

SEQ ID NO: 16366 - protein, 484 aa, Homo sapiens
MRHSKRTYCPDWDDKDWDYGKWRSSSSHKRRKRSHSSAQENKRCKYNHSKMCDSHYLESRSINEKDYHSRRYIDEYRNDYTQGCEPGHRQRDHESRYQNHSSKSSGRSGRSSYKSKHRIHHSTSHRRSHGKSHRRKRTRSVEDDEEGHLICQSGDVLSARYEIVDTLGEGAFGKVVECIDHKAGGRHVAVKIVKNVDRYCEAARSEIQVLEHLNTTDPNSTFRCVQMLEWFEHHGHICIVFELLGLSTYDFIKENGFLPFRLDHIRKMAYQICKSVNFLHSNKLTHTDLKPENILFVQSDYTEAYNPKIKRDERTLINPDIKVVDFGSATYDDEHHSTLVSTRHYRAPEVILALGWSQPCDVWSIGCILIEYYLGFTVFPTHDSKEHLAMMERILGPLPKHMIQKTRKRKYFHHDRLDWDEHSSAGRYVSRRCKPLKEFMLSQDVEHERLFDLIQKMLEYDPAKRITLREALKHPFFDLLKKSI

SEQ ID NO: 16367 - protein, 136 aa, Homo sapiens
MRHSKRTYCPDWDDKDWDYGKWRSSSSHKRRKRSHSSAQENKRCKYNHSKMCDSHYLESRSINEKDYHSRRYIDEYRNDYTQGCEPGHRQRDHESRYQNHSSKSSGRSGRSSYKSKHRIHHSTSHRRSHGMKLLIL

SEQ ID NO: 16368 - protein, 526 aa, Homo sapiens
MAAGRRPASALWPERRGSPLRGDLLGFQNVREPSSCGETLSGMRHSKRTYCPDWDDKDWDYGKWRSSSSHKRRKRSHSSAQENKRCKYNHSKMCDSHYLESRSINEKDYHSRRYIDEYRNDYTQGCEPGHRQRDHESRYQNHSSKSSGRSGRSSYKSKHRIHHSTSHRRSHGKSHRRKRTRSVEDDEEGHLICQSGDVLSARYEIVDTLGEGAFGKVVECIDHKAGGRHVAVKIVKNVDRYCEAARSEIQVLEHLNTTDPNSTFRCVQMLEWFEHHGHICIVFELLGLSTYDFIKENGFLPFRLDHIRKMAYQICKSVNFLHSNKLTHTDLKPENILFVQSDYTEAYNPKIKRDERTLINPDIKVVDFGSATYDDEHHSTLVSTRHYRAPEVILALGWSQPCDVWSIGCILIEYYLGFTVFPTHDSKEHLAMMERILGPLPKHMIQKTRKRKYFHHDRLDWDEHSSAGRYVSRRCKPLKEFMLSQDVEHERLFDLIQKMLEYDPAKRITLREALKHPFFDLLKKSI

SEQ ID NO: 16369 - protein, 229 aa, Homo sapiens
MQDEDGYITLNIKTRKPALISVGSASSSWWRVMALILLILCVGMVVGLVALGIWSVMQRNYLQGENENRTGTLQQLAKRFCQYVVKQSELKGTFKGHKCSPCDTNWRYYGDSCYGFFRHNLTWEESKQYCTDMNATLLKIDNRNIVEYIKARTHLIRWVGLSRQKSNEVWKWEDGSVISENMFEFLEDGKGNMNCAYFHNGKMHPTFCENKHYLMCERKAGMTKVDQLP

SEQ ID NO: 16370 - protein, 196 aa, Homo sapiens
MQDEDGYITLNIKTRKPALISAVMQRNYLQGENENRTGTLQQLAKRFCQYVVKQSELKGTFKGHKCSPCDTNWRYYGDSCYGFFRHNLTWEESKQYCTDMNATLLKIDNRNIVEYIKARTHLIRWVGLSRQKSNEVWKWEDGSVISENMFEFLEDGKGNMNCAYFHNGKMHPTFCENKHYLMCERKAGMTKVDQLP

SEQ ID NO: 16371 - protein, 241 aa, Homo sapiens
MHEEEIYTSLQWDSPAPDTYQKCLSSNKCSGACCLVMVISCVFCMGLLTASIFLGVKLLQVSTIAMQQQEKLIQQERALLNFTEWKRSCALQMKYCQAFMQNSLSSAHNSSPCPNNWIQNRESCYYVSEIWSIWHTSQENCLKEGSTLLQIESKEEMDFITGSLRKIKGSYDYWVGLSQDGHSGRWLWQDGSSPSPGLLPAERSQSANQVCGYVKSNSLLSSNCSTWKYFICEKYALRSSV

SEQ ID NO: 16372 - protein, 262 aa, Homo sapiens
MVFSLKVILFLSLLLSPVLKSSLVTLNNNGYDGIVIAINPSVPEDEKLIQNIKEMVTEASTHLFHATKQRAYFRNVSILIPMTYKSKSEYLIPKQETYDQADVIVADLYLKYGDDPYTLQYGQCGDKGQYIHFTPNFLLTNNLATYGPRGKVFVHGWAHLRWGVFDEYNVDQPFYISRRNTTEATRCSTRITVYMVLNECKGASCIARPFRRDSQTGLYEAKCTFIPKRSQTAKESIVFMQNLDSVTEFCTEKTHNKEAPNL

SEQ ID NO: 16373 - protein, 1034 aa, Homo sapiens
MALIMEPVSKWSPSQVVDWMKGLDDCLQQYIKNFEREKISGDQLLRITHQELEDLGVSRIGHQELILEAVDLLCALNYGLETENLKTLSHKLNASAKNLQNFITGRRRSGHYDGRTSRKLPNDFLTSVVDLIGAAKSLLAWLDRSPFAAVTDYSVTRNNVIQLCLELTTIVQQDCTVYETENKILHVCKTLSGVCDHIISLSSDPLVSQSAHLEVIQLANIKPSEGLGMYIKSTYDGLHVITGTTENSPADRCKKIHAGDEVIQVNHQTVVGWQLKNLVNALREDPSGVILTLKKRPQSMLTSAPALLKNMRWKPLALQPLIPRSPTSSVATPSSTISTPTKRDSSALQDLYIPPPPAEPYIPRDEKGNLPCEDLRGHMVGKPVHKGSESPNSFLDQEYRKRFNIVEEDTVLYCYEYEKGRSSSQGRRESTPTYGKLRPISMPVEYNWVGDYEDPNKMKRDSRRENSLLRYMSNEKIAQEEYMFQRNSKKDTGKKSKKKGDKSNSPTHYSLLPSLQMDALRQDIMGTPVPETTLYHTFQQSSLQHKSKKKNKGPIAGKSKRRISCKDLGRGDCEGWLWKKKDAKSYFSQKWKKYWFVLKDASLYWYINEEDEKAEGFISLPEFKIDRASECRKKYAFKACHPKIKSFYFAAEHLDDMNRWLNRINMLTAGYAERERIKQEQDYWSESDKEEADTPSTPKQDSPPPPYDTYPRPPSMSCASPYVEAKHSRLSSTETSQSQSSHEEFRQEVTGSSAVSPIRKTASQRRSWQDLIETPLTSSGLHYLQTLPLEDSVFSDSAAISPEHRRQSTLPTQKCHLQDHYGPYPLAESERMQVLNGNGGKPRSFTLPRDSGFNHCCLNAPVSACDPQDDVQPPEVEEEEEEEEEEGEAAGENIGEKSESREEKLGDSLQDLYRALEQASLSPLGEHRISTKMEYKLSFIKRCNDPVMNEKLHRLRILKSTLKAREGEVAIIDKVLDNPDLTSKEFQQWKQMYLDLFLDICQNTTSNDPLSISSEVDVITSSLAHTHSYIETHV

SEQ ID NO: 16374 - protein, 898 aa, Homo sapiens
MALIMEPVSKWSPSQVVDWMKGLDDCLQQYIKNFEREKISGDQLLRITHQELEDLGVSRIGHQELILEAVDLLCALNYGLETENLKTLSHKLNASAKNLQNFITGRRRSGHYDGRTSRKLPNDFLTSVVDLIGAAKSLLAWLDRSPFAAVTDYSVTRNNVIQLCLELTTIVQQDCTVYETENKILHVCKTLSGVCDHIISLSSDPLVSQSAHLEVIQLANIKPSEGLGMYIKSTYDGLHVITGTTENSPADRCKKIHAGDEVIQVNHQTVVGWQLKNLVNALREDPSGVILTLKKRPQSMLTSAPALLKNMRWKPLALQPLIPRSPTSSVATPSSTISTPTKRDSSALQDLYIPPPPAEPYIPRDEKGNLPCEDLRGHMVGKPVHKGSESPNSFLDQEYRKRFNIVEEDTVLYCYEYEKGRSSSQGRRESTPTYGKLRPISMPVEYNWVGDYEDPNKMKRDSRRENSLLRYMSNEKIAQEEYMFQRNSKKDTGKKSKKKGDKSNSPTHYSLLPSLQMDALRQDIMGTPVPETTLYHTFQQSSLQHKSKKKNKGPIAGKSKRRISCKDLGRGDCEGWLWKKKDAKSYFSQKWKKYWFVLKDASLYWYINEEDEKAEGFISLPEFKIDRASECRKKYAFKACHPKIKSFYFAAEHLDDMNRWLNRINMLTAGYAERERIKQEQDYWSESDKEEADTPSTPKQDSPPPPYDTYPRPPSMSCASPYVEAKHSRLSSTETSQSQSSHEEFRQEVTGSSAVSPIRKTASQRRSWQDLIETPLTSSGLHYLQTLPLEDSVFSDSAAISPEHRRQSTLPTQKCHLQDHYGPYPLAESERMQVLNGNGGKPRSFTLPRDSGFNHCCLNAPVSACDPQDDVQPPEVEEEEEEEEEEGEAAGENIGEKS

SEQ ID NO: 16375 - protein, 849 aa, Homo sapiens
MALIMEPVSKWSPSQVVDWMKGLDDCLQQYIKNFEREKISGDQLLRITHQELEDLGVSRIGHQELILEAVDLLCALNYGLETENLKTLSHKLNASAKNLQNFITGRRRSGHYDGRTSRKLPNDFLTSVVDLIGAAKSLLAWLDRSPFAAVTDYSVTRNNVIQLCLELTTIVQQDCTVYETENKILHVCKTLSGVCDHIISLSSDPLVSQSAHLEVIQLANIKPSEGLGMYIKSTYDGLHVITGTTENSPADRCKKIHAGDEVIQVNHQTVPLIPRSPTSSVATPSSTISTPTKRDSSALQDLYIPPPPAEPYIPRDEKGNLPCEDLRGHMVGKPVHKGSESPNSFLDQEYRKRFNIVEEDTVLYCYEYEKGRSSSQGRRESTPTYGKLRPISMPVEYNWVGDYEDPNKMKRDSRRENSLLRYMSNEKIAQEEYMFQRNSKKDTGKKSKKKGDKSNSPTHYSLLPSLQMDALRQDIMGTPVPETTLYHTFQQSSLQHKSKKKNKGPIAGKSKRRISCKDLGRGDCEGWLWKKKDAKSYFSQKWKKYWFVLKDASLYWYINEEDEKAEGFISLPEFKIDRASECRKKYAFKACHPKIKSFYFAAEHLDDMNRWLNRINMLTAGYAERERIKQEQDYWSESDKEEADTPSTPKQDSPPPPYDTYPRPPSMSCASPYVEAKHSRLSSTETSQSQSSHEEFRQEVTGSSAVSPIRKTASQRRSWQDLIETPLTSSGLHYLQTLPLEDSVFSDSAAISPEHRRQSTLPTQKCHLQDHYGPYPLAESERMQVLNGNGGKPRSFTLPRDSGFNHCCLNAPVSACDPQDDVQPPEVEEEEEEEEEEGEAAGENIGEKS

SEQ ID NO: 16376 - protein, 1004 aa, Homo sapiens
MALIMEPVSKWSPSQVVDWMKGLDDCLQQYIKNFEREKISGDQLLRITHQELEDLGVSRIGHQELILEAVDLLCALNYGLETENLKTLSHKLNASAKNLQNFITGRRRSGHYDGRTSRKLPNDFLTSVVDLIGAAKSLLAWLDRSPFAAVTDYSVTRNNVIQLCLELTTIVQQDCTVYETENKILHVCKTLSGVCDHIISLSSDPLVSQSAHLEVIQLANIKPSEGLGMYIKSTYDGLHVITGTTENSPADRCKKIHAGDEVIQVNHQTVVGWQLKNLVNALREDPSGVILTLKKRPQSMLTSAPALLKNMRWKPLALQPLIPRSPTSSVATPSSTISTPTKRDSSALQDLYIPPPPAEPYIPRDEKGNLPCEDLRGHMVGKPVHKGSESPNSFLDQEYRKRFNIVEEDTVLYCYEYEKGRSSSQGRRESTPTYENSLLRYMSNEKIAQEEYMFQRNSKKDTGKKSKKKGDKSNSPTHYSLLPSLQMDALRQDIMGTPVPETTLYHTFQQSSLQHKSKKKNKGPIAGKSKRRISCKDLGRGDCEGWLWKKKDAKSYFSQKWKKYWFVLKDASLYWYINEEDEKAEGFISLPEFKIDRASECRKKYAFKACHPKIKSFYFAAEHLDDMNRWLNRINMLTAGYAERERIKQEQDYWSESDKEEADTPSTPKQDSPPPPYDTYPRPPSMSCASPYVEAKHSRLSSTETSQSQSSHEEFRQEVTGSSAVSPIRKTASQRRSWQDLIETPLTSSGLHYLQTLPLEDSVFSDSAAISPEHRRQSTLPTQKCHLQDHYGPYPLAESERMQVLNGNGGKPRSFTLPRDSGFNHCCLNAPVSACDPQDDVQPPEVEEEEEEEEEEGEAAGENIGEKSESREEKLGDSLQDLYRALEQASLSPLGEHRISTKMEYKLSFIKRCNDPVMNEKLHRLRILKSTLKAREGEVAIIDKVLDNPDLTSKEFQQWKQMYLDLFLDICQNTTSNDPLSISSEVDVITSSLAHTHSYIETHV

SEQ ID NO: 16377 - protein, 914 aa, Homo sapiens
MGPFKSSVFILILHLLEGALSNSLIQLNNNGYEGIVVAIDPNVPEDETLIQQIKDMVTQASLYLLEATGKRFYFKNVAILIPETWKTKADYVRPKLETYKNADVLVAESTPPGNDEPYTEQMGNCGEKGERIHLTPDFIAGKKLAEYGPQGRAFVHEWAHLRWGVFDEYNNDEKFYLSNGRIQAVRCSAGITGTNVVKKCQGGSCYTKRCTFNKVTGLYEKGCEFVLQSRQTEKASIMFAQHVDSIVEFCTEQNHNKEAPNKQNQKCNLRSTWEVIRDSEDFKKTTPMTTQPPNPTFSLLQIGQRIVCLVLDKSGSMATGNRLNRLNQAGQLFLLQTVELGSWVGMVTFDSAAHVQNELIQINSGSDRDTLAKRLPAAASGGTSICSGLRSAFTVIRKKYPTDGSEIVLLTDGEDNTISGCFNEVKQSGAIIHTVALGPSAAQELEELSKMTGGLQTYASDQVQNNGLIDAFGALSSGNGAVSQRSIQLESKGLTLQNSQWMNGTVIVDSTVGKDTLFLITWTMQPPQILLWDPSGQKQGGFVVDKNTKMAYLQIPGIAKVGTWKYSLQASSQTLTLTVTSRASNATLPPITVTSKTNKDTSKFPSPLVVYANIRQGASPILRASVTALIESVNGKTVTLELLDNGAGADATKDDGVYSRYFTTYDTNGRYSVKVRALGGVNAARRRVIPQQSGALYIPGWIENDEIQWNPPRPEINKDDVQHKQVCFSRTSSGGSFVASDVPNAPIPDLFPPGQITDLKAEIHGGSLINLTWTAPGDDYDHGTAHKYIIRISTSILDLRDKFNESLQVNTTALIPKEANSEEVFLFKPENITFENGTDLFIAIQAVDKVDLKSEISNIARVSLFIPPQTPPETPSPDETSAPCPNIHINSTIPGIHILKIMWKWIGELQLSIA

SEQ ID NO: 16378 - protein, 473 aa, Homo sapiens
MPKLQGFEFWSRTLRGARHVVAPMVDQSELAWRLLSRRHGAQLCYTPMLHAQVFVRDANYRKENLYCEVCPEDRPLIVQFCANDPEVFVQAALLAQDYCDAIDLNLGCPQMIAKRGHYGAFLQDEWDLLQRMILLAHEKLSVPVTCKIRVFPEIDKTVRYAQMLEKAGCQLLTVHGRTKEQKGPLSGAASWEHIKAVRKAVAIPVFANGNIQCLQDVERCLRDTGVQGVMSAEGNLHNPALFEGRSPAVWELAEEYLDIVREHPCPLSYVRAHLFKLWHHTLQVHQELREELAKVKTLEGIAAVSQELKLRCQEEISRQEGAKPTGDLPFHWICQPYIRPGPREGSKEKAGARSKRALEEEEGGTEVLSKNKQKKQLRNPHKTFDPSLKPKYAKCDQCGNPKGNRCVFSLCRGCCKKRASKETADCPGHGLLFKTKLEKSLAWKEAQPELQEPQPAAPGTPGGFSEVMGSALA

SEQ ID NO: 16379 - protein, 555 aa, Homo sapiens
MEPVTKWSPKQVVDWTRGLDDCLQQYVHKFEREKINGEQLLQISHQDLEELGVTRIGHQELVLEAVDLLCALNYGLETDNMKNLVLKLRASSHNLQNYISSRRKSPAYDGNTSRKAPNEFLTSVVELIGAAKALLAWLDRAPFTGITDFSVTKNKIIQLCLDLTTTVQKDCFVAEMEDKVLTVVKVLNGICDKTIRSTTDPVMSQCACLEEVHLPNIKPGEGLGMYIKSTYDGLHVITGTTENSPADRSQKIHAGDEVIQVNQQTVVGWQLKNLVKKLRENPTGVVLLLKKRPTGSFNFTPAPLKNLRWKPPLVQTSPPPATTQSPESTMDTSLKKEKSAILDLYIPPPPAVPYSPRDENGSFVYGGSSKCKQPLPGPKGSESPNSFLDQESRRRRFTIADSDQLPGYSVETNILPTKMREKTPSYGKPRPLSMPADGNWMGIVDPFARPRGHGRKGEDALCRYFSNERIPPIIEESSSPPYRFSRPTTERHLVRGADYIRGSRCYINSDLHSSATIPFQEEGTKKKSGSSATKSSSTEPSLLVSWFTRLKLLTH

SEQ ID NO: 16380 - protein, 334 aa, Homo sapiens
MTENSDKVPIALVGPDDVEFCSPPAYATLTVKPSSPARLLKVGAVVLISGAVLLLFGAIGAFYFWKGSDSHIYNVHYTMSINGKLQDGSMEIDAGNNLETFKMGSGAEEAIAVNDFQNGITGIRFAGGEKCYIKAQVKARIPEVGAVTKQSISSKLEGKIMPVKYEENSLIWVAVDQPVKDNSFLSSKVLELCGDLPIFWLKPTYPKEIQRERREVVRKIVPTTTKRPHSGPRSNPGAGRLNNETRPSVQEDSQAFNPDNPYHQQEGESMTFDPRLDHEGICCIECRRSYTHCQKICEPLGGYYPWPYNYQGCRSACRVIMPCSWWVARILGMV

SEQ ID NO: 16381 - protein, 333 aa, Homo sapiens
MTENSDKVPIALVGPDDVEFCSPPAYATLTVKPSSPARLLKVGAVVLISGAVLLLFGAIGAFYFWKGSDSHIYNVHYTMSINGKLQDGSMEIDAGNNLETFKMGSGAEEAIAVNDFQNGITGIRFAGGEKCYIKAQVKARIPEVGAVTKQSISSKLEGKIMPVKYEENSLIWVAVDQPVKDNSFLSSKVLELCGDLPIFWLKPTYPKEIQRERREVVRKIVPTTTKRPHSGPRSNPGAGRLNNETRPSVQEDSQAFNPDNPYHQEGESMTFDPRLDHEGICCIECRRSYTHCQKICEPLGGYYPWPYNYQGCRSACRVIMPCSWWVARILGMV

SEQ ID NO: 16382 - protein, 846 aa, Homo sapiens
MLFTVSCSKMSSIVDRDDSSIFDGLVEEDDKDKAKRVSRNKSEKKRRDQFNVLIKELGSMLPGNARKMDKSTVLQKSIDFLRKHKEITAQSDASEIRQDWKPTFLSNEEFTQLMLEALDGFFLAIMTDGSIIYVSESVTSLLEHLPSDLVDQSIFNFIPEGEHSEVYKILSTHLLESDSLTPEYLKSKNQLEFCCHMLRGTIDPKEPSTYEYVKFIGNFKSLNSVSSSAHNGFEGTIQRTHRPSYEDRVCFVATVRLATPQFIKEMCTVEEPNEEFTSRHSLEWKFLFLDHRAPPIIGYLPFEVLGTSGYDYYHVDDLENLAKCHEHLMQYGKGKSCYYRFLTKGQQWIWLQTHYYITYHQWNSRPEFIVCTHTVVSYAEVRAERRRELGIEESLPETAADKSQDSGSDNRINTVSLKEALERFDHSPTPSASSRSSRKSSHTAVSDPSSTPTKIPTDTSTPPRQHLPAHEKMVQRRSSFSSQSINSQSVGSSLTQPVMSQATNLPIPQGMSQFQFSAQLGAMQHLKDQLEQRTRMIEANIHRQQEELRKIQEQLQMVHGQGLQMFLQQSNPGLNFGSVQLSSGNSSNIQQLAPINMQGQVVPTNQIQSGMNTGHIGTTQHMIQQQTLQSTSTQSQQNVLSGHSQQTSLPSQTQSTLTAPLYNTMVISQPAAGSMVQIPSSMPQNSTQSAAVTTFTQDRQIRFSQGQQLVTKLVTAPVACGAVMVPSTMLMGQVVTAYPTFATQQQQSQTLSVTQQQQQQSSQEQQLTSVQQPSQAQLTQPPQQFLQTSRLLHGNPSTQLILSAAFPLQQSTFPQSHHQQHQSQQQQQLSRHRTDSLPDPSKVQPQ

SEQ ID NO: 16383 - protein, 744 aa, Homo sapiens
MAADKPADQGAEKHEGTGQSSGITDQEKELSTNAFQAFTSGNYDACLQHLACLQDINKDDYKIILNTAVAEFFKSNQTTTDNLRQTLNQLKNQVHSAVEEMDGLDDVENSMLYYNQAVILYHLRQYTEAISVGEKLYQFIEPFEEKFAQAVCFLLVDLYILTYQAEKALHLLAVLEKMISQGNNNKNGKNETGNNNNKDGSNHKAESGALIEAAKSKIHQYKVRAYIQMKSLKACKREIKSVMNTAGNSAPSLFLKSNFEYLRGNYRKAVKLLNSSNIAEHPGFMKTGECLRCMFWNNLGCIHFAMSKHNLGIFYFKKALQENDNVCAQLSAGSTDPGKKFSGRPMCTLLTNKRYELLYNCGIQLLHIGRPLAAFECLIEAVQVYHANPRLWLRLAECCIAANKGTSEQETKGLPSKKGIVQSIVGQGYHRKIVLASQSIQNTVYNDGQSSAIPVASMEFAAICLRNALLLLPEEQQDPKQENGAKNSNQLGGNTESSESSETCSSKSHDGDKFIPAPPSSPLRKQELENLKCSILACSAYVALALGDNLMALNHADKLLQQPKLSGSLKFLGHLYAAEALISLDRISDAITHLNPENVTDVSLGISSNEQDQGSDKGENEAMESSGKRAPQCYPSSVNSARTVMLFNLGSAYCLRSEYDKARKCLHQAASMIHPKEVPPEAILLAVYLELQNGNTQLALQIIKRNQLLPAVKTHSEVRKKPVFQPVHPIQPIQMPAFTTVQRK

SEQ ID NO: 16384 - protein, 743 aa, Homo sapiens
MAADKPADQGAEKHEGTGQSSGITDQEKELSTNAFQAFTSGNYDACLQHLACLQDINKDDYKIILNTAVAEFFKSNQTTTDNLRQTLNQLKNQVHSAVEEMDGLDDVENSMLYYNQAVILYHLRQYTEAISVGEKLYQFIEPFEKFAQAVCFLLVDLYILTYQAEKALHLLAVLEKMISQGNNNKNGKNETGNNNNKDGSNHKAESGALIEAAKSKIHQYKVRAYIQMKSLKACKREIKSVMNTAGNSAPSLFLKSNFEYLRGNYRKAVKLLNSSNIAEHPGFMKTGECLRCMFWNNLGCIHFAMSKHNLGIFYFKKALQENDNVCAQLSAGSTDPGKKFSGRPMCTLLTNKRYELLYNCGIQLLHIGRPLAAFECLIEAVQVYHANPRLWLRLAECCIAANKGTSEQETKGLPSKKGIVQSIVGQGYHRKIVLASQSIQNTVYNDGQSSAIPVASMEFAAICLRNALLLLPEEQQDPKQENGAKNSNQLGGNTESSESSETCSSKSHDGDKFIPAPPSSPLRKQELENLKCSILACSAYVALALGDNLMALNHADKLLQQPKLSGSLKFLGHLYAAEALISLDRISDAITHLNPENVTDVSLGISSNEQDQGSDKGENEAMESSGKRAPQCYPSSVNSARTVMLFNLGSAYCLRSEYDKARKCLHQAASMIHPKEVPPEAILLAVYLELQNGNTQLALQIIKRNQLLPAVKTHSEVRKKPVFQPVHPIQPIQMPAFTTVQRK

SEQ ID NO: 16385 - protein, 717 aa, Homo sapiens
MAADKPADQGAEKHEGTGQSSGITDQEKELSTNAFQAFTSGNYDACLQHLACLQDINKDDYKIILNTAVAEFFKSNQTTTDNLRQTLNQLKNQVHSAVEEMDGLDDVENSMLYYNQAVILYHLRQYTEAISVGEKLYQFIEPFEEKFAQAVCFLLVDLYILTYQAEKALHLLAVLEKMISQGNNNKNGKNETGNNNNKDGSNHKAESGALIEAAKSKIHQYKVRAYIQMKSLKACKREIKSVMNTAGNSAPSLFLKSNFEYLRGNYRKAVKLLNSSNIAEHPGFMKTGECLRCMFWNNLGCIHFAMSKHNLGIFYFKKALQENDNVCAQLSAGSTDPGKKFSGRPMCTLLTNKRYELLYNCGIQLLHIGRPLAAFECLIEAVQVYHANPRLWLRLAECCIAANKGTSEQETKGLPSKKGIVQSIVGQGYHRKIVLASQSIQNTVYNDGQSSAIPVASMEFAAICLRNALLLLPEEQQDPKQENGAKNSNQLGGNTESSESSETCRCSILACSAYVALALGDNLMALNHADKLLQQPKLSGSLKFLGHLYAAEALISLDRISDAITHLNPENVTDVSLGISSNEQDQGSDKGENEAMESSGKRAPQCYPSSVNSARTVMLFNLGSAYCLRSEYDKARKCLHQAASMIHPKEVPPEAILLAVYLELQNGNTQLALQIIKRNQLLPAVKTHSEVRKKPVFQPVHPIQPIQMPAFTTVQRK

SEQ ID NO: 16386 - protein, 695 aa, Homo sapiens
MAADKPADQGAEKHEGTGQSSGITDQEKELSTNAFQAFTSGNYDACLQHLACLQDINKDDYKIILNTAVAEFFKSNQTTTDNLRQTLNQLKNQVHSAVEEMDGLDDVENSMLYYNQAVILYHLRQYTEAISVGEKLYQFIEPFEEKFAQAVCFLLVDLYILTYQAEKALHLLAVLEKMISQGNNNKNGKNETGNNNNKDGSNHKAESGALIEAAKSKIHQYKVRAYIQMKSLKACKREIKSVMNTAGNSAPSLFLKSNFEYLRGNYRKAVKLLNSSNIAEHPGFMKTGECLRCMFWNNLGCIHFAMSKHNLGIFYFKKALQENDNVCAQLSAGSTDPGKKFSGRPMCTLLTNKRYELLYNCGIQLLHIGRPLAAFECLIEAVQVYHANPRLWLRLAECCIAANKGTSEQETKGLPSKKGIVQSIVGQGYHRKIVLASQSIQNTVYNDGQSSAIPVASMEFAAICLRNALLLLPEEQQDPKQENGAKNSNQLGGNTESSESSETCRCSILACSAYVALALGDNLMALNHAEALISLDRISDAITHLNPENVTDVSLGISSNEQDQGSDKGENEAMESSGKRAPQCYPSSVNSARTVMLFNLGSAYCLRSEYDKARKCLHQAASMIHPKEVPPEAILLAVYLELQNGNTQLALQIIKRNQLLPAVKTHSEVRKKPVFQPVHPIQPIQMPAFTTVQRK

SEQ ID NO: 16387 - protein, 451 aa, Homo sapiens
MFWNNLGCIHFAMSKHNLGIFYFKKALQENDNVCAQLSAGSTDPGKKFSGRPMCTLLTNKRYELLYNCGIQLLHIGRPLAAFECLIEAVQVYHANPRLWLRLAECCIAANKGTSEQETKGLPSKKGIVQSIVGQGYHRKIVLASQSIQNTVYNDGQSSAIPVASMEFAAICLRNALLLLPEEQQDPKQENGAKNSNQLGGNTESSESSETCSSKSHDGDKFIPAPPSSPLRKQELENLKCSILACSAYVALALGDNLMALNHADKLLQQPKLSGSLKFLGHLYAAEALISLDRISDAITHLNPENVTDVSLGISSNEQDQGSDKGENEAMESSGKRAPQCYPSSVNSARTVMLFNLGSAYCLRSEYDKARKCLHQAASMIHPKEVPPEAILLAVYLELQNGNTQLALQIIKRNQLLPAVKTHSEVRKKPVFQPVHPIQPIQMPAFTTVQRK

SEQ ID NO: 16388 - protein, 804 aa, Homo sapiens
MKSIGVKTVKVCGSKSSVRIEGQPCSLGQSRRKVKLMGERSYTLSIGNGDYFWANKEMLWDYVQTLSDQGAEKHEGTGQSSGITDQEKELSTNAFQAFTSGNYDACLQHLACLQDINKDDYKIILNTAVAEFFKSNQTTTDNLRQTLNQLKNQVHSAVEEMDGLDDVENSMLYYNQAVILYHLRQYTEAISVGEKLYQFIEPFEEKFAQAVCFLLVDLYILTYQAEKALHLLAVLEKMISQGNNNKNGKNETGNNNNKDGSNHKAESGALIEAAKSKIHQYKVRAYIQMKSLKACKREIKSVMNTAGNSAPSLFLKSNFEYLRGNYRKAVKLLNSSNIAEHPGFMKTGECLRCMFWNNLGCIHFAMSKHNLGIFYFKKALQENDNVCAQLSAGSTDPGKKFSGRPMCTLLTNKRYELLYNCGIQLLHIGRPLAAFECLIEAVQVYHANPRLWLRLAECCIAANKGTSEQETKGLPSKKGIVQSIVGQGYHRKIVLASQSIQNTVYNDGQSSAIPVASMEFAAICLRNALLLLPEEQQDPKQENGAKNSNQLGGNTESSESSETCSSKSHDGDKFIPAPPSSPLRKQELENLKCSILACSAYVALALGDNLMALNHADKLLQQPKLSGSLKFLGHLYAAEALISLDRISDAITHLNPENVTDVSLGISSNEQDQGSDKGENEAMESSGKRAPQCYPSSVNSARTVMLFNLGSAYCLRSEYDKARKCLHQAASMIHPKEVPPEAILLAVYLELQNGNTQLALQIIKRNQLLPAVKTHSEVRKKPVFQPVHPIQPIQMPAFTTVQRK

SEQ ID NO: 16389 - protein, 557 aa, Homo sapiens
MPKEKYEPPDPRRMYTIMSSEEAANGKKSHWAELEISGKVRSLSASLWSLTHLTALHLSDNSLSRIPSDIAKLHNLVYLDLSSNKIRSLPAELGNMVSLRELHLNNNLLRVLPFELGKLFQLQTLGLKGNPLTQDILNLYQEPDGTRRLLNYLLDNLSGTAKRITTEQPPPRSWIMLQEPDRTRPTALFSVMCYNVLCDKYATRQLYGYCPSWALNWDYRKKAIIQEILSCNADIVSLQEVETEQYYSFFLVELKERGYNGFFSPKSRARTMSEQERKHVDGCAIFFKTEKFTLVQKHTVEFNQLAMANSEGSEAMLNRVMTKDNIGVAVLLELRKESIEMPSGKPHLGTEKQLILVANAHMHWDPEYSDVKLVQTMMFLSEVKNIIDKASRNLKSSVLGEFGTIPLVLCADLNSLPDSGVVEYLSTGGVETNHKDFKELRYNESLTNFSCHGKNGTTNGRITHGFKLQSAYESGLMPYTNYTFDFKGIIDYIFYSKPQLNTLGILGPLDHHWLVENNISGCPHPLIPSDHFSLFAQLELLLPFLPQVNGIHLPGRR

SEQ ID NO: 16390 - protein, 190 aa, Homo sapiens
MALRGHPEPQPTNTPLSATVGGPISLFTQPRCHSAARDLVWSQAWPDPDVLEISMQTPGGSSCRKEAVLPRLRVTRPLVPEPAILPVCAARLAGSLATDLSRSHSLLPPWVDLKEPPPPSAPSLLLEDPGQGGCHGAQSCVGTCELANGARGFCPEMGQNESLSEERKGHESKRKSGGRGSPSSHPTQAS

SEQ ID NO: 16391 - protein, 79 aa, Homo sapiens [sequence omitted]

SEQ ID NO: 16392 - protein, 79 aa, Homo sapiens
MAHKQIYYSDKYFDEHYEYRHVMLPRELSKQVPKTHLMSEEEWRRLGVQQSLGWVHYMIHEPEPHILLFRRPLPKDQQK

SEQ ID NO: 16393 - protein, 775 aa, Homo sapiens
MRASLLLSVLRPAGPVAVGISLGFTLSLLSVTWVEEPCGPGPPQPGDSELPPRGNTNAARRPNSVQPGAEREKPGAGEGAGENWEPRVLPYHPAQPGQAAKKAVRTRYISTELGIRQRLLVAVLTSQTTLPTLGVAVNRTLGHRLERVVFLTGARGRRAPPGMAVVTLGEERPIGHLHLALRHLLEQHGDDFDWFFLVPDTTYTEAHGLARLTGHLSLASAAHLYLGRPQDFIGGEPTPGRYCHGGFGVLLSRMLLQQLRPHLEGCRNDIVSARPDEWLGRCILDATGVGCTGDHEGVHYSHLELSPGEPVQEGDPHFRSALTAHPVRDPVHMYQLHKAFARAELERTYQEIQELQWEIQNTSHLAVDGDQAAAWPVGIPAPSRPASRFEVLRWDYFTEQHAFSCADGSPRCPLRGADRADVADVLGTALEELNRRYHPALRLQKQQLVNGYRRFDPARGMEYTLDLQLEALTPQGGRRPLTRRVQLLRPLSRVEILPVPYVTEASRLTVLLPLAAAERDLAPGFLEAFATAALEPGDAAAALTLLLLYEPRQAQRVAHADVFAPVKAHVAELERRFPGARVPWLSVQTAAPSPLRLMDLLSKKHPLDTLFLLAGPDTVLTPDFLNRCRMHAISGWQAFFPMHFQAFHPAVAPPQGPGPPELGRDTGRFDRQAASEACFYNSDYVAARGRLAAASEQEEELLESLDVYELFLHFSSLHVLRAVEPALLQRYRAQTCSARLSEDLYHRCLQSVLEGLGSRTQLAMLLFEQEQGNST

SEQ ID NO: 16394 - protein, 315 aa, Homo sapiens
MEYTLDLQLEALTPQGGRRPLTRRVQLLRPLSRVEILPVPYVTEASRLTVLLPLAAAERDLAPGFLEAFATAALEPGDAAAALTLLLLYEPRQAQRVAHADVFAPVKAHVAELERRFPGARVPWLSVQTAAPSPLRLMDLLSKKHPLDTLFLLAGPDTVLTPDFLNRCRMHAISGWQAFFPMHFQAFHPAVAPPQGPGPPELGRDTGRFDRQAASEACFYNSDYVAARGRLAAASEQEEELLESLDVYELFLHFSSLHVLRAVEPALLQRYRAQTCSARLSEDLYHRCLQSVLEGLGSRTQLAMLLFEQEQGNST

SEQ ID NO: 16395 - protein, 613 aa, Homo sapiens
MAVVTLGEERPIGHLHLALRHLLEQHGDDFDWFFLVPDTTYTEAHGLARLTGHLSLASAAHLYLGRPQDFIGGEPTPGRYCHGGFGVLLSRMLLQQLRPHLEGCRNDIVSARPDEWLGRCILDATGVGCTGDHEGVHYSHLELSPGEPVQEGDPHFRSALTAHPVRDPVHMYQLHKAFARAELERTYQEIQELQWEIQNTSHLAVDGDQAAAWPVGIPAPSRPASRFEVLRWDYFTEQHAFSCADGSPRCPLRGADRADVADVLGTALEELNRRYHPALRLQKQQLVNGYRRFDPARGMEYTLDLQLEALTPQGGRRPLTRRVQLLRPLSRVEILPVPYVTEASRLTVLLPLAAAERDLAPGFLEAFATAALEPGDAAAALTLLLLYEPRQAQRVAHADVFAPVKAHVAELERRFPGARVPWLSVQTAAPSPLRLMDLLSKKHPLDTLFLLAGPDTVLTPDFLNRCRMHAISGWQAFFPMHFQAFHPAVAPPQGPGPPELGRDTGRFDRQAASEACFYNSDYVAARGRLAAASEQEEELLESLDVYELFLHFSSLHVLRAVEPALLQRYRAQTCSARLSEDLYHRCLQSVLEGLGSRTQLAMLLFEQEQGNST

SEQ ID NO: 16396 - protein, 138 aa, Homo sapiens
MERFLNSKARRLGSCSHPAFYLLCVPDEDTSCSTIYLPLKRRADPDQLFSDLLGGTQRLWSNRFGNEESFPGRVRALVDTFCWIARAPPLGNPLRLEERIAWRIQRLKSGQTALIEKKKQKIEEDVRHQCQQTTCDRC

SEQ ID NO: 16397 - protein, 395 aa, Homo sapiens
MWLPRVSSTAVTALLLAQTFLLLFLVSRPGPSSPAGGEARVHVLVLSSWRSGSSFVGQLFNQHPDVFYLMEPAWHVWTTLSQGSAATLHMAVRDLVRSVFLCDMDVFDAYLPWRRNLSDLFQWAVSRALCSPPACSAFPRGAISSEAVCKPLCARQSFTLAREACRSYSHVVLKEVRFFNLQVLYPLLSDPALNLRIVHLVRDPRAVLRSREQTAKALARDNGIVLGTNGTWVEADPGLRVVREVCRSHVRIAEAATLKPPPFLRGRYRLVRFEDLAREPLAEIRALYAFTGLSLTPQLEAWIHNITHGSGPGARREAFKTSSRNALNVSQAWRHALPFAKIRRVQELCAGALQLLGYRPVYSEDEQRNLALDLVLPRGLNGFTWASSTASHPRN

SEQ ID NO: 16398 - protein, 552 aa, Homo sapiens
MKKNRERFCNREREFVYKFKVGSQCLELRVPLKFPVQENASHLHGRLMLLHSLPCFIEKDLKEALTQFIEEESLSDYDRDAEASLAAVKSGEVDLHQLASTWAKAYAETTLEHARPEEPSWDEDFADVYHDLIHSPASETLLNLEHNYFVSISELIGERDVELKKLRERQGIEMEKVMQELGKSLTDQDVNSLAAQHFESQQDLENKWSNELKQSTAIQKQEYQEWVIKLHQDLKNPNNSSLSEEIKVQPSQFRESVEAIGRIYEEQRKLEESFTIHLGAQLKTMHNLRLLRADMLDFCKHKRNHRSGVKLHRLQTALSLYSTSLCGLVLLVDNRINSYSGIKRDFATVCQECTDFHFPRIEEQLEVVQQVVLYARTQRRSKLKESLDSGNQNGGNDDKTKNAERNYLNVLPGEFYITRHSNLSEIHVAFHLCVDDHVKSGNITARDPAIMGLRNILKVCCTHDITTISIPLLLVHDMSEEMTIPWCLRRAELVFKCVKGFMMEMASWDGGISRTVQFLVPQSISEEMFYQLSNMLPQIFRVSSTLTLTSKH

SEQ ID NO: 16399 - protein, 414 aa, Homo sapiens
MTKARLFRLWLVLGSVFMILLIIVYWDSAGAAHFYLHTSFSRPHTGPPLPTPGPDRDRELTADSDVDEFLDKFLSAGVKQSDLPRKETEQPPAPGSMEESVRGYDWSPRDARRSPDQGRQQAERRSVLRGFCANSSLAFPTKERAFDDIPNSELSHLIVDDRHGAIYCYVPKVACTNWKRVMIVLSGSLLHRGAPYRDPLRIPREHVHNASAHLTFNKFWRRYGKLSRHLMKVKLKKYTKFLFVRDPFVRLISAFRSKFELENEEFYRKFAVPMLRLYANHTSLPASAREAFRAGLKVSFANFIQYLLDPHTEKLAPFNEHWRQVYRLCHPCQIDYDFVGKLETLDEDAAQLLQLLQVDRQLRFPPSYRNRTASSWEEDWFAKIPLAWRQQLYKLYEADFVLFGYPKPENLLRD

SEQ ID NO: 16400 - protein, 127 aa, Homo sapiens
MAQHPCQDQEQKVEMTSKQQRSTSIEETMRPQEKQVTITETLWDQVLTVFKDIQKELQEDARIRGMSNCSMTPMTSAPRTGSIRPPDSLMTPKLRRLQFSSGEQPSGGRIHNLKTQLFSQSAYYPGP

SEQ ID NO: 16401 - protein, 101 aa, Homo sapiens
MAQHPCQDQEQKVEMTSKQQRSTSIEETMRPQEKQVTITETLWDQVLTVFKDIQKESTTDLSVQAAKARRCLTVPLRKCDNTNRKLYLLELVSARILYVVA

SEQ ID NO: 16402 - protein, 376 aa, Homo sapiens
MFPRPLTPLAAPNGAEPLGRALRRAPLGRARAGLGGPPLLLPSMLMFAVIVASSGLLLMIERGILAEMKPLPLHPPGREGTAWRGKAPKPGGLSLRAGDADLQVRQDVRNRTLRAVCGQPGMPRDPWDLPVGQRRTLLRHILVSDRYRFLYCYVPKVACSNWKRVMKVLAGVLDSVDVRLKMDHRSDLVFLADLRPEEIRYRLQHYFKFLFVREPLERLLSAYRNKFGEIREYQQRYGAEIVRRYRAGAGPSPAGDDVTFPEFLRYLVDEDPERMNEHWMPVYHLCQPCAVHYDFVGSYERLEADANQVLEWVRAPPHVRFPARQAWYRPASPESLHYHLCSAPRALLQDVLPKYILDFSLFAYPLPNVTKEACQQ

SEQ ID NO: 16403 - protein, 1640 aa, Homo sapiens
MAQILPVRFQEHFQLQNLGINPANIGFSTLTMESDKFICIREKVGEQAQVTIIDMSDPMAPIRRPISAESAIMNPASKVIALKAGKTLQIFNIEMKSKMKAHTMAEEVIFWKWVSVNTVALVTETAVYHWSMEGDSQPMKMFDRHTSLVGCQVIHYRTDEYQKWLLLVGISAQQNRVVGAMQLYSVDRKVSQPIEGHAAAFAEFKMEGNAKPATLFCFAVRNPTGGKLHIIEVGQPAAGNQPFVKKAVDVFFPPEAQNDFPVAMQIGAKHGVIYLITKYGYLHLYDLESGVCICMNRISADTIFVTAPHKPTSGIIGVNKKGQVLSVCVEEDNIVNYATNVLQNPDLGLRLAVRSNLAGAEKLFVRKFNTLFAQGSYAEAAKVAASAPKGILRTRETVQKFQSIPAQSGQASPLLQYFGILLDQGQLNKLESLELCHLVLQQGRKQLLEKWLKEDKLECSEELGDLVKTTDPMLALSVYLRANVPSKVIQCFAETGQFQKIVLYAKKVGYTPDWIFLLRGVMKISPEQGLQFSRMLVQDEEPLANISQIVDIFMENSLIQQCTSFLLDALKNNRPAEGLLQTWLLEMNLVHAPQVADAILGNKMFTHYDRAHIAQLCEKAGLLQQALEHYTDLYDIKRAVVHTHLLNPEWLVNFFGSLSVEDSVECLHAMLSANIRQNLQLCVQVASKYHEQLGTQALVELFESFKSYKGLFYFLGSIVNFSQDPDVHLKYIQAACKTGQIKEVERICRESSCYNPERVKNFLKEAKLTDQLPLIIVCDRFGFVHDLVLYLYRNNLQRYIEIYVQKVNPSRTPAVIGGLLDVDCSEEVIKHLIMAVRGQFSTDELVAEVEKRNRLKLLLPWLESQIQEGCEEPATHNALAKIYIDSNNSPECFLRENAYYDSSVVGRYCEKRDPHLACVAYERGQCDLELIKVCNENSLFKSEARYLVCRKDPELWAHVLEETNPSRRQLIDQVVQTALSETRDPEEISVTVKAFMTADLPNELIELLEKIVLDNSVFSEHRNLQNLLILTAIKADRTRVMEYISRLDNYDALDIASIAVSSALYEEAFTVFHKFDMNASAIQVLIEHIGNLDRAYEFAERCNEPAVWSQLAQAQLQKDLVKEAINSYIRGDDPSSYLEVVQSASRSNNWEDLVKFLQMARKKGRESYIETELIFALAKTSRVSELEDFINGPNNAHIQQVGDRCYEEGMYEAAKLLYSNVSNFARLASTLVHLGEYQAAVDNSRKASSTRTWKEVCFACMDGQEFRFAQLCGLHIVIHADELEELMCYYQDRGYFEELILLLEAALGLERAHMGMFTELAILYSKFKPQKMLEHLELFWSRVNIPKVLRAAEQAHLWAELVFLYDKYEEYDNAVLTMMSHPTEAWKEGQFKDIITKVANVELCYRALQFYLDYKPLLINDLLLVLSPRLDHTWTVSFFSKAGQLPLVKPYLRSVQSHNNKSVNEALNHLLTEEEDYQGLRASIDAYDNFDNISLAQQLEKHQLMEFRCIAAYLYKGNNWWAQSVELCKKDHLYKDAMQHAAESRDAELAQKLLQWFLEEGKRECFAACLFTCYDLLRPDMVLELAWRHNLVDLAMPYFIQVMREYLSKVDKLDALESLRKQEEHVTEPAPLVFDFDGHE

SEQ ID NO: 16404 - protein, 1583 aa, Homo sapiens
MAQILPVRFQEHFQLQNLGINPANIGFSTLTMESDKFICIREKVGEQAQVTIIDMSDPMAPIRRPISAESAIMNPASKVIALKAGKTLQIFNIEMKSKMKAHTMAEEVIFWKWVSVNTVALVTETAVYHWSMEGDSQPMKMFDRHTSLVGCQVIHYRTDEYQKWLLLVGISAQQNRVVGAMQLYSVDRKVSQPIEGHAAAFAEFKMEGNAKPATLFCFAVRNPTGGKLHIIEVGQPAAGNQPFVKKAVDVFFPPEAQNDFPVAMQIGAKHGVIYLITKYGYLHLYDLESGVCICMNRISADTIFVTAPHKPTSGIIGVNKKGQVLSVCVEEDNIVNYATNVLQNPDLGLRLAVRSNLAGAEKLFVRKFNTLFAQGSYAEAAKVAASAPKGILRTRETVQKFQSIPAQSGQASPLLQYFGILLDQGQLNKLESLELCHLVLQQGRKQLLEKWLKEDKLECSEELGDLVKTTDPMLALSVYLRANVPSKVIQCFAETGQFQKIVLYAKKVGYTPDWIFLLRGVMKISPEQGLQFSRMLVQDEEPLANISQIVDIFMENSLIQQCTSFLLDALKNNRPAEGLLQTWLLEMNLVHAPQVADAILGNKMFTHYDRAHIAQLCEKAGLLQQALEHYTDLYDIKRAVVHTHLLNPEWLVNFFGSLSVEDSVECLHAMLSANIRQNLQLCVQVASKYHEQLGTQALVELFESFKSYKGLFYFLGSIVNFSQDPDVHLKYIQAACKTGQIKEVERICRESSCYNPERVKNFLKEAKLTDQLPLIIVCDRFGFVHDLVLYLYRNNLQRYIEIYVQKVNPSRTPAVIGGLLDVDCSEEVIKHLIMAVRGQFSTDELVAEVEKRNRLKLLLPWLESQIQEGCEEPATHNALAKIYIDSNNSPECFLRENAYYDSSVVGRYCEKRDPHLACVAYERGQCDLELIKVCNENSLFKSEARYLVCRKDPELWAHVLEETNPSRRQLIDQVVQTALSETRDPEEISVTVKAFMTADLPNELIELLEKIVLDNSVFSEHRNLQNLLILTAIKADRTRVMEYISRLDNYDALDIASIAVSSALYEEAFTVFHKFDMNASAIQVLIEHIGNLDRAYEFAERCNEPAVWSQLAQAQLQKDLVKEAINSYIRGDDPSSYLEVVQSASRSNNWEDLVKFLQMARKKGRESYIETELIFALAKTSRVSELEDFINGPNNAHIQQVGDRCYEEGMYEAAKLLYSNVSNFARLASTLVHLGEYQAAVDNSRKASSTRTWKEVCFACMDGQEFRFAQLCGLHIVIHADELEELMCYYQDRGYFEELILLLEAALGLERAHMGMFTELAILYSKFKPQKMLEHLELFWSRVNIPKVLRAAEQAHLWAELVFLYDKYEEYDNAVLTMMSHPTEAWKEGQFKDIITKVANVELCYRALQFYLDYKPLLINDLLLVLSPRLDHTWTVSFFSKAGQLPLVKPYLRSVQSHNNKSVNEALNHLLTEEEDYQDAMQHAAESRDAELAQKLLQWFLEEGKRECFAACLFTCYDLLRPDMVLELAWRHNLVDLAMPYFIQVMREYLSKVDKLDALESLRKQEEHVTEPAPLVFDFDGHE

SEQ ID NO: 16405 - protein, 1670 aa, Homo sapiens
MSARTAPRPQVLLLPLLLVLLAAAPAASKGCVCKDKGQCFCDGAKGEKGEKGFPGPPGSPGQKGFTGPEGLPGPQGPKGFPGLPGLTGSKGVRGISGLPGFSGSPGLPGTPGNTGPYGLVGVPGCSGSKGEQGFPGLPGTLGYPGIPGAAGLKGQKGAPAKEEDIELDAKGDPGLPGAPGPQGLPGPPGFPGPVGPPGPPGFFGFPGAMGPRGPKGHMGERVIGHKGERGVKGLTGPPGPPGTVIVTLTGPDNRTDLKGEKGDKGAMGEPGPPGPSGLPGESYGSEKGAPGDPGLQGKPGKDGVPGFPGSEGVKGNRGFPGLMGEDGIKGQKGDIGPPGFRGPTEYYDTYQEKGDEGTPGPPGPRGARGPQGPSGPPGVPGSPGSSRPGLRGAPGWPGLKGSKGERGRPGKDAMGTPGSPGCAGSPGLPGSPGPPGPPGDIVFRKGPPGDHGLPGYLGSPGIPGVDGPKGEPGLLCTQCPYIPGPPGLPGLPGLHGVKGIPGRQGAAGLKGSPGSPGNTGLPGFPGFPGAQGDPGLKGEKGETLQPEGQVGVPGDPGLRGQPGRKGLDGIPGTPGVKGLPGPKGELALSGEKGDQGPPGDPGSPGSPGPAGPAGPPGYGPQGEPGLQGTQGVPGAPGPPGEAGPRGELSVSTPVPGPPGPPGPPGHPGPQGPPGIPGSLGKCGDPGLPGPDGEPGIPGIGFPGPPGPKGDQGFPGTKGSLGCPGKMGEPGLPGKPGLPGAKGEPAVAMPGGPGTPGFPGERGNSGEHGEIGLPGLPGLPGTPGNEGLDGPRGDPGQPGPPGEQGPPGRCIEGPRGAQGLPGLNGLKGQQGRRGKTGPKGDPGIPGLDRSGFPGETGSPGIPGHQGEMGPLGQRGYPGNPGILGPPGEDGVIGMMGFPGAIGPPGPPGNPGTPGQRGSPGIPGVKGQRGTPGAKGEQGDKGNPGPSEISHVIGDKGEPGLKGFAGNPGEKGNRGVPGMPGLKGLKGLPGPAGPPGPRGDLGSTGNPGEPGLRGIPGSMGNMGMPGSKGKRGTLGFPGRAGRPGLPGIHGLQGDKGEPGYSEGTRPGPPGPTGDPGLPGDMGKKGEMGQPGPPGHLGPAGPEGAPGSPGSPGLPGKPGPHGDLGFKGIKGLLGPPGIRGPPGLPGFPGSPGPMGIRGDQGRDGIPGPAGEKGETGLLRAPPGPRGNPGAQGAKGDRGAPGFPGLPGRKGAMGDAGPRGPTGIEGFPGPPGLPGAIIPGQTGNRGPPGSRGSPGAPGPPGPPGSHVIGIKGDKGSMGHPGPKGPPGTAGDMGPPGRLGAPGTPGLPGPRGDPGFQGFPGVKGEKGNPGFLGSIGPPGPIGPKGPPGVRGDPGTLKIISLPGSPGPPGTPGEPGMQGEPGPPGPPGNLGPCGPRGKPGKDGKPGTPGPAGEKGNKGSKGEPGPAGSDGLPGLKGKRGDSGSPATWTTRGFVFTRHSQTTAIPSCPEGTVPLYSGFSFLFVQGNQRAHGQDLGTLGSCLQRFTTMPFLFCNVNDVCNFASRNDYSYWLSTPALMPMNMAPITGRALEPYISRCTVCEGPAIAIAVHSQTTDIPPCPHGWISLWKGFSFIMFTSAGSEGTGQALASPGSCLEEFRASPFLECHGRGTCNYYSNSYSFWLASLNPERMFRKPIPSTVKAGELEKIISRCQVCMKKRH

SEQ ID NO: 16406 - protein, 1637 aa, Homo sapiens
MSARTAPRPQVLLLPLLLVLLAAAPAASKGCVCKDKGQCFCDGAKGEKGEKGFPGPPGSPGQKGFTGPEGLPGPQGPKGFPGLPGLTGSKGVRGISGLPGFSGSPGLPGTPGNTGPYGLVGVPGCSGSKGEQGFPGLPGTLGYPGIPGAAGLKGQKGAPAKEEDIELDAKGDPGLPGAPGPQGLPGPPGFPGPVGPPGPPGFFGFPGAMGPRGPKGHMGERVIGHKGERGVKGLTGPPGPPGTVIVTLTGPDNRTDLKGEKGDKGAMGEPGPPGPSGLPGESYGSEKGAPGDPGLQGKPGKDGVPGFPGSEGVKGNRGFPGLMGEDGIKGQKGDIGPPGFRGPTEYYDTYQEKGDEGTPGPPGPRGARGPQGPSGPPGVPGSPGSSRPGLRGAPGWPGLKGSKGERGRPGKDAMGTPGSPGCAGSPGLPGSPGPPGPPGDIVFRKGPPGDHGLPGYLGSPGIPGVDGPKGEPGLLCTQCPYIPGPPGLPGLPGLHGVKGIPGRQGAAGLKGSPGSPGNTGLPGFPGFPGAQGDPGLKGEKGETLQPEGQVGVPGDPGLRGQPGRKGLDGIPGTPGVKGLPGPKGELALSGEKGDQGPPGDPGSPGSPGPAGPAGPPGYGPQGEPGLQGTQGVPGAPGPPGEAGPRGELSVSTPVPGPPGPPGPPGHPGPQGPPGIPGSLGKCGDPGLPGPDGEPGIPGIGFPGPPGPKGDQGFPGTKGSLGCPGKMGEPGLPGKPGLPGAKGEPAVAMPGGPGTPGFPGERGNSGEHGEIGLPGLPGLPGTPGNEGLDGPRGDPGQPGPPGEQGPPGRCIEGPRGAQGLPGLNGLKGQQGRRGKTGPKGDPGIPGLDRSGFPGETGSPGIPGHQGEMGPLGQRGYPGNPGILGPPGEDGVIGMMGFPGAIGPPGPPGNPGTPGQRGSPGIPGVKGQRGTPGAKGEQGDKGNPGPSEISHVIGDKGEPGLKGFAGNPGEKGNRGVPGMPGLKGLKGLPGPAGPPGPRGDLGSTGNPGEPGLRGIPGSMGNMGMPGSKGKRGTLGFPGRAGRPGLPGIHGLQGDKGEPGYSEGTRPGPPGPTGDPGLPGDMGKKGEMGQPGPPGHLGPAGPEGAPGSPGSPGLPGKPGPHGDLGFKGIKGLLGPPGIRGPPGLPGFPGSPGPMGIRGDQGRDGIPGPAGEKGETGLLRAPPGPRGNPGAQGAKGDRGAPGFPGLPGRKGAMGDAGPRGPTGIEGFPGPPGLPGAIIPGQTGNRGPPGSRGSPGAPGPPGPPGSHVIGIKGDKGSMGHPGPKGPPGTAGDMGPPGRLGAPGTPGLPGPRGDPGFQGFPGVKGEKGNPGFLGSIGPPGPIGPKGPPGVRGDPGTLKIISLPGSPGPPGTPGEPGMQGEPGPPGPPGNLGPCGPRGKPGKDGKPGTPGPAGEKGNKGSKGEPGPAGSDGLPGLKGKRGDSGSPATWTTRGFVFTRHSQTTAIPSCPEGTVPLYSGFSFLFVQGNQRAHGQDLGTLGSCLQRFTTMPFLFCNVNDVCNFASRNDYSYWLSTPALMPMNMAPITGRALEPYISRCTVCEGPAIAIAVHSQTTDIPPCPHGWISLWKGFSFIMKAYSINCESWGIRKNNKSLSGVHEEKTLKLKKTAELVFFILKNKVMTEHAVI

SEQ ID NO: 16407 - protein, 1498 aa, Homo sapiens
MSARTAPRPQVLLLPLLLVLLAAAPAASKGCVCKDKGQCFCDGAKGEKGEKGFPGPPGSPGQKGFTGPEGLPGPQGPKGFPGLPGLTGSKGVRGISGLPGFSGSPGLPGTPGNTGPYGLVGVPGCSGSKGEQGFPGLPGTLGYPGIPGAAGLKGQKGAPAKEEDIELDAKGDPGLPGAPGPQGLPGPPGFPGPVGPPGPPGFFGFPGAMGPRGPKGHMGERVIGHKGERGVKGLTGPPGPPGTVIVTLTGPDNRTDLKGEKGDKGAMGEPGPPGPSGLPGESYGSEKGAPGDPGLQGKPGKDGVPGFPGSEGVKGNRGFPGLMGEDGIKGQKGDIGPPGFRGPTEYYDTYQEKGDEGTPGPPGPRGARGPQGPSGPPGVPGSPGSSRPGLRGAPGWPGLKGSKGERGRPGKDAMGTPGSPGCAGSPGLPGSPGPPGPPGDIVFRKGPPGDHGLPGYLGSPGIPGVDGPKGEPGLLCTQCPYIPGPPGLPGLPGLHGVKGIPGRQGAAGLKGSPGSPGNTGLPGFPGFPGAQGDPGLKGEKGETLQPEGQVGVPGDPGLRGQPGRKGLDGIPGTPGVKGLPGPKGELALSGEKGDQGPPGDPGSPGSPGPAGPAGPPGYGPQGEPGLQGTQGVPGAPGPPGEAGPRGELSVSTPVPGPPGPPGPPGHPGPQGPPGIPGSLGKCGDPGLPGPDGEPGIPGIGFPGPPGPKGDQGFPGTKGSLGCPGKMGEPGLPGKPGLPGAKGEPAVAMPGGPGTPGFPGERGNSGEHGEIGLPGLPGLPGTPGNEGLDGPRGDPGQPGPPGEQGPPGRCIEGPRGAQGLPGLNGLKGQQGRRGKTGPKGDPGIPGLDRSGFPGETGSPGIPGHQGEMGPLGQRGYPGNPGILGPPGEDGVIGMMGFPGAIGPPGPPGNPGTPGQRGSPGIPGVKGQRGTPGAKGEQGDKGNPGPSEISHVIGDKGEPGLKGFAGNPGEKGNRGVPGMPGLKGLKGLPGPAGPPGPRGDLGSTGNPGEPGLRGIPGSMGNMGMPGSKGKRGTLGFPGRAGRPGLPGIHGLQGDKGEPGYSEGTRPGPPGPTGDPGLPGDMGKKGEMGQPGPPGHLGPAGPEGAPGSPGSPGLPGKPGPHGDLGFKGIKGLLGPPGIRGPPGLPGFPGSPGPMGIRGDQGRDGIPGPAGEKGETGLLRAPPGPRGNPGAQGAKGDRGAPGFPGLPGRKGAMGDAGPRGPTGIEGFPGPPGLPGAIIPGQTGNRGPPGSRGSPGAPGPPGPPGSHVIGIKGDKGSMGHPGPKGPPGTAGDMGPPGRLGAPGTPGLPGPRGDPGFQGFPGVKGEKGNPGFLGSIGPPGPIGPKGPPGVRGDPGTLKIISLPGSPGPPGTPGEPGMQGEPGPPGPPGNLGPCGPRGKPGKDGKPGTPGPAGEKGNKGSKGEPGPAGSDGLPGLKGKRGDSGSPATWTTRGFVFTRHSQTTAIPSCPEGTVPLYSGFSFLFVQGNQRAHGQDLDALFVKVLRSP

SEQ ID NO: 16408 - protein, 1494 aa, Homo sapiens
MSARTAPRPQVLLLPLLLVLLAAAPAASKGCVCKDKGQCFCDGAKGEKGEKGFPGPPGSPGQKGFTGPEGLPGPQGPKGFPGLPGLTGSKGVRGISGLPGFSGSPGLPGTPGNTGPYGLVGVPGCSGSKGEQGFPGLPGTLGYPGIPGAAGLKGQKGAPAKEEDIELDAKGDPGLPGAPGPQGLPGPPGFPGPVGPPGPPGFFGFPGAMGPRGPKGHMGERVIGHKGERGVKGLTGPPGPPGTVIVTLTGPDNRTDLKGEKGDKGAMGEPGPPGPSGLPGESYGSEKGAPGDPGLQGKPGKDGVPGFPGSEGVKGNRGFPGLMGEDGIKGQKGDIGPPGFRGPTEYYDTYQEKGDEGTPGPPGPRGARGPQGPSGPPGVPGSPGSSRPGLRGAPGWPGLKGSKGERGRPGKDAMGTPGSPGCAGSPGLPGSPGPPGPPGDIVFRKGPPGDHGLPGYLGSPGIPGVDGPKGEPGLLCTQCPYIPGPPGLPGLPGLHGVKGIPGRQGAAGLKGSPGSPGNTGLPGFPGFPGAQGDPGLKGEKGETLQPEGQVGVPGDPGLRGQPGRKGLDGIPGTPGVKGLPGPKGELALSGEKGDQGPPGDPGSPGSPGPAGPAGPPGYGPQGEPGLQGTQGVPGAPGPPGEAGPRGELSVSTPVPGPPGPPGPPGHPGPQGPPGIPGSLGKCGDPGLPGPDGEPGIPGIGFPGPPGPKGDQGFPGTKGSLGCPGKMGEPGLPGKPGLPGAKGEPAVAMPGGPGTPGFPGERGNSGEHGEIGLPGLPGLPGTPGNEGLDGPRGDPGQPGPPGEQGPPGRCIEGPRGAQGLPGLNGLKGQQGRRGKTGPKGDPGIPGLDRSGFPGETGSPGIPGHQGEMGPLGQRGYPGNPGILGPPGEDGVIGMMGFPGAIGPPGPPGNPGTPGQRGSPGIPGVKGQRGTPGAKGEQGDKGNPGPSEISHVIGDKGEPGLKGFAGNPGEKGNRGVPGMPGLKGLKGLPGPAGPPGPRGDLGSTGNPGEPGLRGIPGSMGNMGMPGSKGKRGTLGFPGRAGRPGLPGIHGLQGDKGEPGYSEGTRPGPPGPTGDPGLPGDMGKKGEMGQPGPPGHLGPAGPEGAPGSPGSPGLPGKPGPHGDLGFKGIKGLLGPPGIRGPPGLPGFPGSPGPMGIRGDQGRDGIPGPAGEKGETGLLRAPPGPRGNPGAQGAKGDRGAPGFPGLPGRKGAMGDAGPRGPTGIEGFPGPPGLPGAIIPGQTGNRGPPGSRGSPGAPGPPGPPGSHVIGIKGDKGSMGHPGPKGPPGTAGDMGPPGRLGAPGTPGLPGPRGDPGFQGFPGVKGEKGNPGFLGSIGPPGPIGPKGPPGVRGDPGTLKIISLPGSPGPPGTPGEPGMQGEPGPPGPPGNLGPCGPRGKPGKDGKPGTPGPAGEKGNKGSKGEPGPAGSDGLPGLKGKRGDSGSPATWTTRGFVFTRHSQTTAIPSCPEGTVPLYSGFSFLFVQGNQRAHGQDLESLFHQL

SEQ ID NO: 16409 - protein, 1424 aa, Homo sapiens
MSARTAPRPQVLLLPLLLVLLAAAPAASKGCVCKDKGQCFCDGAKGEKGEKGFPGPPGSPGQKGFTGPEGLPGPQGPKGFPGLPGLTGSKGVRGISGLPGFSGSPGLPGTPGNTGPYGLVGVPGCSGSKGEQGFPGLPGTLGYPGIPGAAGLKGQKGAPAKEEDIELDAKGDPGLPGAPGPQGLPGPPGFPGPVGPPGPPGFFGFPGAMGPRGPKGHMGERVIGHKGERGVKGLTGPPGPPGTVIVTLTGPDNRTDLKGEKGDKGAMGEPGPPGPSGLPGESYGSEKGAPGDPGLQGKPGKDGVPGFPGSEGVKGNRGFPGLMGEDGIKGQKGDIGPPGFRGPTEYYDTYQEKGDEGTPGPPGPRGARGPQGPSGPPGVPGSPGSSRPGLRGAPGWPGLKGSKGERGRPGKDAMGTPGSPGCAGSPGLPGSPGPPGPPGDIVFRKGPPGDHGLPGYLGSPGIPGVDGPKGEPGLLCTQCPYIPGPPGLPGLPGLHGVKGIPGRQGAAGLKGSPGSPGNTGLPGFPGFPGAQGDPGLKGEKGETLQPEGQVGVPGDPGLRGQPGRKGLDGIPGTPGVKGLPGPKGELALSGEKGDQGPPGDPGSPGSPGPAGPAGPPGYGPQGEPGLQGTQGVPGAPGPPGEAGPRGELSVSTPVPGPPGPPGPPGHPGPQGPPGIPGSLGKCGDPGLPGPDGEPGIPGIGFPGPPGPKGDQGFPGTKGSLGCPGKMGEPGLPGKPGLPGAKGEPAVAMPGGPGTPGFPGERGNSGEHGEIGLPGLPGLPGTPGNEGLDGPRGDPGQPGPPGEQGPPGRCIEGPRGAQGLPGLNGLKGQQGRRGKTGPKGDPGIPGLDRSGFPGETGSPGIPGHQGEMGPLGQRGYPGNPGILGPPGEDGVIGMMGFPGAIGPPGPPGNPGTPGQRGSPGIPGVKGQRGTPGAKGEQGDKGNPGPSEISHVIGDKGEPGLKGFAGNPGEKGNRGVPGMPGLKGLKGLPGPAGPPGPRGDLGSTGNPGEPGLRGIPGSMGNMGMPGSKGKRGTLGFPGRAGRPGLPGIHGLQGDKGEPGYSEGTRPGPPGPTGDPGLPGDMGKKGEMGQPGPPGHLGPAGPEGAPGSPGSPGLPGKPGPHGDLGFKGIKGLLGPPGIRGPPGLPGFPGSPGPMGIRGDQGRDGIPGPAGEKGETGLLRAPPGPRGNPGAQGAKGDRGAPGFPGLPGRKGAMGDAGPRGPTGIEGFPGPPGLPGAIIPGQTGNRGPPGSRGSPGAPGPPGPPGSHVIGIKGDKGSMGHPGPKGPPGTAGDMGPPGRLGAPGTPGLPGPRGDPGFQGFPGVKGEKGNPGFLGSIGPPGPIGPKGPPGVRGDPGTLKIISLPGSPGPPGTPGEPGMQGEPGPPGPPGNLGPCGPRGKPGKDGKPGTPGPAGEKGNKGSKGEPESLFHQL

SEQ ID NO: 16410 - protein, 76 aa, Homo sapiens
MVCIPCIVIPVLLWIYKKFLEPYIYPLVSPFVSRIWPKKAIQESNDTNKGKVNFKGADMNGLPTKGPTEICDKKKD

SEQ ID NO: 16411 - protein, 501 aa, Homo sapiens
MVLWGPVLGALLVVIAGYLCLPGMLRQRRPWEPPLDKGTVPWLGHAMAFRKNMFEFLKRMRTKHGDVFTVQLGGQYFTFVMDPLSFGSILKDTQRKLDFGQYAKKLVLKVFGYRSVQGDHEMIHSASTKHLRGDGLKDLNETMLDSLSFVMLTSKGWSLDASCWHEDSLFRFCYYILFTAGYLSLFGYTKDKEQDLLQAGELFMEFRKFDLLFPRFVYSLLWPREWLEVGRLQRLFHKMLSVSHSQEKEGISNWLGNMLQFLREQGVPSAMQDKFNFMMLWASQGNTGPTSFWALLYLLKHPEAIRAVREEATQVLGEARLETKQSFAFKLGALQHTPVLDSVVEETLRLRAAPTLLRLVHEDYTLKMSSGQEYLFRHGDILALFPYLSVHMDPDIHPEPTVFKYDRFLNPNGSRKVDFFKTGKKIHHYTMPWGSGVSICPGRFFALSEVKLFILLMVTHFDLELVDPDTPLPHVDPQRWGFGTMQPSHDVRFRYRLHPTE

SEQ ID NO: 16412 - protein, 466 aa, Homo sapiens
MADQLYLENIDEFVTDQNKIVTYKWLSYTLGVHVNQAKQMLYDYVERKRKENSGAQLHVTYLVSGSLIQNGHSCHKVAVVREDKLEAVKSKLAVTASIHVYSIQKAMLKDSGPLFNTDYDILKSNLQNCSKFSAIQCAAAVPRAPAESSSSSKKFEQSHLHMSSETQANNELTTNGHGPPASKQVSQQPKGIMGMFASKAAAKTQETNKETKTEAKEVTNASAAGNKAPGKGNMMSNFFGKAAMNKFKVNLDSEQAVKEEKIVEQPTVSVTEPKLATPAGLKKSSKKAEPVKVLQKEKKRGKRVALSDDETKETENMRKKRRRIKLPESDSSEDEVFPDSPGAYEAESPSPPPPPSPPLEPVPKTEPEPPSVKSSSGENKRKRKRVLKSKTYLDGEGCIVTEKVYESESCTDSEEELNMKTSSVHRPPAMTVKKEPREERKGPKKGTAALGKANRQVSITGFFQRK

SEQ ID NO: 16413 - protein, 427 aa, Homo sapiens
MLYDYVERKRKENSGAQLHVTYLVSGSLIQNGHSCHKVAVVREDKLEAVKSKLAVTASIHVYSIQKAMLKDSGPLFNTDYDILKSNLQNCSKFSAIQCAAAVPRAPAESSSSSKKFEQSHLHMSSETQANNELTTNGHGPPASKQVSQQPKGIMGMFASKAAAKTQETNKETKTEAKEVTNASAAGNKAPGKGNMMSNFFGKAAMNKFKVNLDSEQAVKEEKIVEQPTVSVTEPKLATPAGLKKSSKKAEPVKVLQKEKKRGKRVALSDDETKETENMRKKRRRIKLPESDSSEDEVFPDSPGAYEAESPSPPPPPSPPLEPVPKTEPEPPSVKSSSGENKRKRKRVLKSKTYLDGEGCIVTEKVYESESCTDSEEELNMKTSSVHRPPAMTVKKEPREERKGPKKGTAALGKANRQVSITGFFQRK

SEQ ID NO: 16414 - protein, 360 aa, Homo sapiens
MLKDSGPLFNTDYDILKSNLQNCSKFSAIQCAAAVPRAPAESSSSSKKFEQSHLHMSSETQANNELTTNGHGPPASKQVSQQPKGIMGMFASKAAAKTQETNKETKTEAKEVTNASAAGNKAPGKGNMMSNFFGKAAMNKFKVNLDSEQAVKEEKIVEQPTVSVTEPKLATPAGLKKSSKKAEPVKVLQKEKKRGKRVALSDDETKETENMRKKRRRIKLPESDSSEDEVFPDSPGAYEAESPSPPPPPSPPLEPVPKTEPEPPSVKSSSGENKRKRKRVLKSKTYLDGEGCIVTEKVYESESCTDSEEELNMKTSSVHRPPAMTVKKEPREERKGPKKGTAALGKANRQVSITGFFQRK

SEQ ID NO: 16415 - protein, 504 aa, Homo sapiens
MMTTSLIWGIAIAACCCLWLILGIRRRQTGEPPLENGLIPYLGCALQFGANPLEFLRANQRKHGHVFTCKLMGKYVHFITNPLSYHKVLCHGKYFDWKKFHFATSAKAFGHRSIDPMDGNTTENINDTFIKTLQGHALNSLTESMMENLQRIMRPPVSSNSKTAAWVTEGMYSFCYRVMFEAGYLTIFGRDLTRRDTQKAHILNNLDNFKQFDKVFPALVAGLPIHMFRTAHNAREKLAESLRHENLQKRESISELISLRMFLNDTLSTFDDLEKAKTHLVVLWASQANTIPATFWSLFQMIRNPEAMKAATEEVKRTLENAGQKVSLEGNPICLSQAELNDLPVLDSIIKESLRLSSASLNIRTAKEDFTLHLEDGSYNIRKDDIIALYPQLMHLDPEIYPDPLTFKYDRYLDENGKTKTTFYCNGLKLKYYYMPFGSGATICPGRLFAIHEIKQFLILMLSYFELELIEGQAKCPPLDQSRAGLGILPPLNDIEFKYKFKHL

SEQ ID NO: 16416 - protein, 506 aa, Homo sapiens
MAGEVSAATGRFSLERLGLPGLALAAALLLLALCLLVRRTRRPGEPPLIKGWLPYLGVVLNLRKDPLRFMKTLQKQHGDTFTVLLGGKYITFILDPFQYQLVIKNHKQLSFRVFSNKLLEKAFSISQLQKNHDMNDELHLCYQFLQGKSLDILLESMMQNLKQVFEPQLLKTTSWDTAELYPFCSSIIFEITFTTIYGKVIVCDNNKFISELRDDFLKFDDKFAYLVSNIPIELLGNVKSIREKIIKCFSSEKLAKMQGWSEVFQSRQDVLEKYYVHEDLEIGAHHLGFLWASVANTIPTMFWAMYYLLRHPEAMAAVRDEIDRLLQSTGQKKGSGFPIHLTREQLDSLICLESSIFEALRLSSYSTTIRFVEEDLTLSSETGDYCVRKGDLVAIFPPVLHGDPEIFEAPEEFRYDRFIEDGKKKTTFFKRGKKLKCYLMPFGTGTSKCPGRFFALMEIKQLLVILLTYFDLEIIDDKPIGLNYSRLLFGIQYPDSDVLFRYKVKS

SEQ ID NO: 16417 - protein, 63 aa, Homo sapiens
MPGLVDSNPAPPESQEKKPLKPCCACPETKKARDACIIEKGEEHCGHLIEAHKECMRALGFKI

SEQ ID NO: 16418 - protein, 136 aa, Homo sapiens
MQSREPSGWRTAERRRGWRCRGVPTPSGDRGPGAARPAARGGAGETTGQQRPLQVPGASAAAARTRLLRWHHRVPSPRATRSPGSIRRTSPCSGGPDRPERPECADACCYLLDPFTLPLIQDFFRGCAASDFDRRD

SEQ ID NO: 16419 - protein, 685 aa, Homo sapiens
MNDSRQQSLFFITLPDLNKLCAVRIILSNKVADTEIRTIQMKMCRQLLFLHQDILTSPVSGILNQIWVVMAIPFYKARKLNAYVEKYGAKMEAPQRVIPVILQNCLSYSFMARLAPAWNRTGHLLIQGRDFLSQMGKQSAVVLNINVTETQVCLSIEACTIRLPAPELKEFEISQSIIKDFHANKHAVIERHSILSNWCYVLPSMKMGQIINIFHAIPAACPFHSYGDFQRHWDALYGYKLPGDCGKIKIYCNIYFKMLGERTFTYPLSCIRSQPMQFFPRVDSEVVLKSFLSDLKSKLPHICGFPIKMTSKPCYYTQELTKPNIQEHKVKPPNLTTKKMLRASLTQATSRKPACAQSLLPCSVAVDHKVELSVSQPTSGIFSALHLQPESVQGRKKSLSIRAPQVHSEVLMPNRGNTQVQHTNLSSQSNITPKFVPVFKNRLLQMNKNTSVLGSPKRKQHDVTQSKLFSLKTSMIQHDKLNLGPAIKNRYSSNIQMQAANNLNQENSRPLQEKNTESSENMTKFPSSRGKSTVSLNKNKQLSNSAVFVVSNNNLGVVKSAVDFQMKGKENLTGKGITQILGKSHGSLKLKRQPHIFESDGETEDPRLLQQQSENQAKEVGTSDHRLIVSKIAHRSKRKLCPESSKTSKKHHSDTVHYGQSSSSKKQILDSDKSKLKKSLIIHNA

SEQ ID NO: 16420 - protein, 135 aa, Homo sapiens
MVPAPPFLGVLENPVPQWDLSILGSIRIRVSHTEVQGSGSSRSPEALRKESLEVEWTLVLLAIPPRIQPSQQDGGPPKCCDLLRAALLGRHCPLCVPAGEVFSQKRDNEQDRSEFIGQTLKLLVKRNVSLELSCR

SEQ ID NO: 16421 - protein, 343 aa, Homo sapiens
MATLGHTFPFYAGPKPTFPMDTTLASIIMIFLTALATFIVILPGIRGKTRLFWLLRVVTSLFIGAAILAVNFSSEWSVGQVSTNTSYKAFSSEWISADIGLQVGLGGVNITLTGTPVQQLNETINYNEEFTWRLGENYAEEYAKALEKGLPDPVLYLAEKFTPRSPCGLYRQYRLAGHYTSAMLWVAFLCWLLANVMLSMPVLVYGGYMLLATGIFQLLALLFFSMATSLTSPCPLHLGASVLHTHHGPAFWITLTTGLLCVLLGLAMAVAHRMQPHRLKAFFNQSVDEDPMLEWSPEEGGLLSPRYRSMADSPKSQDIPLSEASSTKAYCKEAHPKDPDCAL

SEQ ID NO: 16422 - protein, 483 aa, Homo sapiens
MATLGHTFPFYAGPKPTFPMDTTLASIIMIFLTALATFIVILPGIRGKTRLFWLLRVVTSLFIGAAILAVNFSSEWSVGQVSTNTSYKAFSSEWISADIGLQVGLGGVNITLTGTPVQQLNETINYNEEFTWRLGENYAEEYAKALEKGLPDPVLYLAEKFTPRSPCGLYRQYRLAGHYTSAMLWVAFLCWLLANVMLSMPVLVYGGYMLLATGIFQLLALLFFSMATSLTSPCPLHLGASVLHTHHGPAFWITLTTGLLCVLLGLAMAVAHRMQPHRLKAFFNQSVDEDPMLEWSPEEGGLLSPRYRSMADSPKSQDIPLSEASSTKAYYRPRRLSLVPADVRGLAPAALSALPGALLAQAWRALLPGLRCPKAGKESRLGPPHSPWRFGPEGCEERWAEHTGDSPRPLRGRGTGRLWRWGSKERRACGVRAMLPRLVSNSGLKRPSCLDLPKCWDYRRDARAFFHLLEPTPCVTSRHTPLI

SEQ ID NO: 16423 - protein, 298 aa, Homo sapiens
MATLGHTFPFYAGPKPTFPMDTTLASIIMIFLTALATFIVILPGIRGKTRLFWLLRVVTSLFIGAAILGTPVQQLNETINYNEEFTWRLGENYAEEYAKALEKGLPDPVLYLAEKFTPRSPCGLYRQYRLAGHYTSAMLWVAFLCWLLANVMLSMPVLVYGGYMLLATGIFQLLALLFFSMATSLTSPCPLHLGASVLHTHHGPAFWITLTTGLLCVLLGLAMAVAHRMQPHRLKAFFNQSVDEDPMLEWSPEEGGLLSPRYRSMADSPKSQDIPLSEASSTKAYCKEAHPKDPDCAL

SEQ ID NO: 16424 - protein, 485 aa, Homo sapiens [sequence omitted]

SEQ ID NO: 16425 - protein, 475 aa, Homo sapiens
MQVAMNGKARKEAVQTAAKELLKFVNRSPSPFHAVAECRNRLLQAGFSELKETEKWNIKPESKYFMTRNSSTIIAFAVGGQYVPGNGFSLIGAHTDSPCLRVKRRSRRSQVGFQQVGVETYGGGIWSTWFDRDLTLAGRVIVKCPTSGRLEQQLVHVERPILRIPHLAIHLQRNINENFGPNTEMHLVPILATAIQEELEKGTPEPGPLNAVDERHHSVLMSLLCAHLGLSPKDIVEMELCLADTQPAVLGGAYDEFIFAPRLDNLHSCFCALQALIDSCAGPGSLATEPHVRMVTLYDNEEVGSESAQGAQSLLTELVLRRISASCQHPTAFEEAIPKSFMISADMAHAVHPNYLDKHEENHRPLFHKGPVIKVNSKQRYASNAVSEALIREVANKVKVPLQDLMVRNDTPCGTTIGPILASRLGLRVLDLGSPQLAMHSIREMACTTGVLQTLTLFKGFFELFPSLSHNLLVD

SEQ ID NO: 16426 - protein, 320 aa, Homo sapiens
MTLWNGVLPFYPQPRHAAGFSVPLLIVILVFLALAASFLLILPGIRGHSRWFWLVRVLLSLFIGAEIVAVHFSAEWFVGTVNTNTSYKAFSAARVTARVRLLVGLEGINITLTGTPVHQLNETIDYNEQFTWRLKENYAAEYANALEKGLPDPVLYLAEKFTPSSPCGLYHQYHLAGHYASATLWVAFCFWLLSNVLLSTPAPLYGGLALLTTGAFALFGVFALASISSVPLCPLRLGSSALTTQYGAAFWVTLATGVLCLFLGGAVVSLQYVRPSALRTLLDQSAKDCSQERGGSPLILGDPLHKQAALPDLKCITTNL

SEQ ID NO: 16427 - protein, 121 aa, Homo sapiens
MTLWNGVLPFYPQPRHAAGFSVPLLIVILVFLALAASFLLILPGIRGHSEYLHSHLLPSEIRLGPPSSEGGDPCVPSTSGLTEPHQAVTGPGGRTRTRRQTARGVKVVEECQEVGVEGRCC

SEQ ID NO: 16428 - protein, 2286 aa, Homo sapiens
MSLRSGGRRRADPGADGEASRDDGATSSVSALKRLERSQWTDKMDLRFGFERLKEPGEKTGWLINMHPTEILDEDKRLGSAVDYYFIQDDGSRFKVALPYKPYFYIATRKGCEREVSSFLSKKFQGKIAKVETVPKEDLDLPNHLVGLKRNYIRLSFHTVEDLVKVRKEISPAVKKNREQDHASDAYTALLSSVLQRGGVITDEEETSKKIADQLDNIVDMREYDVPYHIRLSIDLKIHVAHWYNVRYRGNAFPVEITRRDDLVERPDPVVLAFDIETTKLPLKFPDAETDQIMMISYMIDGQGYLITNREIVSEDIEDFEFTPKPEYEGPFCVFNEPDEAHLIQRWFEHVQETKPTIMVTYNGDFFDWPFVEARAAVHGLSMQQEIGFQKDSQGEYKAPQCIHMDCLRWVKRDSYLPVGSHNLKAAAKAKLGYDPVELDPEDMCRMATEQPQTLATYSVSDAVATYYLYMKYVHPFIFALCTIIPMEPDEVLRKGSGTLCEALLMVQAFHANIIFPNKQEQEFNKLTDDGHVLDSETYVGGHVEALESGVFRSDIPCRFRMNPAAFDFLLQRVEKTLRHALEEEEKVPVEQVTNFEEVCDEIKSKLASLKDVPSRIECPLIYHLDVGAMYPNIILTNRLQPSAMVDEATCAACDFNKPGANCQRKMAWQWRGEFMPASRSEYHRIQHQLESEKFPPLFPEGPARAFHELSREEQAKYEKRRLADYCRKAYKKIHITKVEERLTTICQRENSFYVDTVRAFRDRRYEFKGLHKVWKKKLSAAVEVGDAAEVKRCKNMEVLYDSLQLAHKCILNSFYGYVMRKGARWYSMEMAGIVCFTGANIITQARELIEQIGRPLELDTDGIWCVLPNSFPENFVFKTTNVKKPKVTISYPGAMLNIMVKEGFTNDQYQELAEPSSLTYVTRSENSIFFEVDGPYLAMILPASKEEGKKLKKRYAVFNEDGSLAELKGFEVKRRGELQLIKIFQSSVFEAFLKGSTLEEVYGSVAKVADYWLDVLYSKAANMPDSELFELISENRSMSRKLEDYGEQKSTSISTAKRLAEFLGDQMVKDAGLSCRYIISRKPEGSPVTERAIPLAIFQAEPTVRKHFLRKWLKSSSLQDFDIRAILDWDYYIERLGSAIQKIITIPAALQQVKNPVPRVKHPDWLHKKLLEKNDVYKQKKISELFTLEGRRQVTMAEASEDSPRPSAPDMEDFGLVKLPHPAAPVTVKRKRVLWESQEESQDLTPTVPWQEILGQPPALGTSQEEWLVWLRFHKKKWQLQARQRLARRKRQRLESAEGVLRPGAIRDGPATGLGSFLRRTARSILDLPWQIVQISETSQAGLFRLWALVGSDLHCIRLSIPRVFYVNQRVAKAEEGASYRKVNRVLPRSNMVYNLYEYSVPEDMYQEHINEINAELSAPDIEGVYETQVPLLFRALVHLGCVCVVNKQLVRHLSGWEAETFALEHLEMRSLAQFSYLEPGSIRHIYLYHHAQAHKALFGIFIPSQRRASVFVLDTVRSNQMPSLGALYSAEHGLLLEKVGPELLPPPKHTFEVRAETDLKTICRAIQRFLLAYKEERRGPTLIAVQSSWELKRLASEIPVLEEFPLVPICVADKINYGVLDWQRHGARRMIRHYLNLDTCLSQAFEMSRYFHIPIGNLPEDISTFGSDLFFARHLQRHNHLLWLSPTARPDLGGKEADDNCLVMEFDDQATVEINSSGCYSTVCVELDLQNLAVNTILQSHHVNDMEGADSMGISFDVIQQASLEDMITGGQAASAPASYDETALCSNTFRILKSMVVGWVKEITQYHNIYADNQVMHFYRWLRSPSSLLHDPALHRTLHNMMKKLFLQLIAEFKRLGSSVIYANFNRIILCTKKRRVEDAIAYVEYITSSIHSKETFHSLTISFSRCWEFLLWMDPSNYGGIKGKVSSRIHCGLQDSQKAGGAEDEQENEDDEEERDGEEEEEAEESNVEDLLENNWNILQFLPQAASCQNYFLMIVSAYIVAVYHCMKDGLRRSAPGSTPVRRRGASQLSQEAEGAVGALPGMITFSQDYVANELTQSFFTITQKIQKKVTGSRNSTELSEMFPVLPGSHLLLNNPALEFIKYVCKVLSLDTNITNQVNKLNRDLLRLVDVGEFSEEAQFRDPCRSYVLPEVICRSCNFCRDLDLCKDSSFSEDGAVLPQWLCSNCQAPYDSSAIEMTLVEVLQKKLMAFTLQDLVCLKCRGVKETSMPVYCSCAGDFALTIHTQVFMEQIGIFRNIAQHYGMSYLLETLEWLLQKNPQLGH

SEQ ID NO: 16429 - protein, 411 aa, Homo sapiens
MWSGWWLWPLVAVCTADFFRDEAERIMRDSPVIDGHNDLPWQLLDMFNNRLQDERANLTTLAGTHTNIPKLRAGFVGGQFWSVYTPCDTQNKDAVRRTLEQMDVVHRMCRMYPETFLYVTSSAGIRQAFREGKVASLIGVEGGHSIDSSLGVLRALYQLGMRYLTLTHSCNTPWADNWLVDTGDSEPQSQGLSPFGQRVVKELNRLGVLIDLAHVSVATMKATLQLSRAPVIFSHSSAYSVCASRRNVPDDVLRLVKQTDSLVMVNFYNNYISCTNKANLSQVADHLDHIKEVAGARAVGFGGDFDGVPRVPEGLEDVSKYPDLIAELLRRNWTEAEVKGALADNLLRVFEAVEQASNLTQAPEEEPIPLDQLGGSCRTHYGYSSGASSLHRHWGLLLASLAPLVLCLSLL

SEQ ID NO: 16430 - protein, 709 aa, Homo sapiens
MPGIDKLPIEETLEDSPQTRSLLGVFEEDATAISNYMNQLYQAMHRIYDAQNELSAATHLTSKLLKEYEKQRFPLGGDDEVMSSTLQQFSKVIDELSSCHAVLSTQLADAMMFPITQFKERDLKEILTLKEVFQIASNDHDAAINRYSRLSKKRENDKVKYEVTEDVYTSRKKQHQTMMHYFCALNTLQYKKKIALLEPLLGYMQAQISFFKMGSENLNEQLEEFLANIGTSVQNVRREMDSDIETMQQTIEDLEVASDPLYVPDPDPTKFPVNRNLTRKAGYLNARNKTGLVSSTWDRQFYFTQGGNLMSQARGDVAGGLAMDIDNCSVMAVDCEDRRYCFQITSFDGKKSSILQAESKKDHEEWICTINNISKQIYLSENPEETAARVNQSALEAVTPSPSFQQRHESLRPAAGQSRPPTARTSSSGSLGSESTNLAALSLDSLVAPDTPIQFDIISPVCEDQPGQAKAFGQGGRRTNPFGESGGSTKSETEDSILHQLFIVRFLGSMEVKSDDHPDVVYETMRQILAARAIHNIFRMTESHLLVTCDCLKLIDPQTQVTRLTFPLPCVVLYATHQENKRLFGFVLRTSSGRSESNLSSVCYIFESNNEGEKICDSVGLAKQIALHAELDRRASEKQKEIERVKEKQQKELNKQKQIEKDLEEQSRLIAASSRPNQASSEGQFVVLSSSQSEESDLGEGGKKRESEA

SEQ ID NO: 16431 - protein, 174 aa, Homo sapiens
MAAAMVPGRSESWERGEPGRPALYFCGSIRGGREDRTLYERIVSRLRRFGTVLTEHVAAAELGARGEEAAGGDRLIHEQDLEWLQQADVVVAEVTQPSLGVGYELGRAVAFNKRILCLFRPQSGRVLSAMIRGAADGSRFQVWDYEEGEVEALLDRYFEADPPGQVAASPDPTT

SEQ ID NO: 16432 - protein, 148 aa, Homo sapiens
MAAAMVPGRSESWERGEPGRPALYFCGSIRGGREDRTLYERIVSRLRRFGTVLTEHVAAAELGARGEEAAGGDRLIHEQDLEWLQQADVVVAEVTQPSLGVGYELGRAVAFNKRILCLFRPQSGRGEHPKPPSWLSMDPALSSFPGGL

SEQ ID NO: 16433 - protein, 1016 aa, Homo sapiens
MAPRTLWSCYLCCLLTAAAGAASYPPRGFSLYTGSSGALSPGGPQAQIAPRPASRHRNWCAYVVTRTVSCVLEDGVETYVKYQPCAWGQPQCPQSIMYRRFLRPRYRVAYKTVTDMEWRCCQGYGGDDCAESPAPALGPASSTPRPLARPARPNLSGSSAGSPLSGLGGEGPGESEKVQQLEEQVQSLTKELQGLRGVLQGLSGRLAEDVQRAVETAFNGRQQPADAAARPGVHETLNEIQHQLQLLDTRVSTHDQELGHLNNHHGGSSSSGGSRAPAPASAPPGPSEELLRQLEQRLQESCSVCLAGLDGFRRQQQEDRERLRAMEKLLASVEERQRHLAGLAVGRRPPQECCSPELGRRLAELERRLDVVAGSVTVLSGRRGTELGGAAGQGGHPPGYTSLASRLSRLEDRFNSTLGPSEEQEESWPGAPGGLSHWLPAARGRLEQLGGLLANVSGELGGRLDLLEEQVAGAMQACGQLCSGAPGEQDSQVSEILSALERRVLDSEGQLRLVGSGLHTVEAAGEARQATLEGLQEVVGRLQDRVDAQDETAAEFTLRLNLTAARLGQLEGLLQAHGDEGCGACGGVQEELGRLRDGVERCSCPLLPPRGPGAGPGVGGPSRGPLDGFSVFGGSSGSALQALQGELSEVILSFSSLNDSLNELQTTVEGQGADLADLGATKDRIISEINRLQQEATEHATESEERFRGLEEGQAQAGQCPSLEGRLGRLEGVCERLDTVAGGLQGLREGLSRHVAGLWAGLRETNTTSQMQAALLEKLVGGQAGLGRRLGALNSSLQLLEDRLHQLSLKDLTGPAGEAGPPGPPGLQGPPGPAGPPGSPGKDGQEGPIGPPGPQGEQGVEGAPAAPVPQVAFSAALSLPRSEPGTVPFDRVLLNDGGYYDPETGVFTAPLAGRYLLSAVLTGHRHEKVEAVLSRSNQGVARVDSGGYEPEGLENKPVAESQPSPGTLGVFSLILPLQAGDTVCVDLVMGQLAHSEEPLTIFSGALLYGDPELEHA

SEQ ID NO: 16434 - protein, 347 aa, Homo sapiens
MADLGATKDRIISEINRLQQEATEHATESEERFRGLEEGQAQAGQCPSLEGRLGRLEGVCERLDTVAGGLQGLREGLSRHVAGLWAGLRETNTTSQMQAALLEKLVGGQAGLGRRLGALNSSLQLLEDRLHQLSLKDLTGEGTKGPAGEAGPPGPPGLQGPPGPAGPPGSPGKDGQEGPIGPPGPQGEQGVEGAPAAPVPQVAFSAALSLPRSEPGTVPFDRVLLNDGGYYDPETGVFTAPLAGRYLLSAVLTGHRHEKVEAVLSRSNQGVARVDSGGYEPEGLENKPVAESQPSPGTLGVFSLILPLQAGDTVCVDLVMGQLAHSEEPLTIFSGALLYGDPELEHA

SEQ ID NO: 16435 - protein, 766 aa, Homo sapiens
MGRRRLLVWLCAVAALLSGAQARGTPLLARPAPPGASRYSLYTTGWRPRLRPGPHKALCAYVVHRNVTCILQEGAESYVKAEYRQCRWGPKCPGTVTYRTVLRPKYKVGYKTVTDLAWRCCPGFTGKRCPEHLTDHGAASPQLEPEPQIPSGQLDPGPRPPSYSRAAPSPHGRKGPGLFGERLERLEGDVQRLAQTYGTLSGLVASHEDPNRMTGGPRAPAVPVGFGVIPEGLVGPGDRARGPLTPPLDEILSKVTEVSNTLQTKVQLLDKVHGLALGHEAHLQRLREAPPSPLTSLALLEEYVDRRLHRLWGSLLDGFEQKLQGVQSECDLRVQEVRRQCEEGQAASRRLHQSLDGRELALRQELSQLGSQLQGLSVSGRGSCCGQLALINARMDGLERALQAVTETQRGPGAPAGDELTRLSAAMLEGGVDGLLEGLETLNGTEGGARGCCLRLDMGGWGVGGFGTMLEERVQSLEERLATLAGELSHDSASPGRSARPLVQTELAVLEQRLVSLETSCTPSTTSAILDSLVAEVKAWQSRSEALLRQVASHAALLQQLNGTVAEVQGQLAEGTGSSLQGEITLLKVNLNSVSKSLTGLSDSVSQYSDAFLAANTSLDERERKVEAEVQAIQEQVSSQGSRLQAGHRQVLNLRGELEQLKAGVAKVASGLSRCQDTAQKLQHTVGHFDQRVAQVEGACRRLGLLAAGLDSLPTEPLRPREGLWSHVDQLNRTLAQHTQDIARLRDDLLDCQAQLAEQVRPGQAN

SEQ ID NO: 16436 - protein, 372 aa, Homo sapiens
MDGLERALQAVTETQRGPGAPAGDELTRLSAAMLEGGVDGLLEGLETLNGTEGGARGCCLRLDMGGWGVGGFGTMLEERVQSLEERLATLAGELSHDSASPGRSARPLVQTELAVLEQRLVSLETSCTPSTTSAILDSLVAEVKAWQSRSEALLRQVASHAALLQQLNGTVAEVQGQLAEGTGSSLQGEITLLKVNLNSVSKSLTGLSDSVSQYSDAFLAANTSLDERERKVEAEVQAIQEQVSSQGSRLQAGHRQVLNLRGELEQLKAGVAKVASGLSRCQDTAQKLQHTVGHFDQRVAQVEGACRRLGLLAAGLDSLPTEPLRPREGLWSHVDQLNRTLAQHTQDIARLRDDLLDCQAQLAEQVRPGQAN

SEQ ID NO: 16437 - protein, 100 aa, Homo sapiens
MAAALALVAGVLSGAVLPLWSALPQYKKKITDRCFHHSECYSGCCLMDLDSGGAFCAPRARITMICLPQTKGATNIICPCRMGLTCISKDLMCSRRCHMI

SEQ ID NO: 16438 - protein, 153 aa, Homo sapiens
MAAALALVAGVLSGAVLPLWSALPQYKKKITDRCFHHSECYSGCCLMDLDSGGAFCAPRARITMICLPQWLELFKGRDRIIFIYEAPTPSLVSAHNQGSYQHHLPLPDGLDVHIQGLDVFPPVPYDLEEDAGWSLLPWGHRPWLPPTCSKSSS

SEQ ID NO: 16439 - protein, 1033 aa, Homo sapiens
MGAAGLLGVFLALVAPGVLGISCGSPPPILNGRISYYSTPIAVGTVIRYSCSGTFRLIGEKSLLCITKDKVDGTWDKPAPKCEYFNKYSSCPEPIVPGGYKIRGSTPYRHGDSVTFACKTNFSMNGNKSVWCQANNMWGPTRLPTCVSVFPLECPALPMIHNGHHTSENVGSIAPGLSVTYSCESGYLLVGEKIINCLSSGKWSAVPPTCEEARCKSLGRFPNGKVKEPPILRVGVTANFFCDEGYRLQGPPSSRCVIAGQGVAWTKMPVCEEIFCPSPPPILNGRHIGNSLANVSYGSIVTYTCDPDPEEGVNFILIGESTLRCTVDSQKTGTWSGPAPRCELSTSAVQCPHPQILRGRMVSGQKDRYTYNDTVIFACMFGFTLKGSKQIRCNAQGTWEPSAPVCEKECQAPPNILNGQKEDRHMVRFDPGTSIKYSCNPGYVLVGEESIQCTSEGVWTPPVPQCKVAACEATGRQLLTKPQHQFVRPDVNSSCGEGYKLSGSVYQECQGTIPWFMEIRLCKEITCPPPPVIYNGAHTGSSLEDFPYGTTVTYTCNPGPERGVEFSLIGESTIRCTSNDQERGTWSGPAPLCKLSLLAVQCSHVHIANGYKISGKEAPYFYNDTVTFKCYSGFTLKGSSQIRCKADNTWDPEIPVCEKETCQHVRQSLQELPAGSRVELVNTSCQDGYQLTGHAYQMCQDAENGIWFKKIPLCKVIHCHPPPVIVNGKHTGMMAENFLYGNEVSYECDQGFYLLGEKKLQCRSDSKGHGSWSGPSPQCLRSPPVTRCPNPEVKHGYKLNKTHSAYSHNDIVYVDCNPGFIMNGSRVIRCHTDNTWVPGVPTCIKKAFIGCPPPPKTPNGNHTGGNIARFSPGMSILYSCDQGYLLVGEALLLCTHEGTWSQPAPHCKEVNCSSPADMDGIQKGLEPRKMYQYGAVVTLECEDGYMLEGSPQSQCQSDHQWNPPLAVCRSRSLAPVLCGIAAGLILLTFLIVITLYVISKHRARNYYTDTSQKEAFHLEAREVYSVDPYNPAS

SEQ ID NO: 16440 - protein, 1007 aa, Homo sapiens
MGAAGLLGVFLALVAPGVLGISCGSPPPILNGRISYYSTPIAVGTVIRYSCSGTFRLIGEKSLLCITKDKVDGTWDKPAPKCEYFNKYSSCPEPIVPGGYKIRGSTPYRHGDSVTFACKTNFSMNGNKSVWCQANNMWGPTRLPTCVSVFPLECPALPMIHNGHHTSENVGSIAPGLSVTYSCESGYLLVGEKIINCLSSGKWSAVPPTCEEARCKSLGRFPNGKVKEPPILRVGVTANFFCDEGYRLQGPPSSRCVIAGQGVAWTKMPVCEEIFCPSPPPILNGRHIGNSLANVSYGSIVTYTCDPDPEEGVNFILIGESTLRCTVDSQKTGTWSGPAPRCELSTSAVQCPHPQILRGRMVSGQKDRYTYNDTVIFACMFGFTLKGSKQIRCNAQGTWEPSAPVCEKECQAPPNILNGQKEDRHMVRFDPGTSIKYSCNPGYVLVGEESIQCTSEGVWTPPVPQCKVAACEATGRQLLTKPQHQFVRPDVNSSCGEGNHLPTTPCYLQWGTHREFLRRFSIWNHGHLHMNPGPERGVEFSLIGESTIRCTSNDQERGTWSGPAPLCKLSLLAVQCSHVHIANGYKISGKEAPYFYNDTVTFKCYSGFTLKGSSQIRCKADNTWDPEIPVCEKETCQHVRQSLQELPAGSRVELVNTSCQDGYQLTGHAYQMCQDAENGIWFKKIPLCKVIHCHPPPVIVNGKHTGMMAENFLYGNEVSYECDQGFYLLGEKKLQCRSDSKGHGSWSGPSPQCLRSPPVTRCPNPEVKHGYKLNKTHSAYSHNDIVYVDCNPGFIMNGSRVIRCHTDNTWVPGVPTCIKKAFIGCPPPPKTPNGNHTGGNIARFSPGMSILYSCDQGYLLVGEALLLCTHEGTWSQPAPHCKEVNCSSPADMDGIQKGLEPRKMYQYGAVVTLECEDGYMLEGSPQSQCQSDHQWNPPLAVCRSRSLAPVLCGIAAGLILLTFLIVITLYVISKHRARNYYTDTSQKEAFHLEAREVYSVDPYNPAS

SEQ ID NO: 16441 - protein, 1092 aa, Homo sapiens
MGAAGLLGVFLALVAPGVLGISCGSPPPILNGRISYYSTPIAVGTVIRYSCSGTFRLIGEKSLLCITKDKVDGTWDKPAPKCEYFNKYSSCPEPIVPGGYKIRGSTPYRHGDSVTFACKTNFSMNGNKSVWCQANNMWGPTRLPTCVSVFPLECPALPMIHNGHHTSENVGSIAPGLSVTYSCESGYLLVGEKIINCLSSGKWSAVPPTCEEARCKSLGRFPNGKVKEPPILRVGVTANFFCDEGYRLQGPPSSRCVIAGQGVAWTKMPVCEEIFCPSPPPILNGRHIGNSLANVSYGSIVTYTCDPDPEEGVNFILIGESTLRCTVDSQKTGTWSGPAPRCELSTSAVQCPHPQILRGRMVSGQKDRYTYNDTVIFACMFGFTLKGSKQIRCNAQGTWEPSAPVCEKECQAPPNILNGQKEDRHMVRFDPGTSIKYSCNPGYVLVGEESIQCTSEGVWTPPVPQCKVAACEATGRQLLTKPQHQFVRPDVNSSCGEGYKLSGSVYQECQGTIPWFMEIRLCKEITCPPPPVIYNGAHTGSSLEDFPYGTTVTYTCNPGPERGVEFSLIGESTIRCTSNDQERGTWSGPAPLCKLSLLAVQCSHVHIANGYKISGKEAPYFYNDTVTFKCYSGFTLKGSSQIRCKADNTWDPEIPVCEKGCQSPPGLHHGRHTGGNTVFFVSGMTVDYTCDPGYLLVGNKSIHCMPSGNWSPSAPRCEETCQHVRQSLQELPAGSRVELVNTSCQDGYQLTGHAYQMCQDAENGIWFKKIPLCKVIHCHPPPVIVNGKHTGMMAENFLYGNEVSYECDQGFYLLGEKKLQCRSDSKGHGSWSGPSPQCLRSPPVTRCPNPEVKHGYKLNKTHSAYSHNDIVYVDCNPGFIMNGSRVIRCHTDNTWVPGVPTCIKKAFIGCPPPPKTPNGNHTGGNIARFSPGMSILYSCDQGYLLVGEALLLCTHEGTWSQPAPHCKEVNCSSPADMDGIQKGLEPRKMYQYGAVVTLECEDGYMLEGSPQSQCQSDHQWNPPLAVCRSRSLAPVLCGIAAGLILLTFLIVITLYVISKHRARNYYTDTSQKEAFHLEAREVYSVDPYNPAS

SEQ ID NO: 16442 - protein, 1084 aa, Homo sapiens
MGAAGLLGVFLALVAPGVLGISCGSPPPILNGRISYYSTPIAVGTVIRYSCSGTFRLIGEKSLLCITKDKVDGTWDKPAPKCEYFNKYSSCPEPIVPGGYKIRGSTPYRHGDSVTFACKTNFSMNGNKSVWCQANNMWGPTRLPTCVSVFPLECPALPMIHNGHHTSENVGSIAPGLSVTYSCESGYLLVGEKIINCLSSGKWSAVPPTCEEARCKSLGRFPNGKVKEPPILRVGVTANFFCDEGYRLQGPPSSRCVIAGQGVAWTKMPVCEEIFCPSPPPILNGRHIGNSLANVSYGSIVTYTCDPDPEEGVNFILIGESTLRCTVDSQKTGTWSGPAPRCELSTSAVQCPHPQILRGRMVSGQKDRYTYNDTVIFACMFGFTLKGSKQIRCNAQGTWEPSAPVCEKECQAPPNILNGQKEDRHMVRFDPGTSIKYSCNPGYVLVGEESIQCTSEGVWTPPVPQCKVAACEATGRQLLTKPQHQFVRPDVNSSCGEGYKLSGSVYQECQGTIPWFMEIRLCKEITCPPPPVIYNGAHTGSSLEDFPYGTTVTYTCNPGPERGVEFSLIGESTIRCTSNDQERGTWSGPAPLCKLSLLAVQCSHVHIANGYKISGKEAPYFYNDTVTFKCYSGFTLKGSSQIRCKADNTWDPEIPVCEKGCQSPPGLHHGRHTGGNTVFFVSGMTVDYTCDPGYLLVGNKSIHCMPSGNWSPSAPRCEETCQHVRQSLQELPAGSRVELVNTSCQDGYQLTGHAYQMCQDAENGIWFKKIPLCKVIVNGKHTGMMAENFLYGNEVSYECDQGFYLLGEKKLQCRSDSKGHGSWSGPSPQCLRSPPVTRCPNPEVKHGYKLNKTHSAYSHNDIVYVDCNPGFIMNGSRVIRCHTDNTWVPGVPTCIKKAFIGCPPPPKTPNGNHTGGNIARFSPGMSILYSCDQGYLLVGEALLLCTHEGTWSQPAPHCKEVNCSSPADMDGIQKGLEPRKMYQYGAVVTLECEDGYMLEGSPQSQCQSDHQWNPPLAVCRSRSLAPVLCGIAAGLILLTFLIVITLYVISKHRARNYYTDTSQKEAFHLEAREVYSVDPYNPAS

SEQ ID NO: 16443 - protein, 502 aa, Homo sapiens
MLAAMGSLAAALWAVVHPRTLLLGTVAFLLAADFLKRRRPKNYPPGPWRLPFLGNFFLVDFEQSHLEVQLFVKKYGNLFSLELGDISAVLITGLPLIKEALIHMDQNFGNRPVTPMREHIFKKNGLIMSSGQAWKEQRRFTLTALRNFGLGKKSLEERIQEEAQHLTEAIKEENGQPFDPHFKINNAVSNIICSITFGERFEYQDSWFQQLLKLLDEVTYLEASKTCQLYNVFPWIMKFLPGPHQTLFSNWKKLKLFVSHMIDKHRKDWNPAETRDFIDAYLKEMSKHTGNPTSSFHEENLICSTLDLFFAGTETTSTTLRWALLYMALYPEIQEKVQAEIDRVIGQGQQPSTAARESMPYTNAVIHEVQRMGNIIPLNVPREVTVDTTLAGYHLPKGTMILTNLTALHRDPTEWATPDTFNPDHFLENGQFKKREAFMPFSIGKRACLGEQLARTELFIFFTSLMQKFTFRPPNNEKLSLKFRMGITISPVSHRLCAVPQV

SEQ ID NO: 16444 - protein, 215 aa, Homo sapiens
METQAEQQELETLPTTKMAQTNPTPGSLGPWKITIYDQENFQGKRMEFTSSCPNVSERSFDNVRSLKVESGAWIGYEHTSFCGQQFILERGEYPRWDAWSGSNAYHIERLMSFRPICSANHKESKMTIFEKENFIGRQWEISDDYPSLQAMGWFNNEVGSMKIQSGAWVCYQYPGYRGYQYILECDHHGGDYKHWREWGSHAQTSQIQSIRRIQQ

SEQ ID NO: 16445 - protein, 198 aa, Homo sapiens
MAQTNPTPGSLGPWKITIYDQENFQGKRMEFTSSCPNVSERSFDNVRSLKVESGAWIGYEHTSFCGQQFILERGEYPRWDAWSGSNAYHIERLMSFRPICSANHKESKMTIFEKENFIGRQWEISDDYPSLQAMGWFNNEVGSMKIQSGAWVCYQYPGYRGYQYILECDHHGGDYKHWREWGSHAQTSQIQSIRRIQQ

SEQ ID NO: 16446 - protein, 400 aa, Homo sapiens
MLLLVTSLLLCELPHPAFLLIPEKSDLRTVAPASSLNVRFDSRTMNLSWDCQENTTFSKCFLTDKKNRVVEPRLSNNECSCTFREICLHEGVTFEVHVNTSQRGFQQKLLYPNSGREGTAAQNFSCFIYNADLMNCTWARGPTAPRDVQYFLYIRNSKRRREIRCPYYIQDSGTHVGCHLDNLSGLTSRNYFLVNGTSREIGIQFFDSLLDTKKIERFNPPSNVTVRCNTTHCLVRWKQPRTYQKLSYLDFQYQLDVHRKNTQPGTENLLINVSGDLENRYNFPSSEPRAKHSVKIRAADVRILNWSSWSEAIEFGSDDGNLGSVYIYVLLIVGTLVCGIVLGFLFKRFLRIQRLFPPVPQIKDKLNDNHEVEDEIIWEEFTPEEGKGYREEVLTVKEIT

SEQ ID NO: 16447 - protein, 410 aa, Homo sapiens
MLLLVTSLLLCELPHPAFLLIPEKSDLRTVAPASSLNVRFDSRTMNLSWDCQENTTFSKCFLTDKKNRVVEPRLSNNECSCTFREICLHEGVTFEVHVNTSQRGFQQKLLYPNSGREGTAAQNFSCFIYNADLMNCTWARGPTAPRDVQYFLYIRNSKRRREIRCPYYIQDSGTHVGCHLDNLSGLTSRNYFLVNGTSREIGIQFFDSLLDTKKIERFNPPSNVTVRCNTTHCLVRWKQPRTYQKLSYLDFQYQLDVHRKNTQPGTENLLINVSGDLENRYNFPSSEPRAKHSVKIRAADVRILNWSSWSEAIEFGSDDGNLGSVYIYVLLIVGTLVCGIVLGFLFKRFLRIQRLFPPVPQIKDKLNDNHEVEDEMGPQRHHRCGWNLYPTPGPSPGSGSSPRLGSESSL

SEQ ID NO: 16448 - protein, 333 aa, Homo sapiens
MLLLVTSLLLCELPHPAFLLIPEKSDLRTVAPASSLNVRFDSRTMNLSWDCQENTTFSKCFLTDKKNRVVEPRLSNNECSCTFREICLHEGVTFEVHVNTSQRGFQQKLLYPNSGREGTAAQNFSCFIYNADLMNCTWARGPTAPRDVQYFLYIRNSKRRREIRCPYYIQDSGTHVGCHLDNLSGLTSRNYFLVNGTSREIGIQFFDSLLDTKKIERFNPPSNVTVRCNTTHCLVRWKQPRTYQKLSYLDFQYQLDVHRKNTQPGTENLLINVSGDLENRYNFPSSEPRAKHSVKIRAADVRILNWSSWSEAIEFGSLGYSGCSRQFHRSKTN

SEQ ID NO: 16449 - protein, 286 aa, Homo sapiens
MLLLVTSLLLCELPHPAFLLIPEKSDLRTVAPASSLNVRFDSRTMNLSWDCQENTTFSKCFLTDKKNRVVEPRLSNNECSCTFREICLHEGVTFEVHVNTSQRGFQQKLLYPNSGREGTAAQNFSCFIYNADLMNCTWARGPTAPRDVQYFLYIRNSKRRREIRCPYYIQDSGTHVGCHLDNLSGLTSRNYFLVNGTSREIGIQFFDSLLDTKKIERFNPPSNVTVRCNTTHCLVRWKQPRTYQKLSYLDFQYQLDVHRKNTQPGTENLLVVLTTGTSALCTFMCS

SEQ ID NO: 16450 - protein, 377 aa, Homo sapiens
MLLLVTSLLLCELPHPAFLLIPEKSDLRTVAPASSLNVRFDSRTMNLSWDCQENTTFSKCFLTDKKNRVVEPRLSNNECSCTFREICLHEGVTFEVHVNTSQRGFQQKLLYPNSGREGTAAQNFSCFIYNADLMNCTWARGPTAPRDVQYFLYIRNSKRRREIRCPYYIQDSGTHVGCHLDNLSGLTSRNYFLVNGTSREIGIQFFDSLLDTKKIERFNPPSNVTVRCNTTHCLVRWKQPRTYQKLSYLDFQYQLDVHRKNTQPGTENLLINVSGDLENRYNFPSSEPRAKHSVKIRAADVRILNWSSWSEAIEFDHLGGIHPRGRERLPRRGLDREGNYLRPRGCRNGMDISASATRGNCFLDDAVNLYIIFYVFI

SEQ ID NO: 16451 - protein, 233 aa, Homo sapiens
MLLLVTSLLLCELPHPAFLLIPEKSDLRTVAPASSLNVRFDSRTMNLSWDCQENTTFSKCFLTDKKNRVVEPRLSNNECSCTFREICLHEGVTFEVHVNTSQRGFQQKLLYPNSGREGTAAQNFSCFIYNADLMNCTWARGPTAPRDVQYFLYIRNSKRRREIRCPYYIQDSGTHVGCHLDNLSGLTSRNYFLVNGTSREIGIQFFDSLLDTKKIGSLGYSGCSRQFHRSKTN

SEQ ID NO: 16452 - protein, 434 aa, Homo sapiens
MLLLVTSLLLCELPHPAFLLIPEKSDLRTVAPASSLNVRFDSRTMNLSWDCQENTTFSKCFLTDKKNRVVEPRLSNNECSCTFREICLHEGVTFEVHVNTSQRGFQQKLLYPNSGREGTAAQNFSCFIYNADLMNCTWARGPTAPRDVQYFLYIRNSKRRREIRCPYYIQDSGTHVGCHLDNLSGLTSRNYFLVNGTSREIGIQFFDSLLDTKKIERFNPPSNVTVRCNTTHCLVRWKQPRTYQKLSYLDFQYQLDVHRKNTQPGTENLLINVSGDLENRYNFPSSEPRAKHSVKIRAADVRILNWSSWSEAIEFGSHSVTQAGVQWHNLGSLQPPSPRLKRFSCLRLPGSDDGNLGSVYIYVLLIVGTLVCGIVLGFLFKRFLRIQRLFPPVPQIKDKLNDNHEVEDEIIWEEFTPEEGKGYREEVLTVKEIT

SEQ ID NO: 16453 - protein, 267 aa, Homo sapiens
MNCTWARGPTAPRDVQYFLYIRNSKRRREIRCPYYIQDSGTHVGCHLDNLSGLTSRNYFLVNGTSREIGIQFFDSLLDTKKIERFNPPSNVTVRCNTTHCLVRWKQPRTYQKLSYLDFQYQLDVHRKNTQPGTENLLINVSGDLENRYNFPSSEPRAKHSVKIRAADVRILNWSSWSEAIEFGSDDGNLGSVYIYVLLIVGTLVCGIVLGFLFKRFLRIQRLFPPVPQIKDKLNDNHEVEDEIIWEEFTPEEGKGYREEVLTVKEIT

SEQ ID NO: 16454 - protein, 500 aa, Homo sapiens
MSPGLLLLGSAVLLAFGLCCTFVHRARSRYEHIPGPPRPSFLLGHLPCFWKKDEVGGRVLQDVFLDWAKKYGPVVRVNVFHKTSVIVTSPESVKKFLMSTKYNKDSKMYRALQTVFGERLFGQGLVSECNYERWHKQRRVIDLAFSRSSLVSLMETFNEKAEQLVEILEAKADGQTPVSMQDMLTYTAMDILAKAAFGMETSMLLGAQKPLSQAVKLMLEGITASRNTLAKFLPGKRKQLREVRESIRFLRQVGRDWVQRRREALKRGEEVPADILTQILKAEEGAQDDEGLLDNFVTFFIAGHETSANHLAFTVMELSRQPEIVARLQAEVDEVIGSKRYLDFEDLGRLQYLSQVLKESLRLYPPAWGTFRLLEEETLIDGVRVPGNTPLLFSTYVMGRMDTYFEDPLTFNPDRFGPGAPKPRFTYFPFSLGHRSCIGQQFAQMEVKVVMAKLLQRLEFRLVPGQRFGLQEQATLKPLDPVLCTLRPRGWQPAPPPPPC

SEQ ID NO: 16455 - protein, 403 aa, Homo sapiens
MSTKYNKDSKMYRALQTVFGERLFGQGLVSECNYERWHKQRRVIDLAFSRSSLVSLMETFNEKAEQLVEILEAKADGQTPVSMQDMLTYTAMDILAKAAFGMETSMLLGAQKPLSQAVKLMLEGITASRNTLAKFLPGKRKQLREVRESIRFLRQVGRDWVQRRREALKRGEEVPADILTQILKAEEGAQDDEGLLDNFVTFFIAGHETSANHLAFTVMELSRQPEIVARLQAEVDEVIGSKRYLDFEDLGRLQYLSQVLKESLRLYPPAWGTFRLLEEETLIDGVRVPGNTPLLFSTYVMGRMDTYFEDPLTFNPDRFGPGAPKPRFTYFPFSLGHRSCIGQQFAQMEVKVVMAKLLQRLEFRLVPGQRFGLQEQATLKPLDPVLCTLRPRGWQPAPPPPPC

SEQ ID NO: 16456 - protein, 337 aa, Homo sapiens
METFNEKAEQLVEILEAKADGQTPVSMQDMLTYTAMDILAKAAFGMETSMLLGAQKPLSQAVKLMLEGITASRNTLAKFLPGKRKQLREVRESIRFLRQVGRDWVQRRREALKRGEEVPADILTQILKAEEGAQDDEGLLDNFVTFFIAGHETSANHLAFTVMELSRQPEIVARLQAEVDEVIGSKRYLDFEDLGRLQYLSQVLKESLRLYPPAWGTFRLLEEETLIDGFSTYVMGRMDTYFEDPLTFNPDRFGPGAPKPRFTYFPFSLGHRSCIGQQFAQMEVKVVMAKLLQRLEFRLVPGQRFGLQEQATLKPLDPVLCTLRPRGWQPAPPPPPC

SEQ ID NO: 16457 - protein, 596 aa, Homo sapiens
MFGIQENIPRGGTTMKEEPLGSGMNPVRSWMHTAGVVDANTAAQSGVGLARAHFEKQPPSNLRKSNFFHFVLALYDRQGQPVEIERTAFVDFVEKEKEPNNEKTNNGIHYKLQLLYSNGVRTEQDLYVRLIDSMTKQAIVYEGQDKNPEMCRVLLTHEIMCSRCCDKKSCGNRNETPSDPVIIDRFFLKFFLKCNQNCLKNAGNPRDMRRFQVVVSTTVNVDGHVLAVSDNMFVHNNSKHGRRARRLDPSEGTAPSYLENATPCIKAISPSEGWTTGGATVIIIGDNFFDGLQVVFGTMLVWSELITPHAIRVQTPPRHIPGVVEVTLSYKSKQFCKGAPGRFVYTALNEPTIDYGFQRLQKVIPRHPGDPERLPKEVLLKRAADLVEALYGMPHNNQEIILKRAADIAEALYSVPRNHNQIPTLGNNPAHTGMMGVNSFSSQLAVNVSETSQANDQVGYSRNTSSVSPRGYVPSSTPQQSNYNTVSTSMNGYGSGAMASLGVPGSPGFLNGSSANSPYGIVPSSPTMAASSVTLPSNCSSTHGIFSFSPANVISAVKQKSAFAPVVRPQASPPPSCTSANGNGLQAMSGLVVPPM

SEQ ID NO: 16458 - protein, 551 aa, Homo sapiens
MFGIQENIPRGGTTMKEEPLGSGMNPVRSWMHTAGVVDANTAAQSGVGLARAHFEKQPPSNLRKSNFFHFVLALYDRQGQPVEIERTAFVDFVEKEKEPNNEKTNNGIHYKLQLLYSNGVRTEQDLYVRLIDSMTKQAIVYEGQDKNPEMCRVLLTHEIMCSRCCDKKSCGNRNETPSDPVIIDRFFLKFFLKCNQNCLKNAGNPRDMRRFQVVVSTTVNVDGHVLAVSDNMFVHNNSKHGRRARRLDPSEATPCIKAISPSEGWTTGGATVIIIGDNFFDGLQVVFGTMLVWSELITPHAIRVQTPPRHIPGVVEVTLSYKSKQFCKGAPGRFVYTALNEPTIDYGFQRLQKVIPRHPGDPERLPKEVLLKRAADLVEALYGMPHNNQEIILKRAADIAEALYSVPRNHNQIPTLGNNPAHTGMMGVNSFSSQLAVNVSETSQANDQVGYSRNTSSVSPRGYVPSSTPQQSNYNTVSTSMNGYGSGAMASLGVPGSPGFLNGSSANSPYGMKQKSAFAPVVRPQASPPPSCTSANGNGLQAMSGLVVPPM

SEQ ID NO: 16459 - protein, 166 aa, Homo sapiens
MASGVAVSDGVIKVFNDMKVRKSSTPEEVKKRKKAVLFCLSEDKKNIILEEGKEILVGDVGQTVDDPYATFVKMLPDKDCRYALYDATYETKESKKEDLVFIFWAPESAPLKSKMIYASSKDAIKKKLTGIKHELQANCYEEVKDRCTLAEKLGGSAVISLEGKPL

SEQ ID NO: 16460 - protein, 720 aa, Homo sapiens
MAPPRNVVKIAIKMRDAIPQLIQLDQAKPLAAVLKEVCDAWSLTHSERYALQFADGHRRYITENNRAEIKNGSILCLSTAPDLEAEQLLGGLQSNSPEGRREALRRLVPLASDMIFAREVISRNGLQILGTIIEDGDDLGEVLALSLRAFSELMEHGVVSWETLSIPFVRKVVCYVNMNLMDASVPPLALGLLESVTLSSPALGQLVKSEVPLDRLLVHLQVMNQQLQTKAMALLTALLQGASPVERKHMLDYLWQRNLRQFIYKNIIHSAAPMGDEMAHHLYVLQALMLGLLEPRMRTPLDPYSQEQREQLQVLRQAAFEVEGESSGAGLSADRRRSLCAREFRKLGFSNSNPAQDLERVPPGLLALDNMLYFSRNAPSAYSRFVLENSSREDKHECPFARGSIQLTVLLCELLRVGEPCSETAQDFSPMFFGQDQSFHELFCVGIQLLNKTWKEMRATQEDFDKVMQVVREQLARTLALKPTSLELFRTKVNALTYGEVLRLRQTERLHQEGTLAPPILELREKLKPELMGLIRQQRLLRLCEGTLFRKISSRRRQDKLWFCCLSPNHKLLQYGDMEEGASPPTLESLPEQLPVADMRALLTGKDCPHVREKGSGKQNKDLYELAFSISYDRGEEEAYLNFIAPSKREFYLWTDGLSALLGSPMGSEQTRLDLEQLLTMETKLRLLELENVPIPERPPPVPPPPTNFNFCYDCSIAEP

SEQ ID NO: 16461 - protein, 607 aa, Homo sapiens
MIFAREVISRNGLQILGTIIEDGDDLGEVLALSLRAFSELMEHGVVSWETLSIPFVRKVVCYVNMNLMDASVPPLALGLLESVTLSSPALGQLVKSEVPLDRLLVHLQVMNQQLQTKAMALLTALLQGASPVERKHMLDYLWQRNLRQFIYKNIIHSAAPMGDEMAHHLYVLQALMLGLLEPRMRTPLDPYSQEQREQLQVLRQAAFEVEGESSGAGLSADRRRSLCAREFRKLGFSNSNPAQDLERVPPGLLALDNMLYFSRNAPSAYSRFVLENSSREDKHECPFARGSIQLTVLLCELLRVGEPCSETAQDFSPMFFGQDQSFHELFCVGIQLLNKTWKEMRATQEDFDKVMQVVREQLARTLALKPTSLELFRTKVNALTYGEVLRLRQTERLHQEGTLAPPILELREKLKPELMGLIRQQRLLRLCEGTLFRKISSRRRQDKLWFCCLSPNHKLLQYGDMEEGASPPTLESLPEQLPVADMRALLTGKDCPHVREKGSGKQNKDLYELAFSISYDRGEEEAYLNFIAPSKREFYLWTDGLSALLGSPMGSEQTRLDLEQLLTMETKLRLLELENVPIPERPPPVPPPPTNFNFCYDCSIAEP

SEQ ID NO: 16462 - protein, 773 aa, Homo sapiens
MARSSSLGRECGTPRSGLGKGGPPRPQGPQARCTLGRRCTVSGKCRRPRPSWTMAPPRNVVKIAIKMRDAIPQLIQLDQAKPLAAVLKEVCDAWSLTHSERYALQFADGHRRYITENNRAEIKNGSILCLSTAPDLEAEQLLGGLQSNSPEGRREALRRLVPLASDMIFAREVISRNGLQILGTIIEDGDDLGEVLALSLRAFSELMEHGVVSWETLSIPFVRKVVCYVNMNLMDASVPPLALGLLESVTLSSPALGQLVKSEVPLDRLLVHLQVMNQQLQTKAMALLTALLQGASPVERKHMLDYLWQRNLRQFIYKNIIHSAAPMGDEMAHHLYVLQALMLGLLEPRMRTPLDPYSQEQREQLQVLRQAAFEVEGESSGAGLSADRRRSLCAREFRKLGFSNSNPAQDLERVPPGLLALDNMLYFSRNAPSAYSRFVLENSSREDKHECPFARGSIQLTVLLCELLRVGEPCSETAQDFSPMFFGQDQSFHELFCVGIQLLNKTWKEMRATQEDFDKVMQVVREQLARTLALKPTSLELFRTKVNALTYGEVLRLRQTERLHQEGTLAPPILELREKLKPELMGLIRQQRLLRLCEGTLFRKISSRRRQDKLWFCCLSPNHKLLQYGDMEEGASPPTLESLPEQLPVADMRALLTGKDCPHVREKGSGKQNKDLYELAFSISYDRGEEEAYLNFIAPSKREFYLWTDGLSALLGSPMGSEQTRLDLEQLLTMETKLRLLELENVPIPERPPPVPPPPTNFNFCYDCSIAEP

SEQ ID NO: 16463 - protein, 633 aa, Homo sapiens
MSAGSERGAAATPGGLPAPCASKVELRLSCRHLLDRDPLTKSDPSVALLQQAQGQWVQVGRTEVVRSSLHPVFSKVFTVDYYFEEVQRLRFEVYDTHGPSGFSCQEDDFLGGMECTLGQPAQKWLLQVVMRVSVDVLGPAGHCAKHFLCCTESSHLARTGPSFLLRYDDLCLPWATAGAVRWWTCRGGHTQGWQIVAQKKVTRPLLLKFGRNAGKSTITVIAEDISGNNGYVELSFRARKLDDKDLFSKSDPFLELYRVNDDQGLQLVYRTEVVKNNLNPVWEAFKVSLSSLCSCEETRPLKCLVWDYDSRGKHDFIGEFSTTFEEMQKAFEEGQAQWDCVNPKYKQKRRSYKNSGVVVLADLKFHRVYSFLDYIMGGCQIHFTVAIDFTASNGDPRNSCSLHYINPYQPNEYLKALVSVGEICQDYDSDKRFSALGFGARIPPKYEVSHDFAINFNPEDDECEGIQGVVEAYQNCLPRVQLYGPTNVAPIISKVARVAAAEESTGKASQYYILLILTDGVVTDMADTREAIVRASRLPMSIIIVGVGNADFTDMQVLDGDDGVLRSPRGEPALRDIVQFVPFRELKNASPAALAKCVLAEVPKQVVEYYSHRGLPPRSLGVPAGEASPGCTP

SEQ ID NO: 16464 - protein, 558 aa, Homo sapiens
MSAGSERGAAATPGGLPAPCASKVELRLSCRHLLDRDPLTKSDPSVALLQQAQGQWVQVGRTEVVRSSLHPVFSKVFTVDYYFEEVQRLRFEVYDTHGPSGFSCQEDDFLGGMECTLGQIVAQKKVTRPLLLKFGRNAGKSTITVIAEDISGNNGYVELSFRARKLDDKDLFSKSDPFLELYRVNDDQGLQLVYRTEVVKNNLNPVWEAFKVSLSSLCSCEETRPLKCLVWDYDSRGKHDFIGEFSTTFEEMQKAFEEGQAQWDCVNPKYKQKRRSYKNSGVVVLADLKFHRVYSFLDYIMGGCQIHFTVAIDFTASNGDPRNSCSLHYINPYQPNEYLKALVSVGEICQDYDSDKRFSALGFGARIPPKYEVSHDFAINFNPEDDECEGIQGVVEAYQNCLPRVQLYGPTNVAPIISKVARVAAAEESTGKASQYYILLILTDGVVTDMADTREAIVRASRLPMSIIIVGVGNADFTDMQVLDGDDGVLRSPRGEPALRDIVQFVPFRELKNASPAALAKCVLAEVPKQVVEYYSHRGLPPRSLGVPAGEASPGCTP

SEQ ID NO: 16465 - protein, 240 aa, Homo sapiens
MATDELATKLSRRLQMEGEGGGETPEQPGLNGAAAAAAGAPDEAAEALGSADCELSAKLLRRADLNQGIGEPQSPSRRVFNPYTEFKEFSRKQIKDMEKMFKQYDAGRDGFIDLMELKLMMEKLGAPQTHLGLKNMIKEVDEDFDSKLSFREFLLIFRKAAAGELQEDSGLCVLARLSEIDVSSEGVKGAKSFFEAKVQAINVSSRFEEEIKAEQEERKKQAEEMKQRKAAFKELQSTFK

SEQ ID NO: 16466 - protein, 222 aa, Homo sapiens
MAAGSRTSLLLAFALLCLPWLQEAGAVQTVPLSRLFKEAMLQAHRAHQLAIDTYQEFISSWGMEAYITKEQKYSFLHDSQTSFCFSDSIPTSSNMEETQQKSNLELLHISLLLIESRLEPVRFLRSTFTNNLVYDTSDSDDYHLLKDLEEGIQMLMGRLEDGSHLTGQTLKQTYSKFDTNSHNHDALLKNYGLLHCFRKDMDKVETFLRMVQCRSVEGSCGF

SEQ ID NO: 16467 - protein, 199 aa, Homo sapiens
MAAGSRTSLLLAFALLCLPWLQEAGAVQTVPLSRLFKEAMLQAHRAHQLAIDTYQEFISSWGMDSIPTSSNMEETQQKSNLELLHISLLLIESRLEPVRFLRSTFTNNLVYDTSDSDDYHLLKDLEEGIQMLMGRLEDGSHLTGQTLKQTYSKFDTNSHNHDALLKNYGLLHCFRKDMDKVETFLRMVQCRSVEGSCGF

SEQ ID NO: 16468 - protein, 139 aa, Homo sapiens
MAADSIPTSSNMEETQQKSNLELLHISLLLIESRLEPVRFLRSTFTNNLVYDTSDSDDYHLLKDLEEGIQMLMGRLEDGSHLTGQTLKQTYSKFDTNSHNHDALLKNYGLLHCFRKDMDKVETFLRMVQCRSVEGSCGF

SEQ ID NO: 16469 - protein, 128 aa, Homo sapiens
MEETQQKSNLELLHISLLLIESRLEPVRFLRSTFTNNLVYDTSDSDDYHLLKDLEEGIQMLMGRLEDGSHLTGQTLKQTYSKFDTNSHNHDALLKNYGLLHCFRKDMDKVETFLRMVQCRSVEGSCGF

SEQ ID NO: 16470 - protein, 777 aa, Homo sapiens
MEEPGATPQPYLGLVLEELRRVVAALPESMRPDENPYGFPSELVVCAAVIGFFVVLLFLWRSFRSVRSRLYVGREQKLGATLSGLIEEKCKLLEKFSLIQKEYEGYEVESSLEDASFEKAAAEEARSLEATCEKLNRSNSELEDEILCLEKDLKEEKSKHSQQDELMADISKSIQSLEDESKSLKSQIAEAKIICKTFKMSEERRAIAIKDALNENSQLQTSHKQLFQQEAEVWKGQVSELNKQKITFEDSKVHAEQVLNDKENHIKTLTGHLPMMKDQAAVLEEDTTDDDNLELEVNSQWENGANLDDPLKGALKKLIHAAKLNVSLKSLEGERNHIIIQLSEVDKTKEELTEHIKNLQTQQASLQSENIYFESENQKLQQKLKIMTEFYQENEMKLYRKLTVEENYRIEEEEKLSRVEEKISRATEGLETYRKLAKDLEEELERTVHFYQKQVISYEKRGHDNWLAARTAERNLSDLRKENAHNKQKLTETELKFELLEKDPNALDVSNTAFGREHSPCSPSPLGRPSSETRAFPSPQTLLEDPLRLSPVLPGGGGRGPSSPGNPLDHQITNERGEPSYDRLIDPHRAPSDTGSLSSPVEQDRRMMFPPPGQSYPDSTLPPQREDRFYSNSERLSGPAEPRSFKMTSLDKMDRSMPSEMESSRNDAKDDLGNLNVPDSSLPAENEATGPGFIPPPLAPVRGPLFPVDTRGPFMRRGPPFPPPPPGTMFGASRGYFPPRDFPGPPHAPFAMRNIYPPRGLPPYLHPRPGFYPNPTF

SEQ ID NO: 16471 - protein, 264 aa, Homo sapiens
MLRLLRLALAFYGRTADPAERQGPQQQGLPQGDTQLTTVQGVVTSFCGDYGMIDESIYFSSDVVTGNVPLKVGQKVNVVVEEDKPHYGLRAIKVDVVPRHLYGAGPSDSGTRVLIGCVTSINEDNIYISNSIYFSIAIVSEDFVPYKGDLLEVEYSTEPGISNIKATSVKPIRCIHTEEVCITSVHGRNGVIDYTIFFTLDSVKLPDGYVPQVDDIVNVVMVESIQFCFIWRAISITPVHKSSSGFQDDGGLGRPKRERRSQSI

SEQ ID NO: 16472 - protein, 242 aa, Homo sapiens
MLRLLRLALAFYGRTADPAERQGPQQQGLPQGDTQLTTVQGVVTSFCGDYGMIDESIYFSSDVVTGNVPLKVGQKVNVVVEEDKPHYGLRAIKVDVVPRHLYGAGPSDSGTRVLIGCVTSINEDNIYISNSIYFSIAIVSEDFVPYKGDLLEVEYSTEPGISNIKATSVKPIRCIHTEEVCITSVHGRNGVIDYTIFFTLDSVKLPDGYVPQVDDIVNVVMVESIQFCFIWRAISITPVHKS

SEQ ID NO: 16473 - protein, 315 aa, Homo sapiens
MHGHGGYDSDFSDDERCGESSKRKKRTVEDDLLLQKPFQKEKHGKVAHKQVAAELLDREEARNRRFHLIAMDAYQRHTKFVNDYILYYGGKKEDFKRLGENDKTDLDVIRENHRFLWNEEDEMDMTWEKRLAKKYYDKLFKEYCIADLSKYKENKFGFRWRVEKEVISGKGQFFCGNKYCDKKEGLKSWEVNFGYIEHGEKRNALVKLRLCQECSIKLNFHHRRKEIKSKKRKDKTKKDCEESSHKKSRLSSAEEASKKKDKGHSSSKKSEDSLLRNSDEEESASESELWKGPLPETDEKSQEEEFDEYFQDLFL

SEQ ID NO: 16474 - protein, 276 aa, Homo sapiens
MHGHGGYDSDFSDDERCGESSKRKKRTVEDDLLLQKPFQKEKHGKVAHKQVAAELLDREEARNRRFHLIAMDAYQRHTKFVNDYILYYGGKKEDFKRLGENDKTDLDVIRENHRFLWNEEDEMDMTWEKRLAKKYYDKLFKEYCIADLSKYKENKFGFRWRVEKEVISGKGQFFCGNKYCDKKEGLKSWEVNFGYIEHGEKRNALVKLRLCQECSIKLNFHHRRKEIKSKKRKDKTKKDCEESSHKKSRLSSAEEASKKKDKGHSSSKKSEDSLLN

SEQ ID NO: 16475 - protein, 315 aa, Homo sapiens
MHGHGGYDSDFSDDERCGESSKRKKRTVEDDLLLQKPFQKEKHGKVAHKQVAAELLDREEARNRRFHLIAMDAYQRHTKFVNDYILYYGGKKEDFKRLGENDKTDLDVIRENHRFLWNEEDEMDMTWEKRLAKKYYDKLFKEYCIADLSKYKENKFGFRWRVEKEVISGKGQFFCGNKYCDKKEGLKSWEVNFGYIEHGEKRNALVKLRLCQECSIKLNFHHRRKEIKSKKRKDKTKKDCEESSHKKSRLSSAEEASKKKDKGHSSSKKSEDSLLRRMLEELQMFTWEKSERMGGKRLIIIIGEELSANVTTLKL

SEQ ID NO: 16476 - protein, 292 aa, Homo sapiens
MHGHGGYDSDFSDDERCGESSKRKKRTVEDDLLLQKPFQKEKHGKVAHKQVAAELLDREEARNRRFHLIAMDAYQRHTKFVNDYILYYGGKKEDFKRLGENDKTDLDVIRENHRFLWNEEDEMDMTWEKRLAKKYYDKLFKEYCIADLSKYKENKFGFRWRVEKEVISGKGQFFCGNKYCDKKEGLKSWEVNFGYIEHGEKRNALVKLRLCQECSIKLNFHHRRKEIKSKKRKDKTKKDCEESSHKKSRLSSAEEASKKKDKGHSSSKKSEDSLLKTYFVGLLSESNEKTYM

SEQ ID NO: 16477 - protein, 313 aa, Homo sapiens
MHGHGGYDSDFSDDERCGESSKRKKRTVEDDLLLQKPFQKEKHGKVAHKQVAAELLDREEARNRRFHLIAMDAYQRHTKFVNDYILYYGGKKEDFKRLGENDKTDLDVIRENHRFLWNEEDEMDMTWEKRLAKKYYDKLFKEYCIADLSKYKENKFGFRWRVEKEVISGKGQFFCGNKYCDKKEGLKSWEVNFGYIEHGEKRNALVKLRLCQECSIKLNFHHRRKEIKSKKRKDKTKKDCEESSHKKSRLSSAEEASKKKDKGHSSSKKSEDSLLNGVMLFHPGWSAVARSQLTAAPASQVQTNNHYWRGVVC

SEQ ID NO: 16478 - protein, 461 aa, Homo sapiens
MQRVNMIMAESPGLITICLLGYLLSAECTVFLDHENANKILNRPKRYNSGKLEEFVQGNLERECMEEKCSFEEAREVFENTERTTEFWKQYVDGDQCESNPCLNGGSCKDDINSYECWCPFGFEGKNCELDVTCNIKNGRCEQFCKNSADNKVVCSCTEGYRLAENQKSCEPAVPFPCGRVSVSQTSKLTRAETVFPDVDYVNSTEAETILDNITQSTQSFNDFTRVVGGEDAKPGQFPWQVVLNGKVDAFCGGSIVNEKWIVTAAHCVETGVKITVVAGEHNIEETEHTEQKRNVIRIIPHHNYNAAINKYNHDIALLELDEPLVLNSYVTPICIADKEYTNIFLKFGSGYVSGWGRVFHKGRSALVLQYLRVPLVDRATCLRSTKFTIYNNMFCAGFHEGGRDSCQGDSGGPHVTEVEGTSFLTGIISWGEECAMKGKYGIYTKVSRYVNWIKEKTKLT

SEQ ID NO: 16479 - protein, 423 aa, Homo sapiens
MQRVNMIMAESPGLITICLLGYLLSAECTVFLDHENANKILNRPKRYNSGKLEEFVQGNLERECMEEKCSFEEAREVFENTERTTEFWKQYVDVTCNIKNGRCEQFCKNSADNKVVCSCTEGYRLAENQKSCEPAVPFPCGRVSVSQTSKLTRAETVFPDVDYVNSTEAETILDNITQSTQSFNDFTRVVGGEDAKPGQFPWQVVLNGKVDAFCGGSIVNEKWIVTAAHCVETGVKITVVAGEHNIEETEHTEQKRNVIRIIPHHNYNAAINKYNHDIALLELDEPLVLNSYVTPICIADKEYTNIFLKFGSGYVSGWGRVFHKGRSALVLQYLRVPLVDRATCLRSTKFTIYNNMFCAGFHEGGRDSCQGDSGGPHVTEVEGTSFLTGIISWGEECAMKGKYGIYTKVSRYVNWIKEKTKLT

SEQ ID NO: 16480 - protein, 433 aa, Homo sapiens
MGDWSFLGNILEEVNEHSTVIGRVWLTVLFIFRILILGTAAEFVWGDEQSDFVCNTQQPGCENVCYDEAFPISHIRLWVLQIIFVSTPSLMYVGHAVHYVRMEEKRKSREAEELGQQAGTNGGPDQGSVKKSSGSKGTKKFRLEGTLLRTYICHIIFKTLFEVGFIVGHYFLYGFRILPLYRCSRWPCPNVVDCFVSRPTEKTIFILFMLSVASVSLFLNVMELGHLGLKGIRSALKRPVEQPLGEIPEKSLHSIAVSSIQKAKGYQLLEEEKIVSHYFPLTEVGMVETSPLPAKPFNQFEEKISTGPLGDLSRGYQETLPSYAQVGAQEVEGEGPPAEEGAEPEVGEKKEEAERLTTEEQEKVAVPEGEKVETPGVDKEGEKEEPQSEKVSKQGLPAEKTPSLCPELTTDDARPLSRLSKASSRARSDDLTV

SEQ ID NO: 16481 - protein, 1253 aa, Homo sapiens
MAAQVTLEDALSNVDLLEELPLPDQQPCIEPPPSSLLYQPNFNTNFEDRNAFVTGIARYIEQATVHSSMNEMLEEGQEYAVMLYTWRSCSRAIPQVKCNEQPNRVEIYEKTVEVLEPEVTKLMNFMYFQRNAIERFCGEVRRLCHAERRKDFVSEAYLITLGKFINMFAVLDELKNMKCSVKNDHSAYKRAAQFLRKMADPQSIQESQNLSMFLANHNKITQSLQQQLEVISGYEELLADIVNLCVDYYENRMYLTPSEKHMLLKVMGFGLYLMDGSVSNIYKLDAKKRINLSKIDKYFKQLQVVPLFGDMQIELARYIKTSAHYEENKSRWTCTSSGSSPQYNICEQMIQIREDHMRFISELARYSNSEVVTGSGRQEAQKTDAEYRKLFDLALQGLQLLSQWSAHVMEVYSWKLVHPTDKYSNKDCPDSAEEYERATRYNYTSEEKFALVEVIAMIKGLQVLMGRMESVFNHAIRHTVYAALQDFSQVTLREPLRQAIKKKKNVIQSVLQAIRKTVCDWETGHEPFNDPALRGEKDPKSGFDIKVPRRAVGPSSTQLYMVRTMLESLIADKSGSKKTLRSSLEGPTILDIEKFHRESFFYTHLINFSETLQQCCDLSQLWFREFFLELTMGRRIQFPIEMSMPWILTDHILETKEASMMEYVLYSLDLYNDSAHYALTRFNKQFLYDEIEAEVNLCFDQFVYKLADQIFAYYKVMAGSLLLDKRLRSECKNQGATIHLPPSNRYETLLKQRHVQLLGRSIDLNRLITQRVSAAMYKSLELAIGRFESEDLTSIVELDGLLEINRMTHKLLSRYLTLDGFDAMFREANHNVSAPYGRITLHVFWELNYDFLPNYCYNGSTNRFVRTVLPFSQEFQRDKQPNAQPQYLHGSKALNLAYSSIYGSYRNFVGPPHFQVICRLLGYQGIAVVMEELLKVVKSLLQGTILQYVKTLMEVMPKICRLPRHEYGSPGILEFFHHQLKDIVEYAELKTVCFQNLREVGNAILFCLLIEQSLSLEEVCDLLHAAPFQNILPRVHVKEGERLDAKMKRLESKYAPLHLVPLIERLGTPQQIAIAREGDLLTKERLCCGLSMFEVILTRIRSFLDDPIWRGPLPSNGVMHVDECVEFHRLWSAMQFVYCIPVGTHEFTVEQCFGDGLHWAGCMIIVLLGQQRRFAVLDFCYHLLKVQKHDGKDEIIKNVPLKKMVERIRKFQILNDEIITILDKYLKSGDGEGTPVEHVRCFQPPIHQSLASS

SEQ ID NO: 16482 - protein, 822 aa, Homo sapiens
MAESLGSAELLRQLKSLGMERLLHAVNTFLRQSCTYLPLLTFGGKTSFVSLDVYGTEANCSATSCSFPKAAATWPRRQAPGPLGELVRGPPDQGVAEQSFSHGLFEFGITNVPCIFSPPQMFPWIIQLYMVRTMLESLIADKSGSKKTLRSSLEGPTILDIEKFHRESFFYTHLINFSETLQQCCDLSQLWFREFFLELTMGRRIQFPIEMSMPWILTDHILETKEASMMEYVLYSLDLYNDSAHYALTRFNKQFLYDEIEAEVNLCFDQFVYKLADQIFAYYKVMAGSLLLDKRLRSECKNQGATIHLPPSNRYETLLKQRHVQLLGRSIDLNRLITQRVSAAMYKSLELAIGRFESEDLTSIVELDGLLEINRMTHKLLSRYLTLDGFDAMFREANHNVSAPYGRITLHVFWELNYDFLPNYCYNGSTNRFVRTVLPFSQEFQRDKQPNAQPQYLHGSKALNLAYSSIYGSYRNFVGPPHFQVICRLLGYQGIAVVMEELLKVVKSLLQGTILQYVKTLMEVMPKICRLPRHEYGSPGILEFFHHQLKDIVEYAELKTVCFQNLREVGNAILFCLLIEQSLSLEEVCDLLHAAPFQNILPRVHVKEGERLDAKMKRLESKYAPLHLVPLIERLGTPQQIAIAREGDLLTKERLCCGLSMFEVILTRIRSFLDDPIWRGPLPSNGVMHVDECVEFHRLWSAMQFVYCIPVGTHEFTVEQCFGDGLHWAGCMIIVLLGQQRRFAVLDFCYHLLKVQKHDGKDEIIKNVPLKKMVERIRKFQILNDEIITILDKYLKSGDGEGTPVEHVRCFQPPIHQSLASS

SEQ ID NO: 16483 - protein, 447 aa, Homo sapiens
MTHKLLSRYLTLDGFDAMFREANHNVSAPYGRITLHVFWELNYDFLPNYCYNGSTNRFVRTVLPFSQEFQRDKQPNAQPQYLHGSKALNLAYSSIYGSYRNFVGPPHFQVICRLLGYQGIAVVMEELLKVVKSLLQGTILQYVKTLMEVMPKICRLPRHEYGSPGILEFFHHQLKDIVEYAELKTVCFQNLREVGNAILFCLLIEQSLSLEEVCDLLHAAPFQNILPRVHVKEGERLDAKMKRLESKYAPLHLVPLIERLGTPQQIAIAREGDLLTKERLCCGLSMFEVILTRIRSFLDDPIWRGPLPSNGVMHVDECVEFHRLWSAMQFVYCIPVGTHEFTVEQCFGDGLHWAGCMIIVLLGQQRRFAVLDFCYHLLKVQKHDGKDEIIKNVPLKKMVERIRKFQILNDEIITILDKYLKSGDGEGTPVEHVRCFQPPIHQSLASS

SEQ ID NO: 16484 - protein, 59 aa, Homo sapiens
MEEPTPEPVYVDVDKGLTLACFVFLCLFLVVMIIRCAKVIMDPYSAIPTSTWEEQHLDD

SEQ ID NO: 16485 - protein, 261 aa, Homo sapiens
MDWGTLHTFIGGVNKHSTSIGKVWITVIFIFRVMILVVAAQEVWGDEQEDFVCNTLQPGCKNVCYDHFFPVSHIRLWALQLIFVSTPALLVAMHVAYYRHETTRKFRRGEKRNDFKDIEDIKKQKVRIEGSLWWTYTSSIFFRIIFEAAFMYVFYFLYNGYHLPWVLKCGIDPCPNLVDCFISRPTEKTVFTIFMISASVICMLLNVAELCYLLLKVCFRRSKRAQTQKNHPNHALKESKQNEMNELISDSGQNAITGFPS

SEQ ID NO: 16486 - protein, 589 aa, Homo sapiens
MTGLLKRKFDQLDEDNSSVSSSSSSSGCQSRSCSPSSSVSRAWDSEEEGPWDQMPLPDRDFCGPRSFTPLSILKRARRERPGRVAFDGITVFYFPRCQGFTSVPSRGGCTLGMALRHSACRRFSLAEFAQEQARARHEKLRQRLKEEKLEMLQWKLSAAGVPQAEAGLPPVVDAIDDASVEEDLAVAVAGGRLEEVSFLQPYPARRRRALLRASGVRRIDREEKRELQALRQSREDCGCHCDRICDPETCSCSLAGIKCQMDHTAFPCGCCREGCENPMGRVEFNQARVQTHFIHTLTRLQLEQEAESFRELEAPAQGSPPSPGEEALVPTFPLAKPPMNNELGDNSCSSDMTDSSTASSSASGTSEAPDCPTHPGLPGPGFQPGVDDDSLARILSFSDSDFGGEEEEEEEGSVGNLDNLSCFHPADIFGTSDPGGLASWTHSYSGCSFTSGVLDENANLDASCFLNGGLEGSREGSLPGTSVPPSMDAGRSSSVDLSLSSCDSFELLQALPDYSLGPHYTSQKVSDSLDNIEAPHFPLPGLSPPGDASSCFLESLMGFSEPAAEALDPFIDSQFEDTVPASLMEPVPV

SEQ ID NO: 16487 - protein, 98 aa, Homo sapiens
MNQTAILICCLIFLTLSGIQGVPLSRTVRCTCISISNQPVNPRSLEKLEIIPASQFCPRVEIIATMKKKGEKRCLNPESKAIKNLLKAVSKERSKRSP

SEQ ID NO: 16488 - protein, 577 aa, Homo sapiens
MAGLTVRDPAVDRSLRSVFVGNIPYEATEEQLKDIFSEVGPVVSFRLVYDRETGKPKGYGFCEYQDQETALSAMRNLNGREFSGRALRVDNAASEKNKEELKSLGTGAPVIESPYGETISPEDAPESISKAVASLPPEQMFELMKQMKLCVQNSPQEARNMLLQNPQLAYALLQAQVVMRIVDPEIALKILHRQTNIPTLIAGNPQPVHGAGPGSGSNVSMNQQNPQAPQAQSLGGMHVNGAPPLMQASMQGGVPAPGQMPAAVTGPGPGSLAPGGGMQAQVGMPGSGPVSMERGQVPMQDPRAAMQRGSLPANVPTPRGLLGDAPNDPRGGTLLSVTGEVEPRGYLGPPHQGPPMHHVPGHESRGPPPHELRGGPLPEPRPLMAEPRGPMLDQRGPPLDGRGGRDPRGIDARGMEARAMEARGLDARGLEARAMEARAMEARAMEARAMEARAMEVRGMEARGMDTRGPVPGPRGPIPSGMQGPSPINMGAVVPQGSRQVPVMQGTGMQGASIQGGSQPGGFSPGQNQVTPQDHEKAALIMQVLQLTADQIAMLPPEQRQSILILKEQIQKSTGAP

SEQ ID NO: 16489 - protein, 560 aa, Homo sapiens
MAGLTVRDPAVDRSLRSVFVGNIPYEATEEQLKDIFSEVGPVVSFRLVYDRETGKPKGYGFCEYQDQETALSAMRNLNGREFSGRALRVDNAASEKNKEELKSLGTGAPVIESPYGETISPEDAPESISKAVASLPPEQMFELMKQMKLCVQNSPQEARNMLLQNPQLAYALLQAQVVMRIVDPEIALKILHRQTNIPTLIAGNPQPVHGAGPGSGSNVSMNQQNPQAPQAQSLGGVPAPGQMPAAVTGPGPGSLAPGGGMQAQVGMPGSGPVSMERGQVPMQDPRAAMQRGSLPANVPTPRGLLGDAPNDPRGGTLLSVTGEVEPRGYLGPPHQGPPMHHVPGHESRGPPPHELRGGPLPEPRPLMAEPRGPMLDQRGPPLDGRGGRDPRGIDARGMEARAMEARGLDARGLEARAMEARAMEARAMEARAMEARAMEVRGMEARGMDTRGPVPGPRGPIPSGMQGPSPINMGAVVPQGSRQVPVMQGTGMQGASIQGGSQPGGFSPGQNQVTPQDHEKAALIMQVLQLTADQIAMLPPEQRQSILILKEQIQKSTGAP

SEQ ID NO: 16490 - protein, 431 aa, Homo sapiens
MYRTKVGLKDRQQLYKLIISQLLYDGYISIANGLINEIKPQSVCAPSEQLLHLIKLGMENDDTAVQYAIGRSDTVAPGTGIDLEFDADVQTMSPEASEYETCYVTSHKGPCRVATYSRDGQLIATGSADASIKILDTERMLAKSAMPIEVMMNETAQQNMENHPVIRTLYDHVDEVTCLAFHPTEQILASGSRDYTLKLFDYSKPSAKRAFKYIQEAEMLRSISFHPSGDFILVGTQHPTLRLYDINTFQCFVSCNPQDQHTDAICSVNYNSSANMYVTGSKDGCIKLWDGVSNRCITTFEKAHDGAEVCSAIFSKNSKYILSSGKDSVAKLWEISTGRTLVRYTGAGLSGRQVHRTQAVFNHTEDYVLLPDERTISLCCWDSRTAERRNLLSLGHNNIVRCIVHSPTNPGFMTCSDDFRARFWYRRSTTD

SEQ ID NO: 16491 - protein, 254 aa, Homo sapiens
MGRDLRPGSRVLLLLLLLLLVYLTQPGNGNEGSVTGSCYCGKRISSDSPPSVQFMNRLRKHLRAYHRCLYYTRFQLLSWSVCGGNKDPWVQELMSCLDLKECGHAYSGIVAHQKHLLPTSPPISQASEGASSDIHTPAQMLLSTLQSTQRPTLPVGSLSSDKELTRPNETTIHTAGHSLAAGPEAGENQKQPEKNAGPTARTSATVPVLCLLAIIFILTAALSYVLCKRRRGQSPQSSPDLPVHYIPVAPDSNT

SEQ ID NO: 16492 - protein, 1256 aa, Homo sapiens
MLFPLQVAAVTSSVRDDPLEHCVSPRTRARSPEICKMADNLDEFIEEQKARLAEDKAELESDPPYMEMKGKLSAKLSENSKILISMAKENIPPNSQQTRGSLGIDYGLSLPLGEDYERKKHKLKEELRQDYRRYLTQGITQGKRKKNFLSTSETDPSTLGVSLPIGERLSAKERLKLERNKEYNQFLRGKEESSEKFRQVEKSTEPKSQRNKKPIGQVKPDLTSQIQTSCENSEGPRKDVLTPSEAYEELLNQRRLEEDRYRQLDDEIELRNRRIIKKANEEVGISNLKHQRFASKAGIPDRRFHRFNEDRVFDRRYHRPDQDPEVSEEMDERFRYESDFDRRLSRVYTNDRMHRNKRGNMPPMEHDGDVIEQSNIRISSAENKSAPDNETSKSANQDTCSPFAGMLFGGEDRELIQRRKEKYRLELLEQMAEQQRNKRREKDLELRVAASGAQDPEKSPDRLKQFSVAPRHFEEMIPPERPRIAFQTPLPPLSAPSVPPIPSVHPVPSQNEDLRSGLSSALGEMVSPRIAPLPPPPLLPPLATNYRTPYDDAYYFYGSRNTFDPSLAYYGSGMMGVQPAAYVSAPVTHQLAQPVVNTVGQNELKITSDQVINSGLIFEDKPKPSKQSLQSYQEALQQQIREREERRKKEREEKEEYEAKLEAEMRTYNPWGKGGGGAPLRDAKGNLITDLNRMHRQNIDAYHNPDARTYEDKRAVVSLDPNLATSNAENLEDAANKSSGHMQTQSSPFARGNVFGEPPTELQIKQQELYKNFLRFQIEEKKQREEAERERLRIAEEKEERRLAEQRARIQQEYEEEQEKKREKEEEQRLKNEEHIRLAEERQKEAERKKKEEEEKYNLQLQHYCERDNLIGEETKHMRQPSPIVPALQNKIASKLQRPPSVDSIIRSFIHESSMSRAQSPPVPARKNQLRAEEEKKNVIMELSEMRKQLRSEERRLQERLLHMDSDDEIPIRKKERNPMDIFDMARHRLQAPVRRQSPKGLDAATFQNVHDFNELKDRDSETRVDLKFMYLDPPRDHHTLEIQQQALLREQQKRLNRIKMQEGAKVDLDAIPSAKVREQRMPRDDTSDFLKNSLLESDSAFIGAYGETYPAIEDDVLPPPSQLPSARERRRNKWKGLDIDSSRPNVAPDGLSLKSISSVNVDELRVRNEERMRRLNEFHNKPINTDDESSLVDPDDIMKHIGDDGSNSVATEPWLRPGTSETLKRFMAEQLNQEQQQIPGKPGTFTWQGLSTAHG

SEQ ID NO: 16493 - protein, 1221 aa, Homo sapiens
MLFPLQVAAVTSSVRDDPLEHCVSPRTRARSPEICKMADNLDEFIEEQKARLAEDKAELESDPPYMEMKGKLSAKLSENSKILISMAKENIPPNSQQTRGSLGIDYGLSLPLGEDYERKKHKLKEELRQDYRRYLTQERLKLERNKEYNQFLRGKEESSEKFRQVEKSTEPKSQRNKKPIGQVKPDLTSQIQTSCENSEGPRKDVLTPSEAYEELLNQRRLEEDRYRQLDDEIELRNRRIIKKANEEVGISNLKHQRFASKAGIPDRRFHRFNEDRVFDRRYHRPDQDPEVSEEMDERFRYESDFDRRLSRVYTNDRMHRNKRGNMPPMEHDGDVIEQSNIRISSAENKSAPDNETSKSANQDTCSPFAGMLFGGEDRELIQRRKEKYRLELLEQMAEQQRNKRREKDLELRVAASGAQDPEKSPDRLKQFSVAPRHFEEMIPPERPRIAFQTPLPPLSAPSVPPIPSVHPVPSQNEDLRSGLSSALGEMVSPRIAPLPPPPLLPPLATNYRTPYDDAYYFYGSRNTFDPSLAYYGSGMMGVQPAAYVSAPVTHQLAQPVVNTVGQNELKITSDQVINSGLIFEDKPKPSKQSLQSYQEALQQQIREREERRKKEREEKEEYEAKLEAEMRTYNPWGKGGGGAPLRDAKGNLITDLNRMHRQNIDAYHNPDARTYEDKRAVVSLDPNLATSNAENLEDAANKSSGHMQTQSSPFARGNVFGEPPTELQIKQQELYKNFLRFQIEEKKQREEAERERLRIAEEKEERRLAEQRARIQQEYEEEQEKKREKEEEQRLKNEEHIRLAEERQKEAERKKKEEEEKYNLQLQHYCERDNLIGEETKHMRQPSPIVPALQNKIASKLQRPPSVDSIIRSFIHESSMSRAQSPPVPARKNQLRAEEEKKNVIMELSEMRKQLRSEERRLQERLLHMDSDDEIPIRKKERNPMDIFDMARHRLQAPVRRQSPKGLDAATFQNVHDFNELKDRDSETRVDLKFMYLDPPRDHHTLEIQQQALLREQQKRLNRIKMQEGAKVDLDAIPSAKVREQRMPRDDTSDFLKNSLLESDSAFIGAYGETYPAIEDDVLPPPSQLPSARERRRNKWKGLDIDSSRPNVAPDGLSLKSISSVNVDELRVRNEERMRRLNEFHNKPINTDDESSLVDPDDIMKHIGDDGSNSVATEPWLRPGTSETLKRFMAEQLNQEQQQIPGKPGTFTWQGLSTAHG

SEQ ID NO: 16494 - protein, 876 aa, Homo sapiens
MDERFRYESDFDRRLSRVYTNDRMHRNKRGNMPPMEHDGDVIEQSNIRISSAENKSAPDNETSKSANQDTCSPFAGMLFGGEDRELIQRRKEKYRLELLEQMAEQQRNKRREKDLELRVAASGAQDPEKSPDRLKQFSVAPRHFEEMIPPERPRIAFQTPLPPLSAPSVPPIPSVHPVPSQNEDLRSGLSSALGEMVSPRIAPLPPPPLLPPLATNYRTPYDDAYYFYGSRNTFDPSLAYYGSGMMGVQPAAYVSAPVTHQLAQPVVNTVGQNELKITSDQVINSGLIFEDKPKPSKQSLQSYQEALQQQIREREERRKKEREEKEEYEAKLEAEMRTYNPWGKGGGGAPLRDAKGNLISHMQTQSSPFARGNVFGEPPTELQIKQQELYKNFLRFQIEEKKQREEAERERLRIAEEKEERRLAEQRARIQQEYEEEQEKKREKEEEQRLKNEEHIRLAEERQKEAERKKKEEEEKYNLQLQHYCERDNLIGEETKHMRQPSPIVPALQNKIASKLQRPPSVDSIIRSFIHESSMSRAQSPPVPARKNQLRAEEEKKNVIMELSEMRKQLRSEERRLQERLLHMDSDDEIPIRKKERNPMDIFDMARHRLQAPVRRQSPKGLDAATFQNVHDFNELKDRDSETRVDLKFMYLDPPRDHHTLEIQQQALLREQQKRLNRIKMQEGAKVDLDAIPSAKVREQRMPRDDTSDFLKNSLLESDSAFIGAYGETYPAIEDDVLPPPSQLPSARERRRNKWKGLDIDSSRPNVAPDGLSLKSISSVNVDELRVRNEERMRRLNEFHNKPINTDDESSLVDPDDIMKHIGDDGSNSVATEPWLRPGTSETLKRFMAEQLNQEQQQIPGKPGTFTWQGLSTAHG

SEQ ID NO: 16495 - protein, 398 aa, Homo sapiens
MSQHRHQRHSRVISSSPVDTTSVGFCPTFKKFKRNDDECRAFVKRVIMSRFFKIIMISTVTSNAFFMALWTSYDIRYRLFRLLEFSEIFFVSICTSELSMKVYVDPINYWKNGYNLLDVIIIIVMFLPYALRQLMGKQFTYLYIADGMQSLRILKLIGYSQGIRTLITAVGQTVYTVASVLLLLFLLMYIFAILGFCLFGSPDNGDHDNWGNLAAAFFTLFSLATVDGWTDLQKQLDNREFALSRAFTIIFILLASFIFLNMFVGVMIMHTEDSIRKFERELMLEQQEMLMGEKQVILQRQQEEISRLMHIQKNADCTSFSELVENFKKTLSHTDPMVLDDFGTSLPFIDIYFSTLDYQDTTVHKLQELYYEIVHVLSLMLEDLPQEKPQSLEKVDEK

SEQ ID NO: 16496 - protein, 189 aa, Homo sapiens; identical to SEQ ID NO: 14927

SEQ ID NO: 16497 - protein, 454 aa, Homo sapiens
MSTFRQEDVEDHYEMGEELGSGQFAIVRKCRQKGTGKEYAAKFIKKRRLSSSRRGVSREEIEREVNILREIRHPNIITLHDIFENKTDVVLILELVSGGELFDFLAEKESLTEDEATQFLKQILDGVHYLHSKRIAHFDLKPENIMLLDKNVPNPRIKLIDFGIAHKIEAGNEFKNIFGTPEFVAPEIVNYEPLGLEADMWSIGVITYILLSGASPFLGETKQETLTNISAVNYDFDEEYFSNTSELAKDFIRRLLVKDPKRRMTIAQSLEHSWIKAIRRRNVRGEDSGRKPERRRLKTTRLKEYTIKSHSSLPPNNSYADFERFSKVLEEAAAAEEGLRELQRSRRLCHEDVEALAAIYEEKEAWYREESDSLGQDLRRLRQELLKTEALKRQAQEEAKGALLGTSGLKRRFSRLENRYEALAKQVASEMRFVQDLVRALEQEKLQGVECGLR

SEQ ID NO: 16498 - protein, 322 aa, Homo sapiens
MSTFRQEDVEDHYEMGEELGSGQFAIVRKCRQKGTGKEYAAKFIKKRRLSSSRRGVSREEIEREVNILREIRHPNIITLHDIFENKTDVVLILELVSGGELFDFLAEKESLTEDEATQFLKQILDGVHYLHSKRIAHFDLKPENIMLLDKNVPNPRIKLIDFGIAHKIEAGNEFKNIFGTPEFVAPEIVNYEPLGLEADMWSIGVITYILLSGASPFLGETKQETLTNISAVNYDFDEEYFSNTSELAKDFIRRLLVKDPKRRMTIAQSLEHSWIKAIRRRNVRGEDSGRKPERRRLKTTRLKEYTIKSHSSASPIVAPVDA

SEQ ID NO: 16499 - protein, 594 aa, Homo sapiens
MSAGEVERLVSELSGGTGGDEEEEWLYGGPWDVHVHSDLAKDLDENEVERPEEENASANPPSGIEDETAENGVPKPKVTETEDDSDSDSDDDEDDVHVTIGDIKTGAPQYGSYGTAPVNLNIKTGGRVYGTTGTKVKGVDLDAPGSINGVPLLEVDLDSFEDKPWRKPGADLSDYFNYGFNEDTWKAYCEKQKRIRMGLEVIPVTSTTNKITAEDCTMEVTPGAEIQDGRFNLFKVQQGRTGNSEKETALPSTKAEFTSPPSLFKTGLPPSRNSTSSQSQTSTASRKANSSVGKWQDRYGRAESPDLRRLPGAIDVIGQTITISRVEGRRRANENSNIQVLSERSATEVDNNFSKPPPFFPPGAPPTHLPPPPFLPPPPTVSTAPPLIPPPGFPPPPGAPPPSLIPTIESGHSSGYDSRSARAFPYGNVAFPHLPGSAPSWPSLVDTSKQWDYYARREKDRDRERDRDRERDRDRDRERERTRERERERDHSPTPSVFNSDEERYRYREYAERGYERHRASREKEERHRERRHREKEETRHKSSRSNSRRRHESEEGDSHRRHKHKKSKRSKEGKEAGSEPAPEQESTEATPAE

SEQ ID NO: 16500 - protein, 520 aa, Homo sapiens
MSAGEVERLVSELSGGTGGDEEEEWLYGDENEVERPEEENASANPPSGIEDETAENGVPKPKVTETEDDSDSDSDDDEDDVHVTIGDIKTGAPQYGSYGTAPVNLNIKTGGRVYGTTGTKVKGVDLDAPGSINGVPLLEVDLDSFEDKPWRKPGADLSDYFNYGFNEDTWKAYCEKQKRIRMGLEVIPVTSTTNKITVQQGRTGNSEKETALPSTKAEFTSPPSLFKTGLPPSRRLPGAIDVIGQTITISRVEGRRRANENSNIQVLSERSATEVDNNFSKPPPFFPPGAPPTHLPPPPFLPPPPTVSTAPPLIPPPGFPPPPGAPPPSLIPTIESGHSSGYDSRSARAFPYGNVAFPHLPGSAPSWPSLVDTSKQWDYYARREKDRDRERDRDRERDRDRDRERERTRERERERDHSPTPSVFNSDEERYRYREYAERGYERHRASREKEERHRERRHREKEETRHKSSRSNSRRRHESEEGDSHRRHKHKKSKRSKEGKEAGSEPAPEQESTEATPAE

SEQ ID NO: 16501 - protein, 378 aa, Homo sapiens
MSAGEVERLVSELSGGTGGDEEEEWLYGDENEVERPEEENASANPPSGIEDETAENGVPKPKVTETEDDSDSDSDDDEDDVHVTIGDIKTGAPQYGSYGTAPVNLNIKTGGRVYGTTGTKVKGVDLDAPGSINGVPLLEVDLDSFEDKPWRKPGADLSDYFNYGFNEDTWKAYCEKQKRIRMGLEVIPVTSTTNKITAEDCTMEVTPGAEIQDGRFNLFKVQQGRTGNSEKETALPSTKAEFTSPPSLFKTGLPPSRNSTSSQSQTSTASRKANSSVGKWQDRYGRAESPDLRRLPGAIDVIGQTITISRVEGRRRANENSNIQVLSERSATEVDNNFSKPPPFFPPGAPPTHLPPPPFLPPPPTVSTAPPLIPPPGK

SEQ ID NO: 16502 - protein, 588 aa, Homo sapiens
MSAGEVERLVSELSGGTGGDEEEEWLYGDENEVERPEEENASANPPSGIEDETAENGVPKPKVTETEDDSDSDSDDDEDDVHVTIGDIKTGAPQYGSYGTAPVNLNIKTGGRVYGTTGTKVKGVDLDAPGSINGVPLLEVDLDSFEDKPWRKPGADLSDYFNYGFNEDTWKAYCEKQKRIRMGLEVIPVTSTTNKITAEDCTMEVTPGAEIQDGRFNLFKVQQGRTGNSEKETALPSTKAEFTSPPSLFKTGLPPSRNSTSSQSQTSTASRKANSSVGKWQDRYGRAESPDLRRLPGAIDVIGQTITISRVEGRRRANENSNIQVLSERSATEVDNNFSKPPPFFPPGAPPTHLPPPPFLPPPPTVSTAPPLIPPPGIPITVPPPGFPPPPGAPPPSLIPTIESGHSSGYDSRSARAFPYGNVAFPHLPGSAPSWPSLVDTSKQWDYYARREKDRDRERDRDRERDRDRDRERERTRERERERDHSPTPSVFNSDEERYRYREYAERGYERHRASREKEERHRERRHREKEETRHKSSRSNSRRRHESEEGDSHRRHKHKKSKRSKEGKEAGSEPAPEQESTEATPAE

SEQ ID NO: 16503 - protein, 153 aa, Homo sapiens
MLEKLMGADSLQLFRSRYTLGKIYFIGFQRSILLSKSENSLNSIAKETEEGRETVTRKEGWKRRHEDGYLEMAQRHLQRSLCPWVSYLPQPYAELEEVSSHVGKVFMARNYEFLAYEASKDRRQPLERMWTCNYNQQKDQSCNHKEITSTKAE

SEQ ID NO: 16504 - protein, 16 aa, Homo sapiens
MLEKLMGADSLQLFRV

SEQ ID NO: 16505 - protein, 82 aa, Homo sapiens
MAQRHLQRSLCPWVSYLPQPYAELEEVSSHVGKVFMARNYEFLAYEASKDRRQPLERMWTCNYNQQKDQSCNHKEITSTKAE

SEQ ID NO: 16506 - protein, 126 aa, Homo sapiens
MLEKLMGADSLQLFRSRYTLGKIYFIGFQRSILLSKSENSLNSIAKETEEGRETVTRKEGWKRRHEDGYLEMAQRHLQRSLCPWVSYLPQPYAEHSKVILNGNLHCHFKRISQIFAGHFMEGDTEA

SEQ ID NO: 16507 - protein, 77 aa, Homo sapiens
MATRSVLLALVVLNLLFYVPPGRSGPNVYIQKIFASCWRLQGTCRPKCLKNEQYRILCDTIHLCCVNPKYLPILTGK

SEQ ID NO: 16508 - protein, 314 aa, Homo sapiens
MVAPVWYLVAAALLVGFILFLTRSRGRAASAGQEPLHNEELAGAGRVAQPGPLEPEEPRAGGRPRRRRDLGSRLQAQRRAQRVAWAEADENEEEAVILAQEEEGVEKPAETHLSGKIGAKKLRKLEEKQARKAQREAEEAEREERKRLESQREAEWKKEEERLRLEEEQKEEEERKAREEQAQREHEEYLKLKEAFVVEEEGVGETMTEEQSQSFLTEFINYIKQSKVVLLEDLASQVGLRTQDTINRIQDLLAEGTITGVIDDRGKFIYITPEELAAVANFIRQRGRVSIAELAQASNSLIAWGRESPAQAPA

SEQ ID NO: 16509 - protein, 313 aa, Homo sapiens
MVAPVWYLVAAALLVGFILFLTRSRGRAASAGQEPLHNEELAGAGRVAQPGPLEPEEPRAGGRPRRRRDLGSRLQAQRRAQRVAWAEADENEEEAVILAQEEEGVEKPAETHLSGKIGAKKLRKLEEKQARKAQREAEEAEREERKRLESQREAEWKKEEERLRLEEEQKEEEERKAREEQAQREHEEYLKLKEAFVVEEEGVGETMTEEQSQSFLTEFINYIKQSKVVLLEDLASQVGLRTQVSPGTWPAVCSVARGLWLAERTCPKDRVLMHRLPCPQPRVSSAQKSPGTLGILHFSLIAWGRESPAQAPA

SEQ ID NO: 16510 - protein, 2725 aa, Homo sapiens
MMNNSGYSDAGLGLGDETDEMPSTEKDLAEDAPWKKIQQNTFTRWCNEHLKCVGKRLTDLQRDLSDGLRLIALLEVLSQKRMYRKFHPRPNFRQMKLENVSVALEFLEREHIKLVSIDSKAIVDGNLKLILGLIWTLILHYSISMPMWEDEDDEDARKQTPKQRLLGWIQNKVPQLPITNFNRDWQDGKALGALVDNCAPGLCPDWEAWDPNQPVENAREAMQQADDWLGVPQVIAPEEIVDPNVDEHSVMTYLSQFPKAKLKPGAPVRSKQLNPKKAIAYGPGIEPQGNTVLQPAHFTVQTVDAGVGEVLVYIEDPEGHTEEAKVVPNNDKDRTYAVSYVPKVAGLHKVTVLFAGQNIERSPFEVNVGMALGDANKVSARGPGLEPVGNVANKPTYFDIYTAGAGTGDVAVVIVDPQGRRDTVEVALEDKGDSTFRCTYRPAMEGPHTVHVAFAGAPITRSPFPVHVSEACNPNACRASGRGLQPKGVRVKEVADFKVFTKGAGSGELKVTVKGPKGTEEPVKVREAGDGVFECEYYPVVPGKYVVTITWGGYAIPRSPFEVQVSPEAGVQKVRAWGPGLETGQVGKSADFVVEAIGTEVGTLGFSIEGPSQAKIECDDKGDGSCDVRYWPTEPGEYAVHVICDDEDIRDSPFIAHILPAPPDCFPDKVKAFGPGLEPTGCIVDKPAEFTIDARAAGKGDLKLYAQDADGCPIDIKVIPNGDGTFRCSYVPTKPIKHTIIISWGGVNVPKSPFRVNVGEGSHPERVKVYGPGVEKTGLKANEPTYFTVDCSEAGQGDVSIGIKCAPGVVGPAEADIDFDIIKNDNDTFTVKYTPPGAGRYTIMVLFANQEIPASPFHIKVDPSHDASKVKAEGPGLNRTGVEVGKPTHFTVLTKGAGKAKLDVQFAGTAKGEVVRDFEIIDNHDYSYTVKYTAVQQGNMAVTVTYGGDPVPKSPFVVNVAPPLDLSKIKVQGLNSKVAVGQEQAFSVNTRGAGGQGQLDVRMTSPSRRPIPCKLEPGGGAEAQAVRYMPPEEGPYKVDITYDGHPVPGSPFAVEGVLPPDPSKVCAYGPGLKGGLVGTPAPFSIDTKGAGTGGLGLTVEGPCEAKIECQDNGDGSCAVSYLPTEPGEYTINILFAEAHIPGSPFKATIRPVFDPSKVRASGPGLERGKVGEAATFTVDCSEAGEAELTIEILSDAGVKAEVLIHNNADGTYHITYSPAFPGTYTITIKYGGHPVPKFPTRVHVQPAVDTSGVKVSGPGVEPHGVLREVTTEFTVDARSLTATGGNHVTARVLNPSGAKTDTYVTDNGDGTYRVQYTAYEEGVHLVEVLYDEVAVPKSPFRVGVTEGCDPTRVRAFGPGLEGGLVNKANRFTVETRGAGTGGLGLAIEGPSEAKMSCKDNKDGSCTVEYIPFTPGDYDVNITFGGRPIPGSPFRVPVKDVVDPGKVKCSGPGLGAGVRARVPQTFTVDCSQAGRAPLQVAVLGPTGVAEPVEVRDNGDGTHTVHYTPATDGPYTVAVKYADQEVPRSPFKIKVLPAHDASKVRASGPGLNASGIPASLPVEFTIDARDAGEGLLTVQILDPEGKPKKANIRDNGDGTYTVSYLPDMSGRYTITIKYGGDEIPYSPFRIHALPTGDASKCLVTVSIGGHGLGACLGPRIQIGQETVITVDAKAAGEGKVTCTVSTPDGAELDVDVVENHDGTFDIYYTAPEPGKYVITIRFGGEHIPNSPFHVLACDPLPHEEEPSEVPQLRQPYAPPRPGARPTHWATEEPVVPVEPMESMLRPFNLVIPFAVQKGELTGEVRMPSGKTARPNITDNKDGTITVRYAPTEKGLHQMGIKYDGNHIPGSPLQFYVDAINSRHVSAYGPGLSHGMVNKPATFTIVTKDAGEGGLSLAVEGPSKAEITCKDNKDGTCTVSYLPTAPGDYSIIVRFDDKHIPGSPFTAKITGDDSMRTSQLNVGTSTDVSLKITESDLSQLTASIRAPSGNEEPCLLKRLPNRHIGISFTPKEVGEHVVSVRKSGKHVTNSPFKILVGPSEIGDASKVRVWGKGLSEGHTFQVAEFIVDTRNAGYGGLGLSIEGPSKVDINCEDMEDGTCKVTYCPTEPGTYIINIKFADKHVPGSPFTVKVTGEGRMKESITRRRQAPSIATIGSTCDLNLKIPGNWFQMVSAQERLTRTFTRSSHTYTRTERTEISKTRGGETKREVRVEESTQVGGDPFPAVFGDFLGRERLGSFGSITRQQEGEASSQDMTAQVTSPSGKVEAAEIVEGEDSAYSVRFVPQEMGPHTVAVKYRGQHVPGSPFQFTVGPLGEGGAHKVRAGGTGLERGVAGVPAEFSIWTREAGAGGLSIAVEGPSKAEIAFEDRKDGSCGVSYVVQEPGDYEVSIKFNDEHIPDSPFVVPVASLSDDARRLTVTSLQETGLKVNQPASFAVQLNGARGVIDARVHTPSGAVEECYVSELDSDKHTIRFIPHENGVHSIDVKFNGAHIPGSPFKIRVGEQSQAGDPGLVSAYGPGLEGGTTGVSSEFIVNTLNAGSGALSVTIDGPSKVQLDCRECPEGHVVTYTPMAPGNYLIAIKYGGPQHIVGSPFKAKVTGPRLSGGHSLHETSTVLVETVTKSSSSRGSSYSSIPKFSSDASKVVTRGPGLSQAFVGQKNSFTVDCSKAGTNMMMVGVHGPKTPCEEVYVKHMGNRVYNVTYTVKEKGDYILIVKWGDESVPGSPFKVKVP

SEQ ID NO: 16511 - protein, 2692 aa, Homo sapiens
MMNNSGYSDAGLGLGDETDEMPSTEKDLAEDAPWKKIQQNTFTRWCNEHLKCVGKRLTDLQRDLSDGLRLIALLEVLSQKRMYRKFHPRPNFRQMKLENVSVALEFLEREHIKLVSIDSKAIVDGNLKLILGLIWTLILHYSISMPMWEDEDDEDARKQTPKQRLLGWIQNKVPQLPITNFNRDWQDGKALGALVDNCAPGLCPDWEAWDPNQPVENAREAMQQADDWLGVPQVIAPEEIVDPNVDEHSVMTYLSQFPKAKLKPGAPVRSKQLNPKKAIAYGPGIEPQGNTVLQPAHFTVQTVDAGVGEVLVYIEDPEGHTEEAKVVPNNDKDRTYAVSYVPKVAGLHKVTVLFAGQNIERSPFEVNVGMALGDANKVSARGPGLEPVGNVANKPTYFDIYTAGAGTGDVAVVIVDPQGRRDTVEVALEDKGDSTFRCTYRPAMEGPHTVHVAFAGAPITRSPFPVHVSEACNPNACRASGRGLQPKGVRVKEVADFKVFTKGAGSGELKVTVKGPKGTEEPVKVREAGDGVFECEYYPVVPGKYVVTITWGGYAIPRSPFEVQVSPEAGVQKVRAWGPGLETGQVGKSADFVVEAIGTEVGTLGFSIEGPSQAKIECDDKGDGSCDVRYWPTEPGEYAVHVICDDEDIRDSPFIAHILPAPPDCFPDKVKAFGPGLEPTGCIVDKPAEFTIDARAAGKGDLKLYAQDADGCPIDIKVIPNGDGTFRCSYVPTKPIKHTIIISWGGVNVPKSPFRVNVGEGSHPERVKVYGPGVEKTGLKANEPTYFTVDCSEAGQGDVSIGIKCAPGVVGPAEADIDFDIIKNDNDTFTVKYTPPGAGRYTIMVLFANQEIPASPFHIKVDPSHDASKVKAEGPGLNRTGVEVGKPTHFTVLTKGAGKAKLDVQFAGTAKGEVVRDFEIIDNHDYSYTVKYTAVQQGNMAVTVTYGGDPVPKSPFVVNVAPPLDLSKIKVQGLNSKVAVGQEQAFSVNTRGAGGQGQLDVRMTSPSRRPIPCKLEPGGGAEAQAVRYMPPEEGPYKVDITYDGHPVPGSPFAVEGVLPPDPSKVCAYGPGLKGGLVGTPAPFSIDTKGAGTGGLGLTVEGPCEAKIECQDNGDGSCAVSYLPTEPGEYTINILFAEAHIPGSPFKATIRPVFDPSKVRASGPGLERGKVGEAATFTVDCSEAGEAELTIEILSDAGVKAEVLIHNNADGTYHITYSPAFPGTYTITIKYGGHPVPKFPTRVHVQPAVDTSGVKVSGPGVEPHGVLREVTTEFTVDARSLTATGGNHVTARVLNPSGAKTDTYVTDNGDGTYRVQYTAYEEGVHLVEVLYDEVAVPKSPFRVGVTEGCDPTRVRAFGPGLEGGLVNKANRFTVETRGAGTGGLGLAIEGPSEAKMSCKDNKDGSCTVEYIPFTPGDYDVNITFGGRPIPGSPFRVPVKDVVDPGKVKCSGPGLGAGVRARVPQTFTVDCSQAGRAPLQVAVLGPTGVAEPVEVRDNGDGTHTVHYTPATDGPYTVAVKYADQEVPRSPFKIKVLPAHDASKVRASGPGLNASGIPASLPVEFTIDARDAGEGLLTVQILDPEGKPKKANIRDNGDGTYTVSYLPDMSGRYTITIKYGGDEIPYSPFRIHALPTGDASKCLVTVSIGGHGLGACLGPRIQIGQETVITVDAKAAGEGKVTCTVSTPDGAELDVDVVENHDGTFDIYYTAPEPGKYVITIRFGGEHIPNSPFHVLATEEPVVPVEPMESMLRPFNLVIPFAVQKGELTGEVRMPSGKTARPNITDNKDGTITVRYAPTEKGLHQMGIKYDGNHIPGSPLQFYVDAINSRHVSAYGPGLSHGMVNKPATFTIVTKDAGEGGLSLAVEGPSKAEITCKDNKDGTCTVSYLPTAPGDYSIIVRFDDKHIPGSPFTAKITGDDSMRTSQLNVGTSTDVSLKITESDLSQLTASIRAPSGNEEPCLLKRLPNRHIGISFTPKEVGEHVVSVRKSGKHVTNSPFKILVGPSEIGDASKVRVWGKGLSEGHTFQVAEFIVDTRNAGYGGLGLSIEGPSKVDINCEDMEDGTCKVTYCPTEPGTYIINIKFADKHVPGSPFTVKVTGEGRMKESITRRRQAPSIATIGSTCDLNLKIPGNWFQMVSAQERLTRTFTRSSHTYTRTERTEISKTRGGETKREVRVEESTQVGGDPFPAVFGDFLGRERLGSFGSITRQQEGEASSQDMTAQVTSPSGKVEAAEIVEGEDSAYSVRFVPQEMGPHTVAVKYRGQHVPGSPFQFTVGPLGEGGAHKVRAGGTGLERGVAGVPAEFSIWTREAGAGGLSIAVEGPSKAEIAFEDRKDGSCGVSYVVQEPGDYEVSIKFNDEHIPDSPFVVPVASLSDDARRLTVTSLQETGLKVNQPASFAVQLNGARGVIDARVHTPSGAVEECYVSELDSDKHTIRFIPHENGVHSIDVKFNGAHIPGSPFKIRVGEQSQAGDPGLVSAYGPGLEGGTTGVSSEFIVNTLNAGSGALSVTIDGPSKVQLDCRECPEGHVVTYTPMAPGNYLIAIKYGGPQHIVGSPFKAKVTGPRLSGGHSLHETSTVLVETVTKSSSSRGSSYSSIPKFSSDASKVVTRGPGLSQAFVGQKNSFTVDCSKAGTNMMMVGVHGPKTPCEEVYVKHMGNRVYNVTYTVKEKGDYILIVKWGDESVPGSPFKVKVP

SEQ ID NO: 16512 - protein, 875 aa, Homo sapiens
MGKTANSPGSGARPDPVRSFNRWKKKHSHRQNKKKQLRKQLKKPEWQVERESISRLMQNYEKINVNEITRFSDFPLSKKTLKGLQEAQYRLVTEIQKQTIGLALQGKDVLGAAKTGSGKTLAFLVPVLEALYRLQWTSTDGLGVLIISPTRELAYQTFEVLRKVGKNHDFSAGLIIGGKDLKHEAERINNINILVCTPGRLLQHMDETVSFHATDLQMLVLDEADRILDMGFADTMNAVIENLPKKRQTLLFSATQTKSVKDLARLSLKNPEYVWVHEKAKYSTPATLEQNYIVCELQQKISVLYSFLRSHLKKKSIVFFSSCKEVQYLYRVFCRLRPGVSILALHGRQQQMRRMEVYNEFVRKRAAVLFATDIAARGLDFPAVNWVLQFDCPEDANTYIHRAGRTARYKEDGEALLILLPSEKAMVQQLLQKKVPVKEIKINPEKLIDVQKKLESILAQDQDLKERAQRCFVSYVRSVYLMKDKEVFDVSKLPIPEYALSLGLAVAPRVRFLQKMQKQPTKELVRSQADKVIEPRAPSLTNDEVEEFRAYFNEKMSILQKGGKRLEGTEHRQDNDTGNEEQEEEEDDEEEMEEKLAKAKGSQAPSLPNTSEAQKIKEVPTQFLDRDEEEEDADFLKVKRHNVFGLDLKDEKTLQKKEPSKSSIKKKMTKVAEAKKVMKRNFKVNKKITFTDEGELVQQWPQMQKSAIKDAEEDDDTGGINLHKAKERLQEEDKFDKEEYRKKIKAKHREKRLKEREARREANKRQAKAKDEEEAFLDWSDDDDDDDDGFDPSTLPDPDKYRSSEDSDSEDMENKISDTKKKQGMKKRSNSEVEDVGPTSHNRKKARWDTLEPLDTGLSLAEDEELVLHLLRSQS

SEQ ID NO: 16513 - protein, 950 aa, Homo sapiens
MRSGGGCSGSLSLRGPASFKFSGVCPDSRGLAFSVAILPAKKEDFMAELYRVLEAGKIGIFESPTGTGKSLSLICGALSWLRDFEQKKREEEARLLETGTGPLHDEKDESLCLSSSCEGAAGTPRPAGEPAWVTQFVQKKEERDLVNRLKAEQARRKQREERLQQLQHRVQLKYAAKRLRQEEEERENLLRLSREMLETGPEAERPEQLESGEEELVLAEYESDEEKKVASGVDEDEDDLEEEHITKIYHCSRTHSQLAQFVHEVKKSPFGKDVRLVSLGSRQNLCVNEDVRSLGSVQLINNRCVDMQRSRHEKKKGAEEEKPKRRRQEKQAACPFYNHEQMGLLRDEALAEVKDMEQLLALGKEARACPYYGSRLAIPAAQLVVLPYQMLLHAATRQAAGIRLQDQVVIIDEAHNLIDTTTSMHSVEVSGSQLCQAHSQLLQYMERYGKRLKAKNLMYLKQILYLLEKFVAVLGGNIKQNPNTQSLSQTGMELKTINDFLFQSQIDNINLFKVQRYCEKSMISRKLFGFTERYGAVFSSREQPKLAGFQQFLQSLQPRTTEALAAPADESQASVPQPASPLMHIEGFLAALTTANQDGRVILSRQGSLSQSTLKFLLLNPAVHFAQVVKECRAVVIAGGTMQPVSNFRQQLLACAGVEAERVVEFSCGHVIPPDNILPLVICSGVSNQPLEFTFQKRDLPQMMDEVGRILCNLCGVVSGGVVCFFPSYEYLRQVHAHWEKGGLLGRLAARKKIFQEPKSAHQVEQVLLAYSRCLQACGQERGPVTGALLLSVVGGKMSEGINFSDNLGRCVVMVGMPFPNIRSAELQEKMAYLDQTLPRAPGQAHPGKALVENLCMKAVNQSIGRAIRHQKDFASIVLLDQRYARPPVLAKLPAWIRARVEVKATFGPAIAAVQKVSPTFFFLRASQPRDHISHCLLSAQFHREKSASS

SEQ ID NO: 16514 - protein, 615 aa, Homo sapiens
MSEPGKGDDCLELESSMAESRLRAPDLGVSRCLGKCQKNSPGARKHPFSGKSFYLDLPAGKNLQFLTGAIQQLGGVIEGFLSKEVSYIVSSRREVKAESSGKSHRGCPSPSPSEVRVETSAMVDPKGSHPRPSRKPVDSVPLSRGKELLQKAIRNQGSISGGGSGGSSSLLTNARSWGVRILHVDEMMMHVQQLSLASLCVKKQQPKKPEGTCPAAESRTRKVARLKAPFLKIEDESRKFRPFHHQFKSFPEISFLGPKDASPFEAPTTLGSMHHTRESKDGEPSPRSAAHTMPRRKKGYCECCQEAFEELHVHLQSAQHRSFALEAHLYAEVDRIIAQLSHSFADIPFQAGLPRWSGSPASDCDPLCPETLHPHQPSHPRAASPRIRKEDSCQASVTQGRAAGQQRWTESLDGVMGPPASHTCVSATTLLPALPKGSREQGCLCPCPASFTQSHLVTSLALLPGEWSPAEDMPLHPSQENSFAPADIPVKGPLLFPEARPWLMSARCWVRPFPFVTWGCLIPHDTTPLHEEVSPCPCLRLGYLYLLLTQSLWCRVRVPSLSTAGPIPRTSHPCTLAFPSYLNDHDLGHLCQAKPQGWNTPQPFLHCGFLAVDSG

SEQ ID NO: 16515 - protein, 431 aa, Homo sapiens
MSEPGKGDDCLELESSMAESRLRAPDLGVSRCLGKCQKNSPGARKHPFSGKSFYLDLPAGKNLQFLTGAIQQLGGVIEGFLSKEVSYIVSSRREVKAESSGKSHRGCPSPSPSEVRVETSAMVDPKGSHPRPSRKPVDSVPLSRGKELLQKAIRNQGSISGGGSGGSSSLLTNARSWGVRILHVDEMMMHVQQLSLASLCVKKQQPKKPEGTCPAAESRTRKVARLKAPFLKIEDESRKFRPFHHQFKSFPEISFLGPKDASPFEAPTTLGSMHHTRESKDGEPSPRSAAHTMPRRKKGYCECCQEAFEELHVHLQSAQHRSFALEAHLYAEVDRIIAQLSHSFADIPFQAGLPRWSGSPASDCDPLCPETLHPHQPSHPRAASPRIRKEDSCQASVTQGRAAGQQRWTESLDGVMGPPASHTCHRPCRLP

SEQ ID NO: 16516 - protein, 508 aa, Homo sapiens
MMMHVQQLSLASLCVKKQQPKKPEGTCPAAESRTRKVARLKAPFLKIEDESRKFRPFHHQFKSFPEISFLGPKDASPFEAPTTLGSMHHTRESKDGEPSPRSAAHTMPRRKKGYCECCQEAFEELHVHLQSAQHRSFALEAHLYAEVDRIIAQLSHSFADIPFQAGLPRWSGSPASDCDPLCPETLHPHQPSHPRAASPRIRKEDSCQASGIPEQDGTVDSTQAPAERAGTGEVPGPIASCQDLGVSVDVFVDPPGIPVSRSPACQCLLPSSGFMELSSGPDLALFGHKRKVQFPSGSAKKRVGASWPQASFFVPIAPNPCGTRTTSGKRLPSLPLTGHESRLLASLQPLCHSQTCLSLPDPFPWQPTDRPAEFWATQPSWLGKGWPPGPEDSECTATGPVSQEAGQLLSCPTAPGWPSAPLYSATSVQPSGAPVESRSTSLLQPLPASAGASCSRCLWAPQPLQVPCLPVSQPWSQPQPQPQPHAGRELLLRVPKVLGSSQGQAAPD

SEQ ID NO: 16517 - protein, 170 aa, Homo sapiens
MSEPGKGDDCLELESSMAESRLRAPDLGVSRCLGKCQKNSPGARKHPFSGKSFYLDLPAGKNLQFLTGAIQQLGGVIEGFLSKEVSYIVSSRREVKAESSGKSHRGCPSPSPSEVRVETSAMVDPKGSHPRPSRKPVDSVPLSRGKELLQKAIRNQVSWGKMGQSRWSPA

SEQ ID NO: 16518 - protein, 680 aa, Homo sapiens
MALDGIRMPDGCYADGTWELSVHVTDLNRDVTLRVTGEVHIGGVMLKLVEKLDVKKDWSDHALWWEKKRTWLLKTHWTLDKYGIQADAKLQFTPQHKLLRLQLPNMKYVKVKVNFSDRVFKAVSDICKTFNIRHPEELSLLKKPRDPTKKKKKKLDDQSEDEALELEGPLITPGSGSIYSSPGLYSKTMTPTYDAHDGSPLSPTSAWFGDSALSEGNPGILAVSQPITSPEILAKMFKPQALLDKAKINQGWLDSSRSLMEQDVKENEALLLRFKYYSFFDLNPKYDAIRINQLYEQAKWAILLEEIECTEEEMMMFAALQYHINKLSIMTSENHLNNSDKEVDEVDAALSDLEITLEGGKTSTILGDITSIPELADYIKVFKPKKLTLKGYKQYWCTFKDTSISCYKSKEESSGTPAHQMNLRGCEVTPDVNISGQKFNIKLLIPVAEGMNEIWLRCDNEKQYAHWMAACRLASKGKTMADSSYNLEVQNILSFLKMQHLNPDPQLIPEQITTDITPECLVSPRYLKKYKNKQITARILEAHQNVAQMSLIEAKMRFIQAWQSLPEFGITHFIARFQGGKKEELIGIAYNRLIRMDASTGDAIKTWRFSNMKQWNVNWEIKMVTVEFADEVRLSFICTEVDCKVVHEFIGGYIFLSTRAKDQNESLDEEMFYKLTSGWV

SEQ ID NO: 16519 - protein, 633 aa, Homo sapiens
MALDGIRMPDGCYADGTWELSVHVTDLNRDVTLRVTGEVHIGGVMLKLVEKLDVKKDWSDHALWWEKKRTWLLKTHWTLDKYGIQADAKLQFTPQHKLLRLQLPNMKYVKVKVNFSDRVFKAVSDICKTFNIRHPEELSLLKKPRDPTKKKKKKLDDQSEDEALELEGPLITPGSGSIYSSPGLYSKTMTPTYDAHDGSPLSPTSAWFGDSALSEGNPGILAVSQPITSPEILAKMFKPQALLDKAKINQGWLDSSRSLMEQDVKENEALLLRFKYYSFFDLNPKYDAIRINQLYEQAKWAILLEEIECTEEEMMMFAALQYHINKLSIMTSENHLNNSDKEVDEVDAALSDLEITLEGGKTSTILGDITSIPELADYIKVFKPKKLTLKGYKQYWCTFKDTSISCYKSKEESSGTPAHQMNLRGCEVTPDVNISGQKFNIKLLIPVAEGMNEIWLRCDNEKQYAHWMAACRLASKGKTMADSSYNLEVQNILSFLKMQHLNPDPQLIPEQITTDITPECLVSPRYLKKYKNKQPGYIRDLITARILEAHQNVAQMSLIEAKMRFIQAWQSLPEFGITHFIARFQGGKKEELIGIAYNRLIRMDASTGDAIKTWRFSNMKQWNVNWEIKMVNS

SEQ ID NO: 16520 - protein, 687 aa, Homo sapiens
MALDGIRMPDGCYADGTWELSVHVTDLNRDVTLRVTGEVHIGGVMLKLVEKLDVKKDWSDHALWWEKKRTWLLKTHWTLDKYGIQADAKLQFTPQHKLLRLQLPNMKYVKVKVNFSDRVFKAVSDICKTFNIRHPEELSLLKKPRDPTKKKKKKLDDQSEDEALELEGPLITPGSGSIYSSPGLYSKTMTPTYDAHDGSPLSPTSAWFGDSALSEGNPGILAVSQPITSPEILAKMFKPQALLDKAKINQGWLDSSRSLMEQDVKENEALLLRFKYYSFFDLNPKYDAIRINQLYEQAKWAILLEEIECTEEEMMMFAALQYHINKLSIMTSENHLNNSDKEVDEVDAALSDLEITLEGGKTSTILGDITSIPELADYIKVFKPKKLTLKGYKQYWCTFKDTSISCYKSKEESSGTPAHQMNLRGCEVTPDVNISGQKFNIKLLIPVAEGMNEIWLRCDNEKQYAHWMAACRLASKGKTMADSSYNLEVQNILSFLKMQHLNPDPQLIPEQITTDITPECLVSPRYLKKYKNKQPGYIRDLITARILEAHQNVAQMSLIEAKMRFIQAWQSLPEFGITHFIARFQGGKKEELIGIAYNRLIRMDASTGDAIKTWRFSNMKQWNVNWEIKMVTVEFADEVRLSFICTEVDCKVVHEFIGGYIFLSTRAKDQNESLDEEMFYKLTSGWV

SEQ ID NO: 16521 - protein, 796 aa, Homo sapiens
MVLAQRRRGGCEKLRAGPQAVLASGSGFCDNMLADLGLIGTIGEDDEVPVEPESDSGDEEEEGPIVLGRRQKALGKNRSADFNPDFVFTEKEGTYDGSWALADVMSQLKKKRAATTLDEKIEKVRKKRKTEDKEAKSGKLEKEKEAKEGSEPKEQEDLQENDEEGSEDEASETDYSSADENILTKADTLKVKDRKKKKKKGQEAGGFFEDASQYDENLSFQDMNLSRPLLKAITAMGFKQPTPIQKACIPVGLLGKDICACAATGTGKTAAFALPVLERLIYKPRQAPVTRVLVLVPTRELGIQVHSVTRQLAQFCNITTCLAVGGLDVKSQEAALRAAPDILIATPGRLIDHLHNCPSFHLSSIEVLILDEADRMLDEYFEEQMKEIIRMCSHHRQTMLFSATMTDEVKDLASVSLKNPVRIFVNSNTDVAPFLRQEFIRIRPNREGDREAIVAALLTRTFTDHVMLFTQTKKQAHRMHILLGLMGLQVGELHGNLSQTQRLEALRRFKDEQIDILVATDVAARGLDIEGVKTVINFTMPNTIKHYVHRVGRTARAGRAGRSVSLVGEDERKMLKEIVKAAKAPVKARILPQDVILKFRDKIEKMEKDVYAVLQLEAEEKEMQQSEAQINTAKRLLEKGKEAVVQEPERSWFQTKEERKKEKIAKALQEFDLALRGKKKRKKFMKDAKKKGEMTAEERSQFEILKAQMFAERLAKRNRRAKRARAMPEEEPVRGPAKKQKQGKKSVFDEELTNTSKKALKQYRAGPSFEERKQLGLPHQRRGGNFKSKSRYKRRK

SEQ ID NO: 16522 - protein, 520 aa, Homo sapiens
MGPTRKPNVCSRLSRRALGCFSRDAGVVQRTNLGILRALVCQESTKFKNVWTTHSRSPIAYERGRIYFDNYRRCVSSVASEPRKLYEMPKCSKSEKIEDALLWECPVGDILPNSSDYKSSLIALTAHNWLLRISATTGKILEKIYLAPYCKFRYLSWDTPQEVIAVKSAQNRGSAVARQAGIQQHVLLYLAVFRVLPFSLVGILEINKKIFGNVTDATLSHGILIVMYSSGLVRLYSFQTIAEQFMQQKLDLGCACRWGGTTGTVGEAPFGIPCNIKITDMPPLLFEVSSLENAFQIGGHPWHYIVTPNKKKQKGVFHICALKDNSLAKNGIQEMDCCSLESDWIYFHPDASGRIIHVGPNQVKVLKLTEIENNSSQHQISEDFVILANRENHKNENVLTVTASGRVVKKSFNLLDDDPEQETFKIVDYEDELDLLSVVAVTQIDAEGKAHLDFHCNEYGTLLKSIPLVESWDVTYSHEVYFDRDLVLHIEQKPNRVFSCYVYQMICDTGEEEETINRSC

SEQ ID NO: 16523 - protein, 240 aa, Homo sapiens
MPPLLFEVSSLENAFQIGGHPWHYIVTPNKKKQKGVFHICALKDNSLAKNGIQEMDCCSLESDWIYFHPDASGRIIHVGPNQVKVLKLTEIENNSSQHQISEDFVILANRENHKNENVLTVTASGRVVKKSFNLLDDDPEQETFKIVDYEDELDLLSVVAVTQIDAEGKAHLDFHCNEYGTLLKSIPLVESWDVTYSHEVYFDRDLVLHIEQKPNRVFSCYVYQMICDTGEEEETINRSC

SEQ ID NO: 16524 - protein, 1447 aa, Homo sapiens
MENSLRCVWVPKLAFVLFGASLFSAHLQVTGFQIKAFTALRFLSEPSDAVTMRGGNVLLDCSAESDRGVPVIKWKKDGIHLALGMDERKQQLSNGSLLIQNILHSRHHKPDEGLYQCEASLGDSGSIISRTAKVAVAGPLRFLSQTESVTAFMGDTVLLKCEVIGEPMPTIHWQKNQQDLTPIPGDSRVVVLPSGALQISRLQPGDIGIYRCSARNPASSRTGNEAEVRILSDPGLHRQLYFLQRPSNVVAIEGKDAVLECCVSGYPPPSFTWLRGEEVIQLRSKKYSLLGGSNLLISNVTDDDSGMYTCVVTYKNENISASAELTVLVPPWFLNHPSNLYAYESMDIEFECTVSGKPVPTVNWMKNGDVVIPSDYFQIVGGSNLRILGVVKSDEGFYQCVAENEAGNAQTSAQLIVPKPAIPSSSVLPSAPRDVVPVLVSSRFVRLSWRPPAEAKGNIQTFTVFFSREGDNRERALNTTQPGSLQLTVGNLKPEAMYTFRVVAYNEWGPGESSQPIKVATQPELQVPGPVENLQAVSTSPTSILITWEPPAYANGPVQGYRLFCTEVSTGKEQNIEVDGLSYKLEGLKKFTEYSLRFLAYNRYGPGVSTDDITVVTLSDVPSAPPQNVSLEVVNSRSIKVSWLPPPSGTQNGFITGYKIRHRKTTRRGEMETLEPNNLWYLFTGLEKGSQYSFQVSAMTVNGTGPPSNWYTAETPENDLDESQVPDQPSSLHVRPQTNCIIMSWTPPLNPNIVVRGYIIGYGVGSPYAETVRVDSKQRYYSIERLESSSHYVISLKAFNNAGEGVPLYESATTRSITDPTDPVDYYPLLDDFPTSVPDLSTPMLPPVGVQAVALTHDAVRVSWADNSVPKNQKTSEVRLYTVRWRTSFSASAKYKSEDTTSLSYTATGLKPNTMYEFSVMVTKNRRSSTWSMTAHATTYEAAPTSAPKDLTVITREGKPRAVIVSWQPPLEANGKITAYILFYTLDKNIPIDDWIMETISGDRLTHQIMDLNLDTMYYFRIQARNSKGVGPLSDPILFRTLKVEHPDKMANDQGRHGDGGYWPVDTNLIDRSTLNEPPIGQMHPPHGSVTPQKNSNLLVIIVVTVGVITVLVVVIVAVICTRRSSAQQRKKRATHSAGKRKGSQKDLRPPDLWIHHEEMEMKNIEKPSGTDPAGRDSPIQSCQDLTPVSHSQSETQLGSKSTSHSGQDTEEAGSSMSTLERSLAARRAPRAKLMIPMDAQSNNPAVVSAIPVPTLESAQYPGILPSPTCGYPHPQFTLRPVPFPTLSVDRGFGAGRSQSVSEGPTTQQPPMLPPSQPEHSSSEEAPSRTIPTACVRPTHPLRSFANPLLPPPMSAIEPKVPYTPLLSQPGPTLPKTHVKTASLGLAGKARSPLLPVSVPTAPEVSEESHKPTEDSANVYEQDDLSEQMASLEGLMKQLNAITGSAF

SEQ ID NO: 16525 - protein, 1140 aa, Homo sapiens [sequence omitted]

SEQ ID NO: 16526 - protein, 451 aa, Homo sapiens
MSYNYVVTAQKPTAVNGCVTGHFTSAEDLNLLIAKNTRLEIYVVTAEGLRPVKEVGMYGKIAVMELFRPKALSSSVSSSKLFSSSTAPHETSFGEEVEVHNLLIIDQHTFEVLHAHQFLQNEYALSLVSCKLGKDPNTYFIVGTAMVYPEEAEPKQGRIVVFQYSDGKLQTVAEKEVKGAVYSMVEFNGKLLASINSTVRLYEWTTEKELRTECNHYNNIMALYLKTKGDFILVGDLMRSVLLLAYKPMEGNFEEIARDFNPNWMSAVEILDDDNFLGAENAFNLFVCQKDSAATTDEERQHLQEVGLFHLGEFVNVFCHGSLVMQNLGETSTPTQGSVLFGTVNGMIGLVTSLSESWYNLLLDMQNRLNKVIKSVGKIEHSFWRSFHTERKTEPATGFIDGDLIESFLDISRPKMQEVVANLQYDDGSGMKREATADDLIKVVEELTRIH

SEQ ID NO: 16527 - protein, 312 aa, Homo sapiens
MAKVFSFILVTTALTMGREISALEDCAQEQMRLRAQVRLLETRVKQQQVKIKQLLQENEVQFLDKGDENTVIDLGSKRQYADCSEIFNDGYKLSGFYKIKPLQSPAEFSVYCDMSDGGGWTVIQRRSDGSENFNRGWKDYENGFGNFVQKHGEYWLGNKNLHFLTTQEDYTLKIDLADFEKNSRYAQYKNFKVGDEKNFYELNIGEYSGTAGDSLAGNFHPEVQWWASHQRMKFSTWDRDHDNYEGNCAEEDQSGWWFNRCHSANLNGVYYSGPYTAKTDNGIVWYTWHGWWYSLKSVVMKIRPNDFIPNVI

SEQ ID NO: 16528 - protein, 285 aa, Homo sapiens
MGTPGEGLGRCSHALIRGVPESLASGEGAGAGLPALDLAKAQREHGVLGGKLRQRLGLQLLELPPEESLPLGPLLGDTAVIQGDTALITRPWSPARRPEVDGVRKALQDLGLRIVEIGDENATLDGTDVLFTGREFFVGLSKWTNHRGAEIVADTFRDFAVSTVPVSGPSHLRGLCGMGGPRTVVAGSSDAAQKAVRAMAVLTDHPYASLTLPDDAAADCLFLRPGLPGVPPFLLHRGGGDLPNSQEALQKLSDVTLVPVSCSELEKAGAGLSSLCLVLSTRPHS

SEQ ID NO: 16529 - protein, 422 aa, Homo sapiens
MKSNPPRSSLEACKAAGQAPQQKTQAKPTKAARQKVLVTGGGGYLGFSLGSHLAKSGTSVILLDRRRPQWELSPETKFIQADVRDEEALYRAFEGVDCVFHVASYGMSGAEKLQKEQIESINVGGTKLVIDVCVRRRVPRLIYTSTVNVAFGGKPIEQGDEDSVPYFPLDEHVDHYSRTKAIADQLTLMANGMPLPGGGTLRTCVLRPPGIYGPEEQRHLPRVAGHIKKRLFMFRFGDHKARMNWVHVHNLVQAHVLAAEALTTAKGYVASGQAYYINDGESVNLFEWMAPLFEKLGYSQPWIQVPTSWVYLTAAVMERLHLALRPICSLPPLLTRSEVRSVAVTHTFQIAKARAQLGYAPDKFRFADAVELYVQSTTRRPRGSTARTLLRLLLRLLLFLGLLALALHFLGLQPLHAAVERL

SEQ ID NO: 16530 - protein, 98 aa, Homo sapiens
MIPGGLSEAKPATPEIQEIVDKVKPQLEEKTNETYGKLEAVQYKTQVVAGTNYYIKVRAGDNKYMHLKVFKSLPGQNEDLVLTGYQVDKNKDDELTGF

SEQ ID NO: 16531 - protein, 412 aa, Homo sapiens
MANVADTKLYDILGVPPGASENELKKAYRKLAKEYHPDKNPNAGDKFKEISFAYEVLSNPEKRELYDRYGEQGLREGSGGGGGMDDIFSHIFGGGLFGFMGNQSRSRNGRRRGEDMMHPLKVSLEDLYNGKTTKLQLSKNVLCSACSGQGGKSGAVQKCSACRGRGVRIMIRQLAPGMVQQMQSVCSDCNGEGEVINEKDRCKKCEGKKVIKEVKILEVHVDKGMKHGQRITFTGEADQAPGVEPGDIVLLLQEKEHEVFQRDGNDLHMTYKIGLVEALCGFQFTFKHLDGRQIVVKYPPGKVIEPGCVRVVRGEGMPQYRNPFEKGDLYIKFDVQFPENNWINPDKLSELEDLLPSRPEVPNIIGETEEVELQEFDSTRGSGGGQRREAYNDSSDEESSSHHGPGVQCAHQ

SEQ ID NO: 16532 - protein, 232 aa, Homo sapiens
MANYYEVLGVQASASPEDIKKAYRKLALRWHPDKNPDNKEEAEKKFKLVSEAYEVLSDSKKRSLYDRAGCDSWRAGGGASTPYHSPFDTGYTFRNPEDIFREFFGGLDPFSFEFWDSPFNSDRGGRGHGLRGAFSAGFGEFPAFMEAFSSFNMLGCSGGSHTTFSSTSFGGSSSGSSGFKSVMSSTEMINGHKVTTKRIVENGQERVEVEEDGQLKSVTVNGKEQLKWMDSK

SEQ ID NO: 16533 - protein, 1571 aa, Homo sapiens
MADRGCPLEAAPLPAEVRESLAELELELSEGDITQKGYEKKRAKLLARYIPLIQGIDPSLQAENRIPGPSQTTAAAPKQQKSRPTASRDERFRSDVHTEAVQAALAKYKERKMPMPSKRRSVLVHSSVETYTPPDTSSASEDEGSLRRPGRLTSTPLQSHSSVEPWLDRVIQGSSTSSSASSTSSHPGGRPTTAPSAAATPGAAATTALAGLEAHTHIDLHSAPPDVTTGLVEHSYFERPQVASVRSVPRGCSGSMLETADGVPVNSRVSSKIQQLLNTLKRPKRPPLKEFFVDDFEELLEVQQPDPNQPKPEGSETSVLRGEPLTAGVPRPPSLLATLQRWGTTQPKSPCLTALDTTGKAVYTLTYGKLWSRSLKLAYTLLNKLTSKNEPLLKPGDRVALVFPNSDPVMFMVAFYGCLLAELVPVPIEVPLTRKDAGSQQVGFLLGSCGVFLALTTDACQKGLPKAQTGEVAAFKGWPPLSWLVIDGKHLAKPPKDWHPLAQDTGTGTAYIEYKTSKEGSTVGVTVSHASLLAQCRALTQACGYSEAETLTNVLDFKRDAGLWHGVLTSVMNRMHVVSVPYALMKANPLSWIQKVCFYKARAALVKSRDMHWSLLAQRGQRDVSLSSLRMLIVADGANPWSISSCDAFLNVFQSRGLRPEVICPCASSPEALTVAIRRPPDLGGPPPRKAVLSMNGLSYGVIRVDTEEKLSVLTVQDVGQVMPGANVCVVKLEGTPYLCKTDEVGEICVSSSATGTAYYGLLGITKNVFEAVPVTTGGAPIFDRPFTRTGLLGFIGPDNLVFIVGKLDGLMVTGVRRHNADDVVATALAVEPMKFVYRGRIAVFSVTVLHDDRIVLVAEQRPDASEEDSFQWMSRVLQAIDSIHQVGVYCLALVPANTLPKAPLGGIHISETKQRFLEGTLHPCNVLMCPHTCVTNLPKPRQKQPEVGPASMIVGNLVAGKRIAQASGRELAHLEDSDQARKFLFLADVLQWRAHTTPDHPLFLLLNAKGTVTSTATCVQLHKRAERVAAALMEKGRLSVGDHVALVYPPGVDLIAAFYGCLYCGCVPVTVRPPHPQNLGTTLPTVKMIVEVSKSACVLTTQAVTRLLRSKEAAAAVDIRTWPTILDTDDIPKKKIASVFRPPSPDVLAYLDFSVSTTGILAGVKMSHAATSALCRSIKLQCELYPSRQIAICLDPYCGLGFALWCLCSVYSGHQSVLVPPLELESNVSLWLSAVSQYKARVTFCSYSVMEMCTKGLGAQTGVLRMKGVNLSCVRTCMVVAEERPRIALTQSFSKLFKDLGLPARAVSTTFGCRVNVAICLQGTAGPDPTTVYVDMRALRHDRVRLVERGSPHSLPLMESGKILPGVKVIIAHTETKGPLGDSHLGEIWVSSPHNATGYYTVYGEEALHADHFSARLSFGDTQTIWARTGYLGFLRRTELTDASGGRHDALYVVGSLDETLELRGMRYHPIDIETSVIRAHRSIAECAVFTWTNLLVVVVELDGLEQDALDLVALVTNVVLEEHYLVVGVVVIVDPGVIPINSRGEKQRMHLRDGFLADQLDPIYVAYNM

SEQ ID NO: 16534 - protein, 841 aa, Homo sapiens
MADRGCPLEAAPLPAEVRESLAELELELSEGDITQKGYEKKRAKLLARYIPLIQGIDPSLQAENRIPGPSQTTAAAPKQQKSRPTASRDERFRSDVHTEAVQAALAKYKERKMPMPSKRRSVLVHSSVETYTPPDTSSASEDEGSLRRPGRLTSTPLQSHSSVEPWLDRVIQGSSTSSSASSTSSHPGGRPTTAPSAAATPGAAATTALAGLEAHTHIDLHSAPPDVTTGLVEHSYFERPQVASVRSVPRGCSGSMLETADGVPVNSRVSSKIQQLLNTLKRPKRPPLKEFFVDDFEELLEVQQPDPNQPKPEGSETSVLRGEPLTAGVPRPPSLLATLQRWGTTQPKSPCLTALDTTGKAVYTLTYGKLWSRSLKLAYTLLNKLTSKNEPLLKPGDRVALVFPNSDPVMFMVAFYGCLLAELVPVPIEVPLTRKDAGSQQVGFLLGSCGVFLALTTDACQKGLPKAQTGEVAAFKGWPPLSWLVIDGKHLAKPPKDWHPLAQDTGTGTAYIEYKTSKEGSTVGVTVSHASLLAQCRALTQACGYSEAETLTNVLDFKRDAGLWHGVLTSVMNRMHVVSVPYALMKANPLSWIQKVCFYKARAALVKSRDMHWSLLAQRGQRDVSLSSLRMLIVADGANPWSISSCDAFLNVFQSRGLRPEVICPCASSPEALTVAIRRPPDLGGPPPRKAVLSMNGLSYGVIRVDTEEKLSVLTVQDVGQVMPGANVCVVKLEGTPYLCKTDEVGEICVSSSATGTAYYGLLGITKNVFEAVPVTTGGAPIFDRPFTRTGLLGFIGPDNLVFIVGKLDGLMVTGVRRHNADDVVATALAVEPMKFVYRGR

SEQ ID NO: 16535 - protein, 798 aa, Homo sapiens
MADRGCPLEAAPLPAEVRESLAELELELSEGDITQKGYEKKRAKLLARYIPLIQGIDPSLQAENRIPGPSQTTAAAPKQQKSRPTASRDERFRSDVHTEAVQAALAKYKERKMPMPSKRRSVLVHSSVETYTPPDTSSASEDEGSLRRPGRLTSTPLQSHSSVEPWLDRVIQGSSTSSSASSTSSHPGGRPTTAPSAAATPGAAATTALAGLEAHTHIGVPVNSRVSSKIQQLLNTLKRPKRPPLKEFFVDDFEELLEVQQPDPNQPKPEGSETSVLRGEPLTAGVPRPPSLLATLQRWGTTQPKSPCLTALDTTGKAVYTLTYGKLWSRSLKLAYTLLNKLTSKNEPLLKPGDRVALVFPNSDPVMFMVAFYGCLLAELVPVPIEVPLTRKDAGSQQVGFLLGSCGVFLALTTDACQKGLPKAQTGEVAAFKGWPPLSWLVIDGKHLAKPPKDWHPLAQDTGTGTAYIEYKTSKEGSTVGVTVSHASLLAQCRALTQACGYSEAETLTNVLDFKRDAGLWHGVLTSVMNRMHVVSVPYALMKANPLSWIQKVCFYKARAALVKSRDMHWSLLAQRGQRDVSLSSLRMLIVADGANPWSISSCDAFLNVFQSRGLRPEVICPCASSPEALTVAIRRPPDLGGPPPRKAVLSMNGLSYGVIRVDTEEKLSVLTVQDVGQVMPGANVCVVKLEGTPYLCKTDEVGEICVSSSATGTAYYGLLGITKNVFEAVPVTTGGAPIFDRPFTRTGLLGFIGPDNLVFIVGKLDGLMVTGVRRHNADDVVATALAVEPMKFVYRGR

SEQ ID NO: 16536 - protein, 889 aa, Homo sapiens
MADRGCPLEAAPLPAEVRESLAELELELSEGDITQKGYEKKRAKLLARYIPLIQGIDPSLQAENRIPGPSQTTAAAPKQQKSRPTASRDERFRSDVHTEAVQAALAKYKERKMPMPSKRRSVLVHSSVETYTPPDTSSASEDEGSLRRPGRLTSTPLQSHSSVEPWLDRVIQGSSTSSSASSTSSHPGGRPTTAPSAAATPGAAATTALAGLEAHTHIDLHSAPPDVTTGLVEHSYFERPQVASVRSVPRGCSGSMLETADGVPVNSRVSSKIQQLLNTLKRPKRPPLKEFFVDDFEELLEVQQPDPNQPKPEGSETSVLRGEPLTAGVPRPPSLLATLQRWGTTQPKSPCLTALDTTGKAVYTLTYGKLWSRSLKLAYTLLNKLTSKNEPLLKPGDRVALVFPNSDPVMFMVAFYGCLLAELVPVPIEVPLTRKDAGSQQVGFLLGSCGVFLALTTDACQKGLPKAQTGEVAAFKGWPPLSWLVIDGKHLAKPPKDWHPLAQDTGTGTAYIEYKTSKEGSTVGVTVSHASLLAQCRALTQACGYSEAETLTNVLDFKRDAGLWHGVLTSVMNRMHVVSVPYALMKANPLSWIQKVCFYKARAALVKSRDMHWSLLAQRGQRDVSLSSLRMLIVADGANPWSISSCDAFLNVFQSRGLRPEVICPCASSPEALTVAIRRPPDLGGPPPRKAVLSMNGLSYGVIRVDTEEKLSVLTVQDVGQVMPGANVCVVKLEGTPYLCKTDEVGEICVSSSATGTAYYGLLGITKNVFEAVPVTTGGAPIFDRPFTRTGLLGFIGPDNLVFIVGKLDGLMVTGVRRHNADDVVATALAVEPMKFVYRGRIAVFSVTVLHDDRIVLVAEQRPDASEEDSFQWMSRVLQVGAPARPMVR

SEQ ID NO: 16537 - protein, 1110 aa, Homo sapiens
MADRGCPLEAAPLPAEVRESLAELELELSEDVHTEAVQAALAKYKERKMPMPSKRRSVLVHSSVETYTPPDTSSASEDEGSLRRPGRLTSTPLQSHSSVEPWLDRVIQGSSTSSSASSTSSHPGGRPTTAPSAAATPGAAATTALAGLEAHTHIDLHSAPPDVTTGLVEHSYFERPQVASVRSVPRGCSGSMLETADGVPVNSRVSSKIQQLLNTLKRPKRPPLKEFFVDDFEELLEVQQPDPNQPKPEGSETSVLRGEPLTAGVPRPPSLLATLQRWGTTQPKSPCLTALDTTGKAVYTLTYGKLWSRSLKLAYTLLNKLTSKNEPLLKPGDRVALVFPNSDPVMFMVAFYGCLLAELVPVPIEVPLTRKDAGSQQVGFLLGSCGVFLALTTDACQKGLPKAQTGEVAAFKGWPPLSWLVIDGKHLAKPPKDWHPLAQDTGTGTAYIEYKTSKEGSTVGVTVSHASLLAQCRALTQACGYSEAETLTNVLDFKRDAGLWHGVLTSVMNRMHVVSVPYALMKANPLSWIQKVCFYKARAALVKSRDMHWSLLAQRGQRDVSLSSLRMLIVADGANPWSISSCDAFLNVFQSRGLRPEVICPCASSPEALTVAIRRPPDLGGPPPRKAVLSMNGLSYGVIRVDTEEKLSVLTVQDVGQVMPGANVCVVKLEGTPYLCKTDEVGEICVSSSATGTAYYGLLGITKNVFEAVPVTTGGAPIFDRPFTRTGLLGFIGPDNLVFIVGKLDGLMVTGVRRHNADDVVATALAVEPMKFVYRGRIAVFSVTVLHDDRIVLVAEQRPDASEEDSFQWMSRVLQAIDSIHQVGVYCLALVPANTLPKAPLGGIHISETKQRFLEGTLHPCNVLMCPHTCVTNLPKPRQKQPEVGPASMIVGNLVAGKRIAQASGRELAHLEDSDQARKFLFLADVLQWRAHTTPDHPLFLLLNAKGTVTSTATCVQLHKRAERVAAALMEKGRLSVGDHVALVYPPGVDLIAAFYGCLYCGCVPVTVRPPHPQNLGTTLPTVKMIVEVSKSACVLTTQAVTRLLRSKEAAAAVDIRTWPTILDTDDIPKKKIASVFRPPSPDVLAYLDFSVSTTGILAGVKAGRGGSRL

SEQ ID NO: 16538 - protein, 1567 aa, Homo sapiens
MADRGCPLEAAPLPAEVRESLAELELELSEGDITQKGYEKKRAKLLARYIPLIQGIDPSLQAENRIPGPSQTTAAAPKQQKSRPTASRDERFRSDVHTEAVQAALAKYKERKMPMPSKRRSVLVHSSVETYTPPDTSSASEDEGSLRRPGRLTSTPLQSHSSVEPWLDRVIQGSSTSSSASSTSSHPGGRPTTAPSAAATPGAAATTALAGLEAHTHIDLHSAPPDVTTGLVEHSYFERPQVASVRSVPRGCSGSMLETADGVPVNSRVSSKIQQLLNTLKRPKRPPLKEFFVDDFEELLEDPNQPKPEGSETSVLRGEPLTAGVPRPPSLLATLQRWGTTQPKSPCLTALDTTGKAVYTLTYGKLWSRSLKLAYTLLNKLTSKNEPLLKPGDRVALVFPNSDPVMFMVAFYGCLLAELVPVPIEVPLTRKDAGSQQVGFLLGSCGVFLALTTDACQKGLPKAQTGEVAAFKGWPPLSWLVIDGKHLAKPPKDWHPLAQDTGTGTAYIEYKTSKEGSTVGVTVSHASLLAQCRALTQACGYSEAETLTNVLDFKRDAGLWHGVLTSVMNRMHVVSVPYALMKANPLSWIQKVCFYKARAALVKSRDMHWSLLAQRGQRDVSLSSLRMLIVADGANPWSISSCDAFLNVFQSRGLRPEVICPCASSPEALTVAIRRPPDLGGPPPRKAVLSMNGLSYGVIRVDTEEKLSVLTVQDVGQVMPGANVCVVKLEGTPYLCKTDEVGEICVSSSATGTAYYGLLGITKNVFEAVPVTTGGAPIFDRPFTRTGLLGFIGPDNLVFIVGKLDGLMVTGVRRHNADDVVATALAVEPMKFVYRGRIAVFSVTVLHDDRIVLVAEQRPDASEEDSFQWMSRVLQAIDSIHQVGVYCLALVPANTLPKAPLGGIHISETKQRFLEGTLHPCNVLMCPHTCVTNLPKPRQKQPEVGPASMIVGNLVAGKRIAQASGRELAHLEDSDQARKFLFLADVLQWRAHTTPDHPLFLLLNAKGTVTSTATCVQLHKRAERVAAALMEKGRLSVGDHVALVYPPGVDLIAAFYGCLYCGCVPVTVRPPHPQNLGTTLPTVKMIVEVSKSACVLTTQAVTRLLRSKEAAAAVDIRTWPTILDTDDIPKKKIASVFRPPSPDVLAYLDFSVSTTGILAGVKMSHAATSALCRSIKLQCELYPSRQIAICLDPYCGLGFALWCLCSVYSGHQSVLVPPLELESNVSLWLSAVSQYKARVTFCSYSVMEMCTKGLGAQTGVLRMKGVNLSCVRTCMVVAEERPRIALTQSFSKLFKDLGLPARAVSTTFGCRVNVAICLQGTAGPDPTTVYVDMRALRHDRVRLVERGSPHSLPLMESGKILPGVKVIIAHTETKGPLGDSHLGEIWVSSPHNATGYYTVYGEEALHADHFSARLSFGDTQTIWARTGYLGFLRRTELTDASGGRHDALYVVGSLDETLELRGMRYHPIDIETSVIRAHRSIAECAVFTWTNLLVVVVELDGLEQDALDLVALVTNVVLEEHYLVVGVVVIVDPGVIPINSRGEKQRMHLRDGFLADQLDPIYVAYNM

SEQ ID NO: 16539 - protein, 917 aa, Homo sapiens
MAFIRKKQQEQQLQLYSKERFSLLLLNLEEYYFEQHRANHILHKGSHHERKIRGSLKICSKSVIFEPDSISQPIIKIPLRDCIKIGKHGENGANRHFTKAKSGGISLIFSQVYFIKEHNVVAPYKIERGKMEYVFELDVPGKVEDVVETLLQLHRASCLDKLGDQTAMITAILQSRLARTSFDKNRFQNISEKLHMECKAEMVTPLVTNPGHVCITDTNLYFQPLNGYPKPVVQITLQDVRRIYKRRHGLMPLGLEVFCTEDDLCSDIYLKFYEPQDRDDLYFYIATYLEHHVAEHTAESYMLQWQRGHLSNYQYLLHLNNLADRSCNDLSQYPVFPWIIHDYSSSELDLSNPGTFRDLSKPVGALNKERLERLLTRYQEMPEPKFMYGSHYSSPGYVLFYLVRIAPEYMLCLQNGRFDNADRMFNSIAETWKNCLDGATDFKELIPEFYGDDVSFLVNSLKLDLGKRQGGQMVDDVELPPWASSPEDFLQKSKDALESNYVSEHLHEWIDLIFGYKQKGSDAVGAHNVFHPLTYEGGVDLNSIQDPDEKVAMLTQILEFGQTPKQLFVTPHPRRITPKFKSLSQTSSYNASMADSPGEESFEDLTEESKTLAWNNITKLQLHEHYKIHKEAVTGITVSRNGSSVFTTSQDSTLKMFSKESKMLQRSISFSNMALSSCLLLPGDATVITSSWDNNVYFYSIAFGRRQDTLMGHDDAVSKICWHDNRLYSASWDSTVKVWSGVPAEMPGTKRHHFDLLAELEHDVSVDTISLNAASTLLVSGTKEGTVNIWDLTTATLMHQIPCHSGIVCDTAFSPDSRHVLSTGTDGCLNVIDVQTGMLISSMTSDEPQRCFVWDGNSVLSGSQSGELLVWDLLGAKISERIQGHTGAVTCIWMNEQCSSIITGGEDRQIIFWKLQY

SEQ ID NO: 16540 - protein, 948 aa, Homo sapiens
MTGQARFHRGAEACRAIRQCRSRRPRAAHPEGRAGSGRGSRHASPGVRRGGFSLLLLNLEEYYFEQHRANHILHKGSHHERKIRGSLKICSKSVIFEPDSISQPIIKIPLRDCIKIGKHGENGANRHFTKAKSGGISLIFSQVYFIKEHNVVAPYKIERGKMEYVFELDVPGKVEDVVETLLQLHRASCLDKLGDQTAMITAILQSRLARTSFDKNRFQNISEKLHMECKAEMVTPLVTNPGHVCITDTNLYFQPLNGYPKPVVQITLQDVRRIYKRRHGLMPLGLEVFCTEDDLCSDIYLKFYEPQDRDDLYFYIATYLEHHVAEHTAESYMLQWQRGHLSNYQYLLHLNNLADRSCNDLSQYPVFPWIIHDYSSSELDLSNPGTFRDLSKPVGALNKERLERLLTRYQEMPEPKFMYGSHYSSPGYVLFYLVRIAPEYMLCLQNGRFDNADRMFNSIAETWKNCLDGATDFKELIPEFYGDDVSFLVNSLKLDLGKRQGGQMVDDVELPPWASSPEDFLQKSKDALESNYVSEHLHEWIDLIFGYKQKGSDAVGAHNVFHPLTYEGGVDLNSIQDPDEKVAMLTQILEFGQTPKQLFVTPHPRRITPKFKSLSQTSSYNASMADSPGEESFEDLTEESKTLAWNNITKLQLHEHYKIHKEAVTGITVSRNGSSVFTTSQDSTLKMFSKESKMLQRSISFSNMALSSCLLLPGDATVITSSWDNNVYFYSIAFGRRQDTLMGHDDAVSKICWHDNRLYSASWDSTVKVWSGVPAEMPGTKRHHFDLLAELEHDVSVDTISLNAASTLLVSGTKEGTVNIWDLTTATLMHQIPCHSGIVCDTAFSPDSRHVLSTGTDGCLNVIDVQTGMLISSMTSDEPQRCFVWDGNSVLSGSQSGELLVWDLLGAKISERIQGHTGAVTCIWMNEQCSSIITGGEDRQIIFWKLQY

SEQ ID NO: 16541 - protein, 382 aa, Homo sapiens
MQHYGVNGYSLHAMNSLSAMYNLHQQAAQQAQHAPDYRPSVHALTLAERLAGCTFQDIILEARYGSQHRKQRRSRTAFTAQQLEALEKTFQKTHYPDVVMRERLAMCTNLPEARVQVWFKNRRAKFRKKQRSLQKEQLQKQKEAEGSHGEGKAEAPTPDTQLDTEQPPRLPGSDPPAELHLSLSEQSASESAPEDQPDREEDPRAGAEDPKAEKSPGADSKGLGCKRGSPKADSPGSLTITPVAPGGGLLGPSHSYSSSPLSLFRLQEQFRQHMAATNNLVHYSSFEVGGPAPAAAAAAAAVPYLGVNMAPLGSLHCQSYYQSLSAAAAAHQGVWGSPLLPAPPAGLAPASATLNSKTTSIENLRLRAKQHAASLGLDTLPN

SEQ ID NO: 16542 - protein, 377 aa, Homo sapiens
MQHYGVNGYSLHAMNSLSAMYNLHQQAAQQAQHAPDYRPSVHALTLAERLADIILEARYGSQHRKQRRSRTAFTAQQLEALEKTFQKTHYPDVVMRERLAMCTNLPEARVQVWFKNRRAKFRKKQRSLQKEQLQKQKEAEGSHGEGKAEAPTPDTQLDTEQPPRLPGSDPPAELHLSLSEQSASESAPEDQPDREEDPRAGAEDPKAEKSPGADSKGLGCKRGSPKADSPGSLTITPVAPGGGLLGPSHSYSSSPLSLFRLQEQFRQHMAATNNLVHYSSFEVGGPAPAAAAAAAAVPYLGVNMAPLGSLHCQSYYQSLSAAAAAHQGVWGSPLLPAPPAGLAPASATLNSKTTSIENLRLRAKQHAASLGLDTLPN

SEQ ID NO: 16543 - protein, 113 aa, Homo sapiens
MSTIQNLQSFDPFADATKGDDLLPAGTEDYIHIRIQQRNGRKTLTTVQGIADDYDKKKLVKAFKKKFACNGTVIEHPEYGEVIQLQGDQRKNICQFLLEVGIVKEEQLKVHGF

SEQ ID NO: 16544 - protein, 379 aa, Homo sapiens
MARVGPGRAGVSCQGRGRGRGGSGQRRPPTWEISDSDAEDSAGSEAAARARDPAGERRAAAEALRLLRPEQVLKRLAVCVDTAILEDAGADVLMEALEALGCECRIEPQRPARSLRWTRASPDPCPRSLPPEVWAAGEQELLLLLEPEEFLQGVATLTQISGPTHWVPWISPETTARPHLAVIGLDAYLWSRQHVSRGTQQPESPKVAGAEVAVSWPEVEEALVLLQLWANLDVLLVASWQELSRHVCAVTKALAQYPLKQYRESQAFSFCTAGRWAAGEPVARDGAGLQAAWRRQIRQFSRVSPAVADAVVTAFPSPRLLQQALEACSTERERMGLLADLPVPPSEGGRPRRVGPDLSRRICLFLTTANPDLLLDLGS

SEQ ID NO: 16545 - protein, 245 aa, Homo sapiens
MPTAGLAGTGVQGRWAHFWGCCGTADPTSPGGLWQRPSSGRAGPMGSGEEWSPLLRSRQHVSRGTQQPESPKVAGAEVAVSWPEVEEALVLLQLWANLDVLLVASWQELSRHVCAVTKALAQYPLKQYRESQAFSFCTAGRWAAGEPVARDGAGLQAAWRRQIRQFSRVSPAVADAVVTAFPSPRLLQQALEACSTERERMGLLADLPVPPSEGGRPRRVGPDLSRRICLFLTTANPDLLLDLGS

SEQ ID NO: 16546 - protein, 225 aa, Homo sapiens
MGFGDLKSPAGLQVLNDYLADKSYIEGYVPSQADVAVFEAVSSPPPADLCHALRWYNHIKSYEKEKASLPGVKKALGKYGPADVEDTTGSGATDSKDDDDIDLFGSDDEEESEEAKRLREERLAQYESKKAKKPALVAKSSILLDVKPWDDETDMAKLEECVRSIQADGLVWGSSKLVPVGYGIKKLQIQCVVEDDKVGTDMLEEQITAFEDYVQSMDVAAFNKI

SEQ ID NO: 16547 - protein, 154 aa, Homo sapiens
MALGVPISVYLLFNAMTALTEEAAVTVTPPITAQQGNWTVNKTEADNIEGPIALKFSHLCLEDHNSYCINGACAFHHELEKAICRCFTGYTGERCEHLTLTSYAVDSYEKYIAIGIGVGLLLSGFLVIFYCYIRKRCLKLKSPYNVCSGERRPL

SEQ ID NO: 16548 - protein, 133 aa, Homo sapiens
MALGVPISVYLLFNAMTALTEEAAVTVTPPITAQQADNIEGPIALKFSHLCLEDHNSYCINGACAFHHELEKAICRCFTGYTGERCEHLTLTSYAVDSYEKYIAIGIGVGLLLSGFLVIFYCYIRKRYEKDKI

SEQ ID NO: 16549 - protein, 112 aa, Homo sapiens
MALGVPISVYLLFNAMTALTEEAAVTVTPPITAQQGNWTVNKTEADNIEGPIALKFSHLCLEDHNSYCINGACAFHHELEKAICRCFTGYTGERCLKLKSPYNVCSGERRPL

SEQ ID NO: 16550 - protein, 103 aa, Homo sapiens
MALGVPISVYLLFNAMTALTEEAAVTVTPPITAQQGNWTVNKTEADNIEGPIALKFSHLCLEDHNSYCINGACAFHHELEKAICRCLKLKSPYNVCSGERRPL

SEQ ID NO: 16551 - protein, 103 aa, Homo sapiens
MALGVPISVYLLFNAMTALTEEAAVTVTPPITAQQADNIEGPIALKFSHLCLEDHNSYCINGACAFHHELEKAICRCFTGYTGERCLKLKSPYNVCSGERRPL

SEQ ID NO: 16552 - protein, 94 aa, Homo sapiens
MALGVPISVYLLFNAMTALTEEAAVTVTPPITAQQADNIEGPIALKFSHLCLEDHNSYCINGACAFHHELEKAICRCLKLKSPYNVCSGERRPL

SEQ ID NO: 16553 - protein, 73 aa, Homo sapiens
MALGVPISVYLLFNADNIEGPIALKFSHLCLEDHNSYCINGACAFHHELEKAICRCLKLKSPYNVCSGERRPL

SEQ ID NO: 16554 - protein, 282 aa, Homo sapiens
MALKQISSNKCFGGLQKVFEHDSVELNCKMKFAVYLPPKAETGKCPALYWLSGLTCTEQNFISKSGYHQSASEHGLVVIAPDTSPRGCNIKGEDESWDFGTGAGFYVDATEDPWKTNYRMYSYVTEELPQLINANFPVDPQRMSIFGHSMGGHGALICALKNPGKYKSVSAFAPICNPVLCPWGKKAFSGYLGTDQSKWKAYDATHLVKSYPGSQLDILIDQGKDDQFLLDGQLLPDNFIAACTEKKIPVVFRLQEGYDHSYYFIATFITDHIRHHAKYLNA

SEQ ID NO: 16555 - protein, 1076 aa, Homo sapiens
MKPDRDTLDEYFEYDAEEFLVSLALLITEGRTPECSVKGRTESFHCPPAQSCYPVTTKHECSDKLAQCRQARRTRSEVTLLWKNNLPIMVEMMLLPDCCYSDDGPTTEGIDLNDPAIKQDALLLERWILEPVPRQNGDRFIEEKTLLLAVRSFVFFSQLSAWLSVSHGAIPRNILYRISAADVDLQWNFSQTPIEHVFPVPNVSHNVALKVSVQSLPRQSNYPVLTCSIHTNIGLYEKRIQQHKLKTHQHHNPNEAEQCGTNSSQRLCSKQTWTMAPESVLHAKSGPSPEYTAAVKNIKLYPGTGSKSDHGTSQANILGFSGIGDIKSQETSVRTLKSFSMVDSSISNRQSFWQSAGETNPLIGSLIQERQEIIARIAQHLIHCDPSTSHVSGRPFNTQESSSLHSKLFRVSQENENVGKGKEAFSMTFGSPEFSSPEDTNEGKIRLKPETPRSETCISNDFYSHMPVGETNPLIGSLLQERQDVIARIAQHLEHIDPTASHIPRQSFNMHDSSSVASKVFRSSYEDKNLLKKNKDESSVSISHTKCSLLGDISDGKNLVPNKCFTSFKNNSKEKCSLKHQTRNQCQNNPSEIIQSTYQETQNKSSSLSTSSILSQHKENNLDLTSRFKEQEMSNGIDKQYSNCTTIDKQICTNKYKEKIINENYNPKFFGNLQSDDSKKNDSKIKVTVLEMSEYLNKYESMSSNKDSKRPKTCEQNTQLNSIENYLNKDNEGFKCKKSDQLKNEQDKQEDPTNEKSQNYSQRRSIKDCLSTCEQPKNTEVLRTTLKHSNVWRKHNFHSLDGTSTRAFHPQTGLPLLSSPVPQRKTQSGCFDLDSSLLHLKSFSSRSPRPCLNIEDDPDIHEKPFLSSSAPPITSLSLLGNFEESVLNYRFDPLGIVDGFTAEVGASGAFCPTHLTLPVEVSFYSVSDDNAPSPYMGVITLESLGKRGYRVPPSGTIQVTLFNPNKTVVKMFVVIYDLRDMPANHQTFLRQRTFSVPVKQEVKRSVNKENIRHTEERLLRYLIHLRFQSSKSGKIYLHRDVRLLFSRKSMEVDSGAAYELKSYTESPTNPQFSPRC

SEQ ID NO: 16556 - protein, 963 aa, Homo sapiens
MKPDRDTLDEYFEYDAEEFLVSLALLITEGRTPECSVKGRTESFHCPPAQSCYPVTTKHECSDKLAQCRQARRTRSEVTLLWKNNLPIMVEMMLLPDCCYSDDGPTTEGIDLNDPAIKQDALLLERWILEPVPRQNGDRFIEEKTLLLAVRSFVFFSQLSAWLSVSHGAIPRNILYRISAADVDLQWNFSQTPIEHVFPVPNVSHNVALKVSVQSLPRQSNYPVLTCSIHTNIGLYEKRIQQHKLKTHQHHNPNEAEQCGTNSSQRLCSKQTWTMAPESVLHAKSGPSPEYTAAVKNIKLYPGTGSKSDHGTSQANILGFSGIGDIKSQETSVRTLKSFSMVDSSISNRQSFWQSAGETNPLIGSLIQERQEIIARIAQHLIHCDPSTSHVSGRPFNTQESSSLHSKLFRVSQENENVGKGKEAFSMTFGSPEFSSPEDTNEGKIRLKPETPRSETCISNDFYSHMPVGETNPLIGSLLQERQDVIARIAQHLEHIDPTASHIPRQSFNMHDSSSVASKVFRSSYEDKNLLKKNKDESSVSISHTKCSLLGDISDGKNLVPNKCFTSFKNNSKEKCSLKHQTRNQCQNNPSEIIQSTYQETQNKSSSLSTSSILSQHKENNLDLTSRFKEQEMSNGIDKQYSNCTTIDKQICTNKYKEKIINENYNPKFFGNLQSDDSKKNDSKIKVTVLEMSEYLNKYESMSSNKDSKRPKTCEQNTQLNSIENYLNKDNEGFKCKKSDQLKNEQDKQEDPTNEKSQNYSQRRSIKDCLSTCEQPKNTEVLRTTLKHSNVWRKHNFHSLDGTSTRAFHPQTGLPLLSSPVPQRKTQSGCFDLDSSLLHLKSFSSRSPRPCLNIEDDPDIHEKPFLSSSAPPITSLSLLGNFEESVLNYRFDPLGIVDGFTAEVGASGAFCPTHLTLPVEVSFYSVSDDNAPSPYMGVITLESLGKRGYRVPPSGTIQVVCVL

SEQ ID NO: 16557 - protein, 1083 aa, Homo sapiens
MVFSGNKGLHREDTLDEYFEYDAEEFLVSLALLITEGRTPECSVKGRTESFHCPPAQSCYPVTTKHECSDKLAQCRQARRTRSEVTLLWKNNLPIMVEMMLLPDCCYSDDGPTTEGIDLNDPAIKQDALLLERWILEPVPRQNGDRFIEEKTLLLAVRSFVFFSQLSAWLSVSHGAIPRNILYRISAADVDLQWNFSQTPIEHVFPVPNVSHNVALKVSVQSLPRQSNYPVLTCSIHTNIGLYEKRIQQHKLKTHQHHNPNEAEQCGTNSSQRLCSKQTWTMAPESVLHAKSGPSPEYTAAVKNIKLYPGTGSKSDHGTSQANILGFSGIGDIKSQETSVRTLKSFSMVDSSISNRQSFWQSAGETNPLIGSLIQERQEIIARIAQHLIHCDPSTSHVSGRPFNTQESSSLHSKLFRVSQENENVGKGKEAFSMTFGSPEFSSPEDTNEGKIRLKPETPRSETCISNDFYSHMPVGETNPLIGSLLQERQDVIARIAQHLEHIDPTASHIPRQSFNMHDSSSVASKVFRSSYEDKNLLKKNKDESSVSISHTKCSLLGDISDGKNLVPNKCFTSFKNNSKEKCSLKHQTRNQCQNNPSEIIQSTYQETQNKSSSLSTSSILSQHKENNLDLTSRFKEQEMSNGIDKQYSNCTTIDKQICTNKYKEKIINENYNPKFFGNLQSDDSKKNDSKIKVTVLEMSEYLNKYESMSSNKDSKRPKTCEQNTQLNSIENYLNKDNEGFKCKKSDQLKNEQDKQEDPTNEKSQNYSQRRSIKDCLSTCEQPKNTEVLRTTLKHSNVWRKHNFHSLDGTSTRAFHPQTGLPLLSSPVPQRKTQSGCFDLDSSLLHLKSFSSRSPRPCLNIEDDPDIHEKPFLSSSAPPITSLSLLGNFEESVLNYRFDPLGIVDGFTAEVGASGAFCPTHLTLPVEVSFYSVSDDNAPSPYMGVITLESLGKRGYRVPPSGTIQVTLFNPNKTVVKMFVVIYDLRDMPANHQTFLRQRTFSVPVKQEVKRSVNKENIRHTEERLLRYLIHLRFQSSKSGKIYLHRDVRLLFSRKSMEVDSGAAYELKSYTESPTNPQFSPRC

SEQ ID NO: 16558 - protein, 136 aa, Homo sapiens
MLACFPCFLRRKMPCLLKVADAGCSVGLGKVHCSCHLPNPRVLRHCDILTGVLTLGLDMSCHACLSAGTGLGEELVGLGPGSTCLVKHLWLLFPCHRLASQNYSDSLAQQWSFSLLIMWLCNREREIFMSKCAKCI

SEQ ID NO: 16559 - protein, 339 aa, Homo sapiens
MAQLGAVVAVASSFFCASLFSAVHKIEEGHIGVYYRGGALLTSTSGPGFHLMLPFITSYKSVQTTLQTDEVKNVPCGTSGGVMIYFDRIEVVNFLVPNAVYDIVKNYTADYDKALIFNKIHHELNQFCSVHTLQEVYIELFDQIDENLKLALQQDLTSMAPGLVIQAVRVTKPNIPEAIRRNYELMESEKTKLLIAAQKQKVVEKEAETERKKALIEAEKVAQVAEITYGQKVMEKETEKKISEIEDAAFLAREKAKADAECYTAMKIAEANKLKLTPEYLQLMKYKAIASNSKIYFGKDIPNMFMDSAGSVSKQFEGLADKLSFGLEDEPLETATKEN

SEQ ID NO: 16560 - protein, 152 aa, Homo sapiens
MAQLGAVVAVASSFFCASLFSAVHKIEEGHIGVYYRGGALLTSTSGPGFHLMLPFITSYKSVQTTLQTDEVKNVPCGTSGGVMIYFDRIEVVNFLVPNAVYDIVKNYTADYDKALIFNKIHHELNQFCSVHTLQEVYIELFGLENDFSQESS

SEQ ID NO: 16561 - protein, 206 aa, Homo sapiens
MAQLGAVVAVASSFFCASLFSAVHKIEEGHIGVYYRGGALLTSTSGPGFHLMLPFITSYKSVQTTLQTDEVKNVPCGTSGGVMIYFDRIEVVNFLVPNAVYDIVKNYTADYDKALIFNKIHHELNQFCSVHTLQEVYIELFGKKVSPEHAVLKQGSWNPASLHCLKPGCLQGVMVTYGQEMLKNLVLRSWSQRSSWRMLIAMQQDP

SEQ ID NO: 16562 - protein, 276 aa, Homo sapiens
MAAGFKTVEPLEYYRRFLKENCRPDGRELGEFRTTTVNIGSISTADGSALVKLGNTTVICGVKAEFAAPSTDAPDKGYVVPNVDLPPLCSSRFRSGPPGEEAQVASQFIADVIENSQIIQKEDLCISPGKLVWVLYCDLICLDYDGNILDACTFALLAALKNVQLPEVTINEETALAEVNLKKKSYLNIRTHPVATSFAVFDDTLLIVDPTGEEEHLATGTLTIVMDEEGKLCCLHKPGGSGLTGAKLQDCMSRAVTRHKEVKKLMDEVIKSMKPK

SEQ ID NO: 16563 - protein, 484 aa, Homo sapiens
MKKGIRYETSRKTSYIFQQPQHGPWQTRMRKISNHGSLRVAKVAYPLGLCVGVFIYVAYIKWHRATATQAFFSITRAAPGARWGQQAHSPLGTAADGHEVFYGIMFDAGSTGTRVHVFQFTRPPRETPTLTHETFKALKPGLSAYADDVEKSAQGIRELLDVAKQDIPFDFWKATPLVLKATAGLRLLPGEKAQKLLQKVKKVFKASPFLVGDDCVSIMNGTDEGVSAWITINFLTGSLKTPGGSSVGMLDLGGGSTQIAFLPRVEGTLQASPPGYLTALRMFNRTYKLYSYSYLGLGLMSARLAILGGVEGQPAKDGKELVSPCLSPSFKGEWEHAEVTYRVSGQKAAASLHELCAARVSEVLQNRVHRTEEVKHVDFYAFSYYYDLAAGVGLIDAEKGGSLVVGDFEIAAKYVCRTLETQPQSSPFSCMDLTYVSLLLQEFGFPRSKVLKLTRKIDNVETSWALGAIFHYIDSLNRQKSPAS

SEQ ID NO: 16564 - protein, 467 aa, Homo sapiens
MQPQHGPWQTRMRKISNHGSLRVAKVAYPLGLCVGVFIYVAYIKWHRATATQAFFSITRAAPGARWGQQAHSPLGTAADGHEVFYGIMFDAGSTGTRVHVFQFTRPPRETPTLTHETFKALKPGLSAYADDVEKSAQGIRELLDVAKQDIPFDFWKATPLVLKATAGLRLLPGEKAQKLLQKVKKVFKASPFLVGDDCVSIMNGTDEGVSAWITINFLTGSLKTPGGSSVGMLDLGGGSTQIAFLPRVEGTLQASPPGYLTALRMFNRTYKLYSYSYLGLGLMSARLAILGGVEGQPAKDGKELVSPCLSPSFKGEWEHAEVTYRVSGQKAAASLHELCAARVSEVLQNRVHRTEEVKHVDFYAFSYYYDLAAGVGLIDAEKGGSLVVGDFEIAAKYVCRTLETQPQSSPFSCMDLTYVSLLLQEFGFPRSKVLKLTRKIDNVETSWALGAIFHYIDSLNRQKSPAS

SEQ ID NO: 16565 - protein, 483 aa, Homo sapiens
MKKGIRYETSRKTSYIFQPQHGPWQTRMRKISNHGSLRVAKVAYPLGLCVGVFIYVAYIKWHRATATQAFFSITRAAPGARWGQQAHSPLGTAADGHEVFYGIMFDAGSTGTRVHVFQFTRPPRETPTLTHETFKALKPGLSAYADDVEKSAQGIRELLDVAKQDIPFDFWKATPLVLKATAGLRLLPGEKAQKLLQKVKKVFKASPFLVGDDCVSIMNGTDEGVSAWITINFLTGSLKTPGGSSVGMLDLGGGSTQIAFLPRVEGTLQASPPGYLTALRMFNRTYKLYSYSYLGLGLMSARLAILGGVEGQPAKDGKELVSPCLSPSFKGEWEHAEVTYRVSGQKAAASLHELCAARVSEVLQNRVHRTEEVKHVDFYAFSYYYDLAAGVGLIDAEKGGSLVVGDFEIAAKYVCRTLETQPQSSPFSCMDLTYVSLLLQEFGFPRSKVLKLTRKIDNVETSWALGAIFHYIDSLNRQKSPAS

SEQ ID NO: 16566 - protein, 85 aa, Homo sapiens
MKKVLLLITAILAVAVGFPVSQDQEREKRSISDSDELASGFFVFPYPYPFRPLPPIPFPRFPWFRRNFPIPIPESAPTTPLPSEK

SEQ ID NO: 16567 - protein, 137 aa, Homo sapiens
MSQVGRVRSSHHFESVCLDAEVRVVLVALDHAGLHTLSSALNESLRPIHREELHLLHFPNSPEENLRKRPAEPSPQIHGGAPHLPWLCVEKLDLLPENHAVFLQERTAQLFEGSFFFSRSPAHSISPLLQFRWGHCP

SEQ ID NO: 16568 - protein, 627 aa, Homo sapiens
MEGLAGYVYKAASEGKVLTLAALLLNRSESDIRYLLGYVSQQGGQRSTPLIIAARNGHAKVVRLLLEHYRVQTQQTGTVRFDGYVIDGATALWCAAGAGHFEVVKLLVSHGANVNHTTVTNSTPLRAACFDGRLDIVKYLVENNANISIANKYDNTCLMIAAYKGHTDVVRYLLEQRADPNAKAHCGATALHFAAEAGHIDIVKELIKWRAAIVVNGHGMTPLKVAAESCKADVVELLLSHADCDRRSRIEALELLGASFANDRENYDIIKTYHYLYLAMLERFQDGDNILEKEVLPPIHAYGNRTECRNPQELESIRQDRDALHMEGLIVRERILGADNIDVSHPIIYRGAVYADNMEFEQCIKLWLHALHLRQKGNRNTHKDLLRFAQVFSQMIHLNETVKAPDIECVLRCSVLEIEQSMNRVKNISDADVHNAMDNYECNLYTFLYLVCISTKTQCSEEDQCKINKQIYNLIHLDPRTREGFTLLHLAVNSNTPVDDFHTNDVCSFPNALVTKLLLDCGAEVNAVDNEGNSALHIIVQYNRPISDFLTLHSIIISLVEAGAHTDMTNKQNKTPLDKSTTGVSEILLKTQMKMSLKCLAARAVRANDINYQDQIPRTLEEFVGFH

SEQ ID NO: 16569 - protein, 956 aa, Homo sapiens
MPRVSAPLVLLPAWLVMVACSPHSLRIAAILDDPMECSRGERLSITLAKNRINRAPERLGKAKVEVDIFELLRDSEYETAETMCQILPKGVVAVLGPSSSPASSSIISNICGEKEVPHFKVAPEEFVKFQFQRFTTLNLHPSNTDISVAVAGILNFFNCTTACLICAKAECLLNLEKLLRQFLISKDTLSVRMLDDTRDPTPLLKEIRDDKTATIIIHANASMSHTILLKAAELGMVSAYYTYIFTNLEFSLQRMDSLVDDRVNILGFSIFNQSHAFFQEFAQSLNQSWQENCDHVPFTGPALSSALLFDAVYAVVTAVQELNRSQEIGVKPLSCGSAQIWQHGTSLMNYLRMVELEGLTGHIEFNSKGQRSNYALKILQFTRNGFRQIGQWHVAEGLSMDSHLYASNISDTLFNTTLVVTTILENPYLMLKGNHQEMEGNDRYEGFCVDMLKELAEILRFNYKIRLVGDGVYGVPEANGTWTGMVGELIARKADLAVAGLTITAEREKVIDFSKPFMTLGISILYRVHMGRKPGYFSFLDPFSPGVWLFMLLAYLAVSCVLFLVARLTPYEWYSPHPCAQGRCNLLVNQYSLGNSLWFPVGGFMQQGSTIAPRALSTRCVSGVWWAFTLIIISSYTANLAAFLTVQRMDVPIESVDDLADQTAIEYGTIHGGSSMTFFQNSRYQTYQRMWNYMYSKQPSVFVKSTEEGIARVLNSNYAFLLESTMNEYYRQRNCNLTQIGGLLDTKGYGIGMPVGSVFRDEFDLAILQLQENNRLEILKRKWWEGGKCPKEEDHRAKGLGMENIGGIFVVLICGLIVAIFMAMLEFLWTLRHSEATEVSVCQEMVTELRSIILCQDSIHPRRRRAAVPPPRPPIPEERRPRGTATLSNGKLCGAGEPDQLAQRLAQEAALVARGCTHIRVCPECRRFQGLRARPSPARSEESLEWEKTTNSSEPE

SEQ ID NO: 16570 - protein, 244 aa, Homo sapiens
MGLELFLDLVSQPSRAVYIFAKKNGIPLELRTVDLVKGQHKSKEFLQINSLGKLPTLKDGDFILTESSAILIYLSCKYQTPDHWYPSDLQARARVHEYLGWHADCIRGTFGIPLWVQVLGPLIGVQVPEEKVERNRTAMDQALQWLEDKFLGDRPFLAGQQVTLADLMALEELMQPVALGYELFEGRPRLAAWRGRVEAFLGAELCQEAHSIILSILEQAAKKTLPTPSPEAYQAMLLRIARIP

SEQ ID NO: 16571 - protein, 432 aa, Homo sapiens
MTELQQDVEDTKPAKVLGKRESKLGSAHSEAENGVEEKKKACRSPTAQSPTPSVEADSPDQKKIISLWSKSSFDGASLASDKNDCKTESKNDPKTERKKSSSSSQYKANMHFHKLFLSVPTEEPLKQSFTCALQKEILYQGKLFVSENWICFHSKVFGKDTKISIPAFSVTLIKKTKTALLVPNALIIATVTDRYIFVSLLSRDSTYKLLKSVCGHLENTSVGNSPNPSSAENSFRADRPSSLPLDFNDEFSDLDGVVQQRRQDMEGYSSSGSQTPESENSRDFHATESQTVLNVSKGEAKPTRADAHVNRVPEGKAKSLPVQGLSETVGILHKVKSQKCPMLHHILIFYAIVVCALIISTFYMRYRINTLEEQLGLLTSIVDTHNTEQAAPSGLRSQVQFNVEVLCQELTANIVKLEKIQNNLQKLLENGD

SEQ ID NO: 16572 - protein, 440 aa, Homo sapiens
MWKTQSLRKCSGRGRANLAQPTQRLRMVWRRKRKPAGRQQPNPLPHLWRRTPQTRRKSLAYAHIFSPNLCFIQDQESKSSFDGASLASDKNDCKTESKNDPKTERKKSSSSSQYKANMHFHKLFLSVPTEEPLKQSFTCALQKEILYQGKLFVSENWICFHSKVFGKDTKISIPAFSVTLIKKTKTALLVPNALIIATVTDRYIFVSLLSRDSTYKLLKSVCGHLENTSVGNSPNPSSAENSFRADRPSSLPLDFNDEFSDLDGVVQQRRQDMEGYSSSGSQTPESENSRDFHATESQTVLNVSKGEAKPTRADAHVNRVPEGKAKSLPVQGLSETVGILHKVKSQKCPMLHHILIFYAIVVCALIISTFYMRYRINTLEEQLGLLTSIVDTHNTEQAAPSGLRSQVQFNVEVLCQELTANIVKLEKIQNNLQKLLENGD

SEQ ID NO: 16573 - protein, 447 aa, Homo sapiens
MTRRQQVLQAKRSIQQTFQAQLMPWKSMFHGREVKPVGPDLELSEAENGVEEKKKACRSPTAQSPTPSVEADSPDQKKIISLWSKSSFDGASLASDKNDCKTESKNDPKTERKKSSSSSQYKANMHFHKLFLSVPTEEPLKQSFTCALQKEILYQGKLFVSENWICFHSKVFGKDTKISIPAFSVTLIKKTKTALLVPNALIIATVTDRYIFVSLLSRDSTYKLLKSVCGHLENTSVGNSPNPSSAENSFRADRPSSLPLDFNDEFSDLDGVVQQRRQDMEGYSSSGSQTPESENSRDFHATESQTVLNVSKGEAKPTRADAHVNRVPEGKAKSLPVQGLSETVGILHKVKSQKCPMLHHILIFYAIVVCALIISTFYMRYRINTLEEQLGLLTSIVDTHNTEQAAPSGLRSQVQFNVEVLCQELTANIVKLEKIQNNLQKLLENGD

SEQ ID NO: 16574 - protein, 416 aa, Homo sapiens
MSKVKRFPFFFSSEAENGVEEKKKACRSPTAQSPTPSVEADSPDQKKIISLWSKSSFDGASLASDKNDCKTESKNDPKTERKKSSSSSQYKANMHFHKLFLSVPTEEPLKQSFTCALQKEILYQGKLFVSENWICFHSKVFGKDTKISIPAFSVTLIKKTKTALLVPNALIIATVTDRYIFVSLLSRDSTYKLLKSVCGHLENTSVGNSPNPSSAENSFRADRPSSLPLDFNDEFSDLDGVVQQRRQDMEGYSSSGSQTPESENSRDFHATESQTVLNVSKGEAKPTRADAHVNRVPEGKAKSLPVQGLSETVGILHKVKSQKCPMLHHILIFYAIVVCALIISTFYMRYRINTLEEQLGLLTSIVDTHNTEQAAPSGLRSQVQFNVEVLCQELTANIVKLEKIQNNLQKLLENGD

SEQ ID NO: 16575 - protein, 328 aa, Homo sapiens
MYKANMHFHKLFLSVPTEEPLKQSFTCALQKEILYQGKLFVSENWICFHSKVFGKDTKISIPAFSVTLIKKTKTALLVPNALIIATVTDRYIFVSLLSRDSTYKLLKSVCGHLENTSVGNSPNPSSAENSFRADRPSSLPLDFNDEFSDLDGVVQQRRQDMEGYSSSGSQTPESENSRDFHATESQTVLNVSKGEAKPTRADAHVNRVPEGKAKSLPVQGLSETVGILHKVKSQKCPMLHHILIFYAIVVCALIISTFYMRYRINTLEEQLGLLTSIVDTHNTEQAAPSGLRSQVQFNVEVLCQELTANIVKLEKIQNNLQKLLENGD

SEQ ID NO: 16576 - protein, 217 aa, Homo sapiens
MAYPGYGGGFGNFSIQVPGMQMGQPVPETGPAILLDGYSGPAYSDTYSSAGDSVYTYFSAVAGQDGEVDAEELQRCLTQSGINGTYSPFSLETCRIMIAMLDRDHTGKMGFNAFKELWAALNAWKENFMTVDQDGSGTVEHHELRQAIGLMGYRLSPQTLTTIVKRYSKNGRIFFDDYVACCVKLRALTDFFRKRDHLQQGSANFIYDDFLQGTMAI

SEQ ID NO: 16577 - protein, 872 aa, Homo sapiens [sequence omitted]

SEQ ID NO: 16578 - protein, 241 aa, Homo sapiens [sequence omitted]

SEQ ID NO: 16579 - protein, 841 aa, Homo sapiens
MAQALSEEEFQRMQAQLLELRTNNYQLSDELRKNGVELTSLRQKVAYLDKEFSKAQKALSKSKKAQEVEVLLSENEMLQAKLHSQEEDFRLQNSTLMAEFSKLCSQMEQLEQENQQLKEGAAGAGVAQAGPLVDGELLRLQAENTALQKNVAALQERYGKEAGKFSAVSEGQGDPPGGLAPTVLAPMPLAEVELKWEMEKEEKRLLWEQLQGLESSKQAETSRLQEELAKLSEKLKKKQESFCRLQTEKETLFNDSRNKIEELQQRKEADHKAQLARTQKLQQELEAANQSLAELRDQRQGERLEHAAALRALQDQVSIQSADAQEQVEGLLAENNALRTSLAALEQIQTAKTQELNMLREQTTGLAAELQQQQAEYEDLMGQKDDLNSQLQESLRANSRLLEQLQEIGQEKEQLTQELQEARKSAEKRKAMLDELAMETLQEKSQHKEELGAVRLRHEKEVLGVRARYERELRELHEDKKRQEEELRGQIREEKARTRELETLQQTVEELQAQVHSMDGAKGWFERRLKEAEESLQQQQQEQEEALKQCREQHAAELKGKEEELQDVRDQLEQAQEERDCHLKTISSLKQEVKDTVDGQRILEKKGSAALKDLKRQLHLERKRADKLQERLQDILTNSKSRSGLEELVLSEMNSPSRTQTGDSSSISSFSYREILREKESSAVPARSLSSSPQAQPPRPAELSDEEVAELFQRLAETQQEKWMLEEKVKHLEVSSASMAEDLCRKSAIIETYVMDSRIDVSVAAGHTDRSGLGSVLRDLVKPGDENLREMNKKLQNMLEEQLTKNMHLHKDMEVLSQEIVRLSKECVGPPDPDLEPGETS

SEQ ID NO: 16580 - protein, 625 aa, Homo sapiens
MAQALSEEEFQRMQAQLLELRTNNYQLSDELRKNGVELTSLRQKVAYLDKEFSKAQKALSKSKKAQEVEVLLSENEMLQAKLHSQEEDFRLQNSTLMAEFSKERYGKEAGKFSAVSEGQGDPPGGLAPTVLAPMPLAEVELKWEMEKEEKRLLWEQLQGLESSKQAETSRLQEELAKLSEKLKKKQESFCRLQTEKETLFNDSRNKIEELQQRKEADHKAQLARTQKLQQELEAANQSLAELRDQRQGERLEHAAALRALQDQVSIQSADAQEQVEGLLAENNALRTSLAALEQIQTAKTQELNMLREQTTGLAAELQQQQAEYEDLMGQKDDLNSQLQESLRANSRLLEQLQEIGQEKEQLTQELQEARKSAEKRKAMLDELAMETLQEKSQHKEELGAVRLRHEKEVLGVRARYERELRELHEDKKRQEEELRGQIREEKARTRELETLQQTVEELQAQVHSMDGAKGWFERRLKEAEGKEEELQDVRDQLEQAQEERDCHLKTISSLKQEVKDTVDGQRILEKKGSAALKDLKRQLHLERKRADKLQERLQDILTNSKSRSGLEELVLSEMNSPSRTQTGDSSSISSFSYREILREKESSAVPARVRGKEEPTAPASLNPKI

SEQ ID NO: 16581 - protein, 594 aa, Homo sapiens
MWSFGTGTLPPEGLKASSPSIRGMARDFRDHLIHHIFLFYSPALQERYGKEAGKFSAVSEGQGDPPGGLAPTVLAPMPLAEVELKWEMEKEEKRLLWEQLQGLESSKQAETSRLQEELAKLSEKLKKKQESFCRLQTEKETLFNDSRNKIEELQQRKEADHKAQLARTQKLQQELEAANQSLAELRDQRQGERLEHAAALRALQDQVSIQSADAQEQVEGLLAENNALRTSLAALEQIQTAKTQELNMLREQTTGLAAELQQQQAEYEDLMGQKDDLNSQLQESLRANSRLLEQLQEIGQEKEQLTQELQEARKSAEKRKAMLDELAMETLQEKSQHKEELGAVRLRHEKEVLGVRARYERELRELHEDKKRQEEELRGQIREEKARTRELETLQQTVEELQAQVHSMDGAKGWFERRLKEAEESLQQQQQEQEEALKQCREQHAAELKGKEEELQDVRDQLEQAQEERDCHLKTISSLKQEVKDTVDGQRILEKKGSAALKDLKRQLHLERKRADKLQERLQDILTNSKSRSGLEELVLSEMNSPSRTQTGDSSSISSFSYREILREKESSAVPARVRGKEEPTAPASLNPKI

SEQ ID NO: 16582 - protein, 810 aa, Homo sapiens
MAQALSEEEFQRMQAQLLELRTNNYQLSDELRKNGVELTSLRQKVAYLDKEFSKAQKALSKSKKAQEVEVLLSENEMLQAKLHSQEEDFRLQNSTLMAEFSKLCSQMEQLEQENQQLKEGAAGAGVAQAGPLVDGELLRLQAENTALQKNVAALQERYGKEAGKFSAVSEGQGDPPGGLAPTVLAPMPLAEVELKWEMEKEEKRLLWEQLQGLESSKQAETSRLQEELAKLSEKLKKKQESFCRLQTEKETLFNDSRNKIEELQQRKEADHKAQLARTQKLQQELEAANQSLAELRDQRQGERLEHAAALRALQDQIQTAKTQELNMLREQTTGLAAELQQQQAEYEDLMGQKDDLNSQLQESLRANSRLLEQLQEIGQEKEQLTQELQEARKSAEKRKAMLDELAMETLQEKSQHKEELGAVRLRHEKEVLGVRARYERELRELHEDKKRQEEELRGQIREEKARTRELETLQQTVEELQAQVHSMDGAKGWFERRLKEAEESLQQQQQEQEEALKQCREQHAAELKGKEEELQDVRDQLEQAQEERDCHLKTISSLKQEVKDTVDGQRILEKKGSAALKDLKRQLHLERKRADKLQERLQDILTNSKSRSGLEELVLSEMNSPSRTQTGDSSSISSFSYREILREKESSAVPARSLSSSPQAQPPRPAELSDEEVAELFQRLAETQQEKWMLEEKVKHLEVSSASMAEDLCRKSAIIETYVMDSRIDVSVAAGHTDRSGLGSVLRDLVKPGDENLREMNKKLQNMLEEQLTKNMHLHKDMEVLSQEIVRLSKECVGPPDPDLEPGETS

SEQ ID NO: 16583 - protein, 879 aa, Homo sapiens
MKMLTRLQVLTLALFSKGFLLSLGDHNFLRREIKIEGDLVLGGLFPINEKGTGTEECGRINEDRGIQRLEAMLFAIDEINKDDYLLPGVKLGVHILDTCSRDTYALEQSLEFVRASLTKVDEAEYMCPDGSYAIQENIPLLIAGVIGGSYSSVSIQVANLLRLFQIPQISYASTSAKLSDKSRYDYFARTVPPDFYQAKAMAEILRFFNWTYVSTVASEGDYGETGIEAFEQEARLRNICIATAEKVGRSNIRKSYDSVIRELLQKPNARVVVLFMRSDDSRELIAAASRANASFTWVASDGWGAQESIIKGSEHVAYGAITLELASQPVRQFDRYFQSLNPYNNHRNPWFRDFWEQKFQCSLQNKRNHRRVCDKHLAIDSSNYEQESKIMFVVNAVYAMAHALHKMQRTLCPNTTKLCDAMKILDGKKLYKDYLLKINFTAPFNPNKDADSIVKFDTFGDGMGRYNVFNFQNVGGKYSYLKVGHWAETLSLDVNSIHWSRNSVPTSQCSDPCAPNEMKNMQPGDVCCWICIPCEPYEYLADEFTCMDCGSGQWPTADLTGCYDLPEDYIRWEDAWAIGPVTIACLGFMCTCMVVTVFIKHNNTPLVKASGRELCYILLFGVGLSYCMTFFFIAKPSPVICALRRLGLGSSFAICYSALLTKTNCIARIFDGVKNGAQRPKFISPSSQVFICLGLILVQIVMVSVWLILEAPGTRRYTLAEKRETVILKCNVKDSSMLISLTYDVILVILCTVYAFKTRKCPENFNEAKFIGFTMYTTCIIWLAFLPIFYVTSSDYRVQTTTMCISVSLSGFVVLGCLFAPKVHIILFQPQKNVVTHRLHLNRFSVSGTGTTYSQSSASTYVPTVCNGREVLDSTTSSL

SEQ ID NO: 16584 - protein, 537 aa, Homo sapiens
MKMLTRLQVLTLALFSKGFLLSLGDHNFLRREIKIEGDLVLGGLFPINEKGTGTEECGRINEDRGIQRLEAMLFAIDEINKDDYLLPGVKLGVHILDTCSRDTYALEQSLEFVRASLTKVDEAEYMCPDGSYAIQENIPLLIAGVIGGSYSSVSIQVANLLRLFQIPQISYASTSAKLSDKSRYDYFARTVPPDFYQAKAMAEILRFFNWTYVSTVASEGDYGETGIEAFEQEARLRNICIATAEKVGRSNIRKSYDSVIRELLQKPNARVVVLFMRSDDSRELIAAASRANASFTWVASDGWGAQESIIKGSEHVAYGAITLELASQPVRQFDRYFQSLNPYNNHRNPWFRDFWEQKFQCSLQNKRNHRRVCDKHLAIDSSNYEQESKIMFVVNAVYAMAHALHKMQRTLCPNTTKLCDAMKILDGKKLYKDYLLKINFTGADDNHVHLCQPEWLCGLGLFVCTQGSHHPVSTPEECCHTQTAPQQVQCQWNWDHILSVLCKHVCANGVQWAGSPRLHHLISVIVNCSSVLVFLDC

SEQ ID NO: 16585 - protein, 1070 aa, Homo sapiens
MYCCSAQDSKMDYKRRFLLGGSKQKVQQHQQYPMPELGRALSAPLASTATTAPLGSLTAAGSCHHAMPHTTPIADIQQGISKYLDALNVFCRASTFLTDLFSTVFRNSHYSKAATQLKDVQEHVMEAASRLTSAIKPEIAKMLMELSAGAANFTDQKEFSLQDIEVLGRCFLTVVQVHFQFLTHALQKVQPVAHSCFAEVIVPEKKNSGSGGGLSGMGHTPEVEEAVRSWRGAAEATSRLRERGCDGCLAGIEVQQLFCSQSAAIPEHQLKELNIKIDSALQAYKIALESLGHCEYAMKAGFHLNPKAIEASLQGCCSEAEAQQTGRRQTPPQPMQCELPTVPVQIGSHFLKGVSFNESAADNLKLKTHTMLQLMKEAGCYNGITSRDDFPVTEVLNQVCPSTWRGACKTAVQLLFGQAGLVVVDTAQIENKEAYAPQISLEGSRIVVQVPSTWCLKEDPATMSLLQRSLDPEKTLGLVDVLYTAVLDLNRWRAGREQALPCIQIQLQREICDFGNQADLPSGNGNKSSGGLQKTFSKLTSRFTKKASCTSSSSSTNYSIQNTPSKNIFIAGCSEEKAKMPGNIDTRLQSILNIGNFPRTTDPSQSAQNSSNTVANGFLMERRENFLHGDDGKDEKGMNLPTDQEMQEVIDFLSGFNMGQSHQGSPLVTRHNSAATAMVTEQKAGAMQPQQPSLPVPPPPRAPQAGAHTPLTPQPGLAPQQQSPKQQQPQVQYYQHLLQPIGPQQPPPQPRAPGKWVHGSSQQPAQAVGAGLSPLGQWPGISDLSSDLYSLGLVSSYMDNVMSEVLGQKPQGPRNNTWPNRDQSDGVFGMLGEILPFDPAVGSDPEFARYVAGVSQAMQQKRQAQHGRRPGNPRGNWPPMDDAHRTWPFPEFFTEGDGLHGGWSGAQGDSASSSDETSSANGDSLFSMFSGPDLVAAVKQRRKHSSGEQDTSTLPSPPLLTTVEDVNQDNKTKTWPPKAPWQHPSPLPSTLPSPSAPLYAVTSPGSQWNDTMQMLQSPVWAATNDCSAAAFSYVQTPPQPPPPPAHKAAPKGFKAFPGKGERRPAYLPQY

SEQ ID NO: 16586 - protein, 480 aa, Homo sapiens
MAGTRWVLGALLRGCGCNCSSCRRTGAACLPFYSAAGSIPSGVSGRRRLLLLLGAAAAAASQTRGLQTGPVPPGRLAGPPAVATSAAAAAAASYSALRASLLPQSLAAAAAVPTRSYSQESKTTYLEDLPPPPEYELAPSKLEEEVDDVFLIRAQGLPWSCTMEDVLNFFSDCRIRNGENGIHFLLNRDGKRRGDALIEMESEQDVQKALEKHRMYMGQRYVEVYEINNEDVDALMKSLQVKSSPVVNDGVVRLRGLPYSCNEKDIVDFFAGLNIVDITFVMDYRGRRKTGEAYVQFEEPEMANQALLKHREEIGNRYIEIFPSRRNEVRTHVGSYKGKKIASFPTAKYITEPEMVFEEHEVNEDIQPMTAFESEKEIELPKEVPEKLPEAADFGTTSSLHFVHMRGLPFQANAQDIINFFAPLKPVRITMEYSSSGKATGEADVHFETHEDAVAAMLKDRSHVHHRYIELFLNSCPKGK

SEQ ID NO: 16587 - protein, 318 aa, Homo sapiens
MEDVLNFFSDCRIRNGENGIHFLLNRDGKRRGDALIEMESEQDVQKALEKHRMYMGQRYVEVYEINNEDVDALMKSLQVKSSPVVNDGVVRLRGLPYSCNEKDIVDFFAGLNIVDITFVMDYRGRRKTGEAYVQFEEPEMANQALLKHREEIGNRYIEIFPSRRNEVRTHVGSYKGKKIASFPTAKYITEPEMVFEEHEVNEDIQPMTAFESEKEIELPKEVPEKLPEAADFGTTSSLHFVHMRGLPFQANAQDIINFFAPLKPVRITMEYSSSGKATGEADVHFETHEDAVAAMLKDRSHVHHRYIELFLNSCPKGK

SEQ ID NO: 16588 - protein, 336 aa, Homo sapiens
MQPAERSRVPRIDPYGFERPEDFDDAAYEKFFSSYLVTLTRRAIKWSRLLQGGGVPRSRTVKRYVRKGVPLEHRARVWMVLSGAQAQMDQNPGYYHQLLQGERNPRLEDAIRTDLNRTFPDNVKFRKTTDPCLQRTLYNVLLAYGHHNQGVGYCQGMNFIAGYLILITNNEEESFWLLDALVGRILPDYYSPAMLGLKTDQEVLGELVRAKLPAVGALMERLGVLWTLLVSRWFICLFVDILPVETVLRIWDCLFNEGSKIIFRVALTLIKQHQELILEATSVPDICDKFKQITKGSFVMECHTFMQKIFSEPGSLSMATVAKLRESCRARLLAQG

SEQ ID NO: 16589 - protein, 266 aa, Homo sapiens
MVLSGAQAQMDQNPGYYHQLLQGERNPRLEDAIRTDLNRTFPDNVKFRKTTDPCLQRTLYNVLLAYGHHNQGVGYCQGMNFIAGYLILITNNEEESFWLLDALVGRILPDYYSPAMLGLKTDQEVLGELVRAKLPAVGALMERLGVLWTLLVSRWFICLFVDILPVETVLRIWDCLFNEGSKIIFRVALTLIKQHQELILEATSVPDICDKFKQITKGSFVMECHTFMQVCGAARGSVPSQGAPPHLQPGGCSDHPEGAQDGHQWA

SEQ ID NO: 16590 - protein, 344 aa, Homo sapiens
MQPAERSRVPRIDPYGFERPEDFDDAAYEKFFSSYLVTLTRRAIKWSRLLQGGGVPRSRTVKRYVRKGVPLEHRARVWMVLSGAQAQMDQNPGYYHQLLQGERNPRLEDAIRTDLNRTFPDNVKFRKTTDPCLQRTLYNVLLAYGHHNQGVGYCQGMNFIAGYLILITNNEEESFWLLDALVGRILPDYYSPAMLGLKTDQEVLGELVRAKLPAVGALMERLGVLWTLLVSRWFICLFVDILPVETVLRIWDCLFNEGSKIIFRVALTLIKQHQELILEATSVPDICDKFKQITKGSFVMECHTFMQVCGAARGSVPSQGAPPHLQPGGCSDHPEGAQDGHQWA

SEQ ID NO: 16591 - protein, 446 aa, Homo sapiens
MAARKGRRRTCETGEPMEAESGDTSSEGPAQVYLPGRGPPLREGEELVMDEEAYVLYHRAQTGAPCLSFDIVRDHLGDNRTELPLTLYLCAGTQAESAQSNRLMMLRMHNLHGTKPPPSEGSDEEEEEEDEEDEEERKPQLELAMVPHYGGINRVRVSWLGEEPVAGVWSEKGQVEVFALRRLLQVVEEPQALAAFLRDEQAQMKPIFSFAGHMGEGFALDWSPRVTGRLLTGDCQKNIHLWTPTDGGSWHVDQRPFVGHTRSVEDLQWSPTENTVFASCSADASIRIWDIRAAPSKACMLTTATAHDGDVNVISWSRREPFLLSGGDDGALKIWDLRQFKSGSPVATFKQHVAPVTSVEWHPQDSGVFAASGADHQITQWDLAVERDPEAGDVEADPGLADLPQQLLFVHQGETELKELHWHPQCPGLLVSTALSGFTIFRTISV

SEQ ID NO: 16592 - protein, 98 aa, Homo sapiens
MSVRGKAGKGLGKGGAKCHRKVLSDNIQGITKCTIRRLARHGGVKRILGLIYEETRRVFKVFLENVIWYAVTNTEHAKRKTVTAMAVVYVLKRQGRTL

SEQ ID NO: 16593 - protein, 103 aa, Homo sapiens [sequence omitted]

SEQ ID NO: 16594 - protein, 361 aa, Homo sapiens [sequence omitted]

SEQ ID NO: 16595 - protein, 377 aa, Homo sapiens
MSPECARAAGDAPLRSLEQANRTRFPFFSDVKGDHRLVLAAVETTVLVLIFAVSLLGNVCALVLVARRRRRGATACLVLNLFCADLLFISAIPLVLAVRWTEAWLLGPVACHLLFYVMTLSGSVTILTLAAVSLERMVCIVHLQRGVRGPGRRARAVLLALIWGYSAVAALPLCVFFRVVPQRLPGADQEISICTLIWPTIPGEISWDVSFVTLNFLVPGLVIVISYSKILQTSEHLLDARAVVTHSEITKASRKRLTVSLAYSESHQIRVSQQDFRLFRTLFLLMVSFFIMWSPIIITILLILIQNFKQDLVIWPSLFFWVVAFTFANSALNPILYNMTLCRNEWKKIFCCFWFPEKGAILTDTSVKRNDLSIISG

SEQ ID NO: 16596 - protein, 142 aa, Homo sapiens
MDMGLREMCVGEKRTVIIPPHLGYGEAGVDGEVPGSAVLVFDIELLELVAGLPEGYMFIWNGEVSPNLFEEIDKDGNGEVLLEEFSEYIHAQVASGKGKLAPGFDAELIVKNMFTNQDRNGDGKVTAEEFKLKDQEAKQDEL

SEQ ID NO: 16597 - protein, 1086 aa, Homo sapiens
MGNAGSMDSQQTDFRAHNVPLKLPMPEPGELEERFAIVLNAMNLPPDKARLLRQYDNEKKWELICDQERFQVKNPPHTYIQKLKGYLDPAVTRKKFRRRVQESTQVLRELEISLRTNHIGWVREFLNEENKGLDVLVEYLSFAQYAVTFDFESVESTVESSVDKSKPWSRSIEDLHRGSNLPSPVGNSVSRSGRHSALRYNTLPSRRTLKNSRLVSKKDDVHVCIMCLRAIMNYQYGFNMVMSHPHAVNEIALSLNNKNPRTKALVLELLAAVCLVRGGHEIILSAFDNFKEVCGEKQRFEKLMEHFRNEDNNIDFMVASMQFINIVVHSVEDMNFRVHLQYEFTKLGLDEYLDKLKHTESDKLQVQIQAYLDNVFDVGALLEDAETKNAALERVEELEENISHLSEKLQDTENEAMSKIVELEKQLMQRNKELDVVREIYKDANTQVHTLRKMVKEKEEAIQRQSTLEKKIHELEKQGTIKIQKKGDGDIAILPVVASGTLSMGSEVVAGNSVGPTMGAASSGPLPPPPPPLPPSSDTPETVQNGPVTPPMPPPPPPPPPPPPPPPPPPPPPLPGPAAETVPAPPLAPPLPSAPPLPGTSSPTVVFNSGLAAVKIKKPIKTKFRMPVFNWVALKPNQINGTVFNEIDDERILEDLNVDEFEEIFKTKAQGPAIDLSSSKQKIPQKGSNKVTLLEANRAKNLAITLRKAGKTADEICKAIHVFDLKTLPVDFVECLMRFLPTENEVKVLRLYERERKPLENLSDEDRFMMQFSKIERLMQKMTIMAFIGNFAESIQMLTPQLHAIIAASVSIKSSQKLKKILEIILALGNYMNSSKRGAVYGFKLQSLDLLLDTKSTDRKQTLLHYISNVVKEKYHQVSLFYNELHYVEKAAAVSLENVLLDVKELQRGMDLTKREYTMHDHNTLLKEFILNNEGKLKKLQDDAKIAQDAFDDVVKYFGENPKTTPPSVFFPVFVRFVKAYKQAEEENELRKKQEQALMEKLLEQEALMEQQDPKSPSHKSKRQQQELIAELRRRQVKDNRHVYEGKDGAIEDIITVLKTVPFTARTAKRGSRFFCEPVLTEEYHY

SEQ ID NO: 16598 - protein, 1092 aa, Homo sapiens
MGNAGSMDSQQTDFRAHNVPLKLPMPEPGELEERFAIVLNAMNLPPDKARLLRQYDNEKKWELICDQERFQVKNPPHTYIQKLKGYLDPAVTRKKFRRRVQESTQVLRELEISLRTNHIGWVREFLNEENKGLDVLVEYLSFAQYAVTFDFESVESTVESSVDKSKPWSRSIEDLHRGSNLPSPVGNSVSRSGRHSALRYNTLPSRRTLKNSRLVSKKDDVHVCIMCLRAIMNYQYGFNMVMSHPHAVNEIALSLNNKNPRTKALVLELLAAVCLVRGGHEIILSAFDNFKEVCGEKQRFEKLMEHFRNEDNNIDFMVASMQFINIVVHSVEDMNFRVHLQYEFTKLGLDEYLDKLKHTESDKLQVQIQAYLDNVFDVGALLEDAETKNAALERVEELEENISHLSEKLQDTENEAMSKIVELEKQLMQRNKELDVVREIYKDANTQVHTLRKMVKEKEEAIQRQSTLEKKIHELEKQGTIKIQKKGDGDIAILPVVASGTLSMGSEVVAGNSVGPTMGAASSGPLPPPPPPLPPSSDTPETVQNGPVTPPMPPPPPPPPPPPPPPPPPPPPPLPGPAAETVPAPPLAPPLPSAPPLPGTSSPTVVFNSGLAAVKIKKPIKTKFRMPVFNWVALKPNQINGTVFNEIDDERILEDLNVDEFEEIFKTKAQGPAIDLSSSKQKIPQKGSNKVTLLEANRAKNLAITLRKAGKTADEICKAIHVFDLKTLPVDFVECLMRFLPTENEVKVLRLYERERKPLENLSDEDRFMMQFSKIERLMQKMTIMAFIGNFAESIQMLTPQLHAIIAASVSIKSSQKLKKILEIILALGNYMNSSKRGAVYGFKLQSLDLLLDTKSTDRKQTLLHYISNVVKEKYHQVSLFYNELHYVEKAAAVSLENVLLDVKELQRGMDLTKREYTMHDHNTLLKEFILNNEGKLKKLQDDAKIAQDAFDDVVKYFGENPKTTPPSVFFPVFVRFVKAYKQAEEENELRKKQEQALMEKLLEQEALMEQQDPKSPSHKSKRQQQELIAELRRRQVKDNRHVYEGKDGAIEDIITDLRNQPYRRADAVRRSVRRRFDDQNLRSVNGAEITM

SEQ ID NO: 16599 - protein, 380 aa, Homo sapiens
MGIQGLAKLIADVAPSAIRENDIKSYFGRKVAIDASMSIYQFLIAVRQGGDVLQNEEGETTSHLMGMFYRTIRMMENGIKPVYVFDGKPPQLKSGELAKRSERRAEAEKQLQQAQAAGAEQEVEKFTKRLVKVTKQHNDECKHLLSLMGIPYLDAPSEAEASCAALVKAGKVYAAATEDMDCLTFGSPVLMRHLTASEAKKLPIQEFHLSRILQELGLNQEQFVDLCILLGSDYCESIRGIGPKRAVDLIQKHKSIEEIVRRLDPNKYPVPENWLHKEAHQLFLEPEVLDPESVELKWSEPNEEELIKFMCGEKQFSEERIRSGVKRLSKSRQGSTQGRLDDFFKVTGSLSSAKRKEPEPKGSTKKKAKTGAAGKFKRGK

SEQ ID NO: 16600 - protein, 316 aa, Homo sapiens
MGMFYRTIRMMENGIKPVYVFDGKPPQLKSGELAKRSERRAEAEKQLQQAQAAGAEQEVEKFTKRLVKVTKQHNDECKHLLSLMGIPYLDAPSEAEASCAALVKAGKVYAAATEDMDCLTFGSPVLMRHLTASEAKKLPIQEFHLSRILQELGLNQEQFVDLCILLGSDYCESIRGIGPKRAVDLIQKHKSIEEIVRRLDPNKYPVPENWLHKEAHQLFLEPEVLDPESVELKWSEPNEEELIKFMCGEKQFSEERIRSGVKRLSKSRQGSTQGRLDDFFKVTGSLSSAKRKEPEPKGSTKKKAKTGAAGKFKRGK

SEQ ID NO: 16601 - protein, 1100 aa, Homo sapiens
MGNAAGSAEQPAGPAAPPPKQPAPPKQPMPAAGELEERFNRALNCMNLPPDKVQLLSQYDNEKKWELICDQERFQVKNPPAAYIQKLKSYVDTGGVSRKVAADWMSNLGFKRRVQESTQVLRELETSLRTNHIGWVQEFLNEENRGLDVLLEYLAFAQCSVTYDMESTDNGASNSEKNKPLEQSVEDLSKGPPSSVPKSRHLTIKLTPAHSRKALRNSRIVSQKDDVHVCIMCLRAIMNYQSGFSLVMNHPACVNEIALSLNNKNPRTKALVLELLAAVCLVRGGHDIILAAFDNFKEVCGEQHRFEKLMEYFRNEDSNIDFMVACMQFINIVVHSVENMNFRVFLQYEFTHLGLDLYLERLRLTESDKLQVQIQAYLDNIFDVGALLEDTETKNAVLEHMEELQEQVALLTERLRDAENESMAKIAELEKQLSQARKELETLRERFSESTAMGPSRRPPEPEKAPPAAPTRPSALELKVEELEEKGLIRILRGPGDAVSIEILPVAVATPSGGDAPTPGVPTGSPSPDLAPAAEPAPGAAPPPPPPLPGLPSPQEAPPSAPPQAPPLPGSPEPPPAPPLPGDLPPPPPPPPPPPGTDGPVPPPPPPPPPPPGGPPDALGRRDSELGPGVKAKKPIQTKFRMPLLNWVALKPSQITGTVFTELNDEKVLQELDMSDFEEQFKTKSQGPSLDLSALKSKAAQKAPSKATLIEANRAKNLAITLRKGNLGAERICQAIEAYDLQALGLDFLELLMRFLPTEYERSLITRFEREQRPMEELSEEDRFMLCFSRIPRLPERMTTLTFLGNFPDTAQLLMPQLNAIIAASMSIKSSDKLRQILEIVLAFGNYMNSSKRGAAYGFRLQSLDALLEMKSTDRKQTLLHYLVKVIAEKYPQLTGFHSDLHFLDKAGSVSLDSVLADVRSLQRGLELTQREFVRQDDCMVLKEFLRANSPTMDKLLADSKTAQEAFESVVEYFGENPKTTSPGLFFSLFSRFIKAYKKAEQEVEQWKKEAAAQEAGADTPGKGEPPAPKSPPKARRPQMDLISELKRRQQKEPLIYESDRDGAIEDIITVIKTVPFTARTGKRTSRLLCEASLGEEMPL

SEQ ID NO: 16602 - protein, 1104 aa, Homo sapiens
MGNAAGSAEQPAGPAAPPPKQPAPPKQPMPAAGELEERFNRALNCMNLPPDKVQLLSQYDNEKKWELICDQERFQVKNPPAAYIQKLKSYVDTGGVSRKVAADWMSNLGFKRRVQESTQVLRELETSLRTNHIGWVQEFLNEENRGLDVLLEYLAFAQCSVTYDMESTDNGASNSEKNKPLEQSVEDLSKGPPSSVPKSRHLTIKLTPAHSRKALRNSRIVSQKDDVHVCIMCLRAIMNYQSGFSLVMNHPACVNEIALSLNNKNPRTKALVLELLAAVCLVRGGHDIILAAFDNFKEVCGEQHRFEKLMEYFRNEDSNIDFMVACMQFINIVVHSVENMNFRVFLQYEFTHLGLDLYLERLRLTESDKLQVQIQAYLDNIFDVGALLEDTETKNAVLEHMEELQEQVALLTERLRDAENESMAKIAELEKQLSQARKELETLRERFSESTAMGPSRRPPEPEKAPPAAPTRPSALELKVEELEEKGLIRILRGPGDAVSIEILPVAVATPSGGDAPTPGVPTGSPSPDLAPAAEPAPGAAPPPPPPLPGLPSPQEAPPSAPPQAPPLPGSPEPPPAPPLPGDLPPPPPPPPPPPGTDGPVPPPPPPPPPPPGGPPDALGRRDSELGPGVKAKKPIQTKFRMPLLNWVALKPSQITGTVFTELNDEKVLQELDMSDFEEQFKTKSQGPSLDLSALKSKAAQKAPSKATLIEANRAKNLAITLRKGNLGAERICQAIEAYDLQALGLDFLELLMRFLPTEYERSLITRFEREQRPMEELSEEDRFMLCFSRIPRLPERMTTLTFLGNFPDTAQLLMPQLNAIIAASMSIKSSDKLRQILEIVLAFGNYMNSSKRGAAYGFRLQSLDALLEMKSTDRKQTLLHYLVKVIAEKYPQLTGFHSDLHFLDKAGSVSLDSVLADVRSLQRGLELTQREFVRQDDCMVLKEFLRANSPTMDKLLADSKTAQEAFESVVEYFGENPKTTSPGLFFSLFSRFIKAYKKAEQEVEQWKKEAAAQEAGADTPGKGEPPAPKSPPKARRPQMDLISELKRRQQKEPLIYESDRDGAIEDIITDLRNQPYIRADTGRRSARRRPPGPPLQVTSDLSL

SEQ ID NO: 16603 - protein, 1158 aa, Homo sapiens
MGNAAGSAEQPAGPAAPPPKQPAPPKQPMPAAGELEERFNRALNCMNLPPDKVQLLSQYDNEKKWELICDQERFQVKNPPAAYIQKLKSYVDTGGVSRKVAADWMSNLGFKRRVQESTQVLRELETSLRTNHIGWVQEFLNEENRGLDVLLEYLAFAQCSVTYDMESTDNGASNSEKNKPLEQSVEDLSKGPPSSVPKSRHLTIKLTPAHSRKALRNSRIVSQKDDVHVCIMCLRAIMNYQSGFSLVMNHPACVNEIALSLNNKNPRTKALVLELLAAVCLVRGGHDIILAAFDNFKEVCGEQHRFEKLMEYFRNEDSNIDFMVACMQFINIVVHSVENMNFRVFLQYEFTHLGLDLYLERLRLTESDKLQVQIQAYLDNIFDVGALLEDTETKNAVLEHMEELQEQVALLTERLRDAENESMAKIAELEKQLSQARKELETLRERFSESTAMGPSRRPPEPEKAPPAAPTRPSALELKVEELEEKGLIRILRGPGDAVSIEILPVAVATPSGGDAPTPGVPTGSPSPDLAPAAEPAPGAAPPPPPPLPGLPSPQEAPPSAPPQAPPLPGSPEPPPAPPLPGDLPPPPPPPPPPPGTDGPVPPPPPPPPPPPGGPPDALGRRDSELGPGVKAKKPIQTKFRMPLLNWVALKPSQITGTVFTELNDEKVLQELDMSDFEEQFKTKSQGPSLDLSALKSKAAQKAPSKATLIEANRAKNLAITLRKGNLGAERICQAIEAYDLQALGLDFLELLMRFLPTEYERSLITRFEREQRPMEELSEEDRFMLCFSRIPRLPERMTTLTFLGNFPDTAQLLMPQLNAIIAASMSIKSSDKLRQILEIVLAFGNYMNSSKRGAAYGFRLQSLDALLEMKSTDRKQTLLHYLVKVIAEKYPQLTGFHSDLHFLDKAGSVSLDSVLADVRSLQRGLELTQREFVRQDDCMVLKEFLRANSPTMDKLLADSKTAQEAFESVVEYFGENPKTTSPGLFFSLFSRFIKAYKKAEQEVEQWKKEAAAQEAGADTPGKGEPPAPKSPPKARRPQMDLISELKRRQQKEPLIYESDRDGAIEDIITGKGLARPWSYPQSVLLCFLLTQCAILWGTGCHTASCYLFCFSFLFPFSTPLHLPHPHSVIKTVPFTARTGKRTSRLLCEASLGEEMPL

SEQ ID NO: 16604 - protein, 766 aa, Homo sapiens
MEEIKPASASCVSKEKPSKVSDLISRFEGGSSLSNYSDLKKESAVNLNAPRTPGRHGLTTTPQQKLLSQHLPQRQGNDTDKTQGAQTCVANGVMAAQNQMECEEEKAATLSSDTSIQASEPLLDTHIVNGERDETATAPASPTTDSCDGNASDSSYRTPGIGPVLPLEERGAETETKVQERENGESPLELEQLDQHHEMKETNEQKLHKIANELLLTERAYVNRLDLLDQVFYCKLLEEANRGSFPAEMVNKIFSNISSINAFHSKFLLPELEKRMQEWETTPRIGDILQKLAPFLKMYGEYVKGFDNAMELVKNMTERIPQFKSVVEEIQKQKICGSLTLQHHMLEPVQRIPRYEMLLKDYLRKLPPDSLDWNDAKKSLEIISTAASHSNSAIRKMENLKKLLEIYEMLGEEEDIVNPSNELIKEGQILKLAARNTSAQERYLFLFNNMLLYCVPKFSLVGSKFTVRTRVGIDGMKIVETQNEEYPHTFQVSGKERTLELQASSAQDKEEWIKALQETIDAFHQRHETFRNAIAKDNDIHSEVSTAELGKRAPRWIRDNEVTMCMKCKEPFNALTRRRHHCRACGYVVCWKCSDYKAQLEYDGGKLSKVCKDCYQIISGFTDSEEKKRKGILEIESAEVSGNSVVCSFLQYMEKSKPWQKAWCVIPKQDPLVLYMYGAPQDVRAQATIPLLGYVVDEMPRSADLPHSFKLTQSKSVHSFAADSEELKQKWLKVILLAVTGETPGGPNEHPATLDDHPEPKKKSEC

SEQ ID NO: 16605 - protein, 280 aa, Homo sapiens
MVNKIFSNISSINAFHSKFLLPELEKRMQEWETTPRIGDILQKLAPFLKMYGEYVKGFDNAMELVKNMTERIPQFKSVVEEIQKQKICGSLTLQHHMLEPVQRIPRYEMLLKDYLRKLPPDSLDWNDAKKSLEIISTAASHSNSAIRKMENLKKLLEIYEMLGEEEDIVNPSNELIKEGQILKLAARNTSAQERYLFLFNNMLLYCVPKFSLVGSKFTVRTRVGIDGMKIVETQNEEYPHTFQVSGKERTLELQASSAQDKEEWIKRRGFAMLPRLISNS

SEQ ID NO: 16606 - protein, 188 aa, Homo sapiens
MFSCFLCILSFSSLSNYSDLKKESAVNLNAPRTPGRHGLTTTPQQKLLSQHLPQRQGNDTDKTQGAQTCVANGVMAAQNQMECEEEKAATLSSDTSIQASEPLLDTHIVNGERDETATAPASPTTDSCDGNASDSSYRTPGIGPVLPLEERGAETETKVQERENGESPLELEQLDQHHEMKVEHETSS

SEQ ID NO: 16607 - protein, 208 aa, Homo sapiens
MWKWILTHCASAFPHLPGCCCCCFLLLFLVSSVPVTCQALGQDMVSPEATNSSSSSFSSPSSAGRHVRSYNHLQGDVRWRKLFSFTKYFLKIEKNGKVSGTKKENCPYSILEITSVEIGVVAVKAINSNYYLAMNKKGKLYGSKEFNNDCKLKERIEENGYNTYASFNWQHNGRQMYVALNGKGAPRRGQKTRRKNTSAHFLPMVVHS

SEQ ID NO: 16608 - protein, 216 aa, Homo sapiens
MGAARLLPNLTLCLQLLILCCQTQGENHPSPNFNQYVRDQGAMTDQLSRRQIREYQLYSRTSGKHVQVTGRRISATAEDGNKFAKLIVETDTFGSRVRIKGAESEKYICMNKRGKLIGKPSGKSKDCVFTEIVLENNYTAFQNARHEGWFMAFTRQGRPRQASRSRQNQREAHFIKRLYQGQLPFPNHAEKQKQFEFVGSAPTRRTKRTRRPQPLT

SEQ ID NO: 16609 - protein, 205 aa, Homo sapiens
MGAARLLPNLTLCLQLLILCCQTQYVRDQGAMTDQLSRRQIREYQLYSRTSGKHVQVTGRRISATAEDGNKFAKLIVETDTFGSRVRIKGAESEKYICMNKRGKLIGKPSGKSKDCVFTEIVLENNYTAFQNARHEGWFMAFTRQGRPRQASRSRQNQREAHFIKRLYQGQLPFPNHAEKQKQFEFVGSAPTRRTKRTRRPQPLT

SEQ ID NO: 16610 - protein, 412 aa, Homo sapiens
MASCAEPSEPSAPLPAGVPPLEDFEVLDGVEDAEGEEEEEEEEEEEDDLSELPPLEDMGQPPAEEAEQPGALAREFLAAMEPEPAPAPAPEEWLDILGNGLLRKKTLVPGPPGSSRPVKGQVVTVHLQTSLENGTRVQEEPELVFTLGDCDVIQALDLSVPLMDVGETAMVTADSKYCYGPQGRSPYIPPHAALCLEVTLKTAVDGPDLEMLTGQERVALANRKRECGNAHYQRADFVLAANSYDLAIKAITSSAKVDMTFEEEAQLLQLKVKCLNNLAASQLKLDHYRAALRSCSLVLEHQPDNIKALFRKGKVLAQQGEYSEAIPILRAALKLEPSNKTIHAELSKLVKKHAAQRSTETALYRKMLGNPSRLPAKCPGKGAWSIPWKWLFGATAVALGGVALSVVIAARN

SEQ ID NO: 16611 - protein, 413 aa, Homo sapiens
MASCAEPSEPSAPLPAGVPPLEDFEVLDGVEDAEGEEEEEEEEEEEDDLSELPPLEDMGQPPAEEAEQPGALAREFLAAMEPEPAPAPAPEEWLDILGNGLLRKKTLVPGPPGSSRPVKGQVVTVHLQTSLENGTRVQEEPELVFTLGDCDVIQALDLSVPLMDVGETAMVTADSKYCYGPQGSRSPYIPPHAALCLEVTLKTAVDGPDLEMLTGQERVALANRKRECGNAHYQRADFVLAANSYDLAIKAITSSAKVDMTFEEEAQLLQLKVKCLNNLAASQLKLDHYRAALRSCSLVLEHQPDNIKALFRKGKVLAQQGEYSEAIPILRAALKLEPSNKTIHAELSKLVKKHAAQRSTETALYRKMLGNPSRLPAKCPGKGAWSIPWKWLFGATAVALGGVALSVVIAARN

SEQ ID NO: 16612 - protein, 253 aa, Homo sapiens
MASCAEPSEPSAPLPAGVPPLEDFEVLDGVEDAEGEEEEEEEEEEEDDLSELPPLEDMGQPPAEEAEQPGALAREFLAAMEPEPAPAPAPEEWLDILVDMTFEEEAQLLQLKVKCLNNLAASQLKLDHYRAALRSCSLVLEHQPDNIKALFRKGKVLAQQGEYSEAIPILRAALKLEPSNKTIHAELSKLVKKHAAQRSTETALYRKMLGNPSRLPAKCPGKGAWSIPWKWLFGATAVALGGVALSVVIAARN

SEQ ID NO: 16613 - protein, 216 aa, Homo sapiens
MRSGCVVVHVWILAGLWLAVAGRPLAFSDAGPHVHYGWGDPIRLRHLYTSGPHGLSSCFLRIRADGVVDCARGQSAHSLLEIKAVALRTVAIKGVHSVRYLCMGADGKMQGLLQYSEEDCAFEEEIRPDGYNVYRSEKHRLPVSLSSAKQRQLYKNRGFLPLSHFLPMLPMVPEEPEDLRGHLESDMFSSPLETDSMDPFGLVTGLEAVRSPSFEK

SEQ ID NO: 16614 - protein, 496 aa, Homo sapiens
MDDVPAPTPAPAPPAAAAPRVPFHCSECGKSFRYRSDLRRHFARHTALKPHACPRCGKGFKHSFNLANHLRSHTGERPYRCSACPKGFRDSTGLLHHQVVHTGEKPYCCLVCELRFSSRSSLGRHLKRQHRGVLPSPLQPGPGLPALSAPCSVCCNVGPCSVCGGSGAGGGEGPEGAGAGLGSWGLAEAAAAAAASLPPFACGACARRFDHGRELAAHWAAHTDVKPFKCPRCERDFNAPALLERHKLTHDLQGPGAPPAQAWAAGPGAGPETAGEGTAAEAGDAPLASDRRLLLGPAGGGVPKLGGLLPEGGGEAPAPAAAAEPSEDTLYQCDCGTFFASAAALASHLEAHSGPATYGCGHCGALYAALAALEEHRRVSHGEGGGEEAATAAREREPASGEPPSGSGRGKKIFGCSECEKLFRSPRDLERHVLVHTGEKPFPCLECGKFFRHECYLKRHRLLHGTERPFPCHICGKGFITLSNLSRHLKLHRGMD

SEQ ID NO: 16615 - protein, 660 aa, Homo sapiens
MGLQTTKWPSHGAFFLKSWLIISLGLYSQVSKLLACPSVCRCDRNFVYCNERSLTSVPLGIPEGVTVLYLHNNQINNAGFPAELHNVQSVHTVYLYGNQLDEFPMNLPKNVRVLHLQENNIQTISRAALAQLLKLEELHLDDNSISTVGVEDGAFREAISLKLLFLSKNHLSSVPVGLPVDLQELRVDENRIAVISDMAFQNLTSLERLIVDGNLLTNKGIAEGTFSHLTKLKEFSIVRNSLSHPPPDLPGTHLIRLYLQDNQINHIPLTAFSNLRKLERLDISNNQLRMLTQGVFDNLSNLKQLTARNNPWFCDCSIKWVTEWLKYIPSSLNVRGFMCQGPEQVRGMAVRELNMNLLSCPTTTPGLPLFTPAPSTASPTTQPPTLSIPNPSRSYTPPTPTTSKLPTIPDWDGRERVTPPISERIQLSIHFVNDTSIQVSWLSLFTVMAYKLTWVKMGHSLVGGIVQERIVSGEKQHLSLVNLEPRSTYRICLVPLDAFNYRAVEDTICSEATTHASYLNNGSNTASSHEQTTSHSMGSPFLLAGLIGGAVIFVLVVLLSVFCWHMHKKGRYTSQKWKYNRGRRKDDYCEAGTKKDNSILEMTETSFQIVSLNNDQLLKGDFRLQPIYTPNGGINYTDCHIPNNMRYCNSSVPDLEHCHT

SEQ ID NO: 16616 - protein, 977 aa, Homo sapiens
MLLWVILLVLAPVSGQFARTPRPIIFLQPPWTTVFQGERVTLTCKGFRFYSPQKTKWYHRYLGKEILRETPDNILEVQESGEYRCQAQGSPLSSPVHLDFSSASLILQAPLSVFEGDSVVLRCRAKAEVTLNNTIYKNDNVLAFLNKRTDFHIPHACLKDNGAYRCTGYKESCCPVSSNTVKIQVQEPFTRPVLRASSFQPISGNPVTLTCETQLSLERSDVPLRFRFFRDDQTLGLGWSLSPNFQITAMWSKDSGFYWCKAATMPYSVISDSPRSWIQVQIPASHPVLTLSPEKALNFEGTKVTLHCETQEDSLRTLYRFYHEGVPLRHKSVRCERGASISFSLTTENSGNYYCTADNGLGAKPSKAVSLSVTVPVSHPVLNLSSPEDLIFEGAKVTLHCEAQRGSLPILYQFHHEGAALERRSANSAGGVAISFSLTAEHSGNYYCTADNGFGPQRSKAVSLSVTVPVSHPVLTLSSAEALTFEGATVTLHCEVQRGSPQILYQFYHEDMPLWSSSTPSVGRVSFSFSLTEGHSGNYYCTADNGFGPQRSEVVSLFVTVPVSRPILTLRVPRAQAVVGDLLELHCEAPRGSPPILYWFYHEDVTLGSSSAPSGGEASFNLSLTAEHSGNYSCEANNGLVAQHSDTISLSVIVPVSRPILTFRAPRAQAVVGDLLELHCEALRGSSPILYWFYHEDVTLGKISAPSGGGASFNLSLTTEHSGIYSCEADNGLEAQRSEMVTLKVAVPVSRPVLTLRAPGTHAAVGDLLELHCEALRGSPLILYRFFHEDVTLGNRSSPSGGASLNLSLTAEHSGNYSCEADNGLGAQRSETVTLYITGLTANRSGPFATGVAGGLLSIAGLAAGALLLYCWLSRKAGRKPASDPARSPSDSDSQEPTYHNVPAWEELQPVYTNANPRGENVVYSEVRIIQEKKKHAVASDPRHLRNKGSPIIYSEVKVASTPVSGSLFLASSAPHR

SEQ ID NO: 16617 - protein, 124 aa, Homo sapiens
MLLWVILLVLAPVSGQFARTPRPIIFLQPPWTTVFQGERVTLTCKGFRFYSPQKTKWYHRYLGKEILRETPDNILEVQESGEYRCQAQGSPLSSPVHLDFSSEMGFPHAAQANVELLGSSDLLT

SEQ ID NO: 16618 - protein, 759 aa, Homo sapiens
MLLWVILLVLAPVSGQFARTPRPIIFLQPPWTTVFQGERVTLTCKGFRFYSPQKTKWYHRYLGKEILRETPDNILEVQESGEYRCQAQGSPLSSPVHLDFSSASLILQAPLSVFEGDSVVLRCRAKAEVTLNNTIYKNDNVLAFLNKRTDFHIPHACLKDNGAYRCTGYKESCCPVSSNTVKIQVQEPFTRPVLRASSFQPISGNPVTLTCETQLSLERSDVPLRFRFFRDDQTLGLGWSLSPNFQITAMWSKDSGFYWCKAATMPYSVISDSPRSWIQVQIPASHPVLTLSPEKALNFEGTKVTLHCETQEDSLRTLYRFYHEGVPLRHKSVRCERGASISFSLTTENSGNYYCTADNGLGAKPSKAVSLSVTVPVSHPVLNLSSPEDLIFEGAKVTLHCEAQRGSLPILYQFHHEGAALERRSANSAGGVAISFSLTAEHSGNYYCTADNGFGPQRSKAVSLSVTVPVSHPVLTLSSAEALTFEGATVTLHCEVQRGSPQILYQFYHEDMPLWSSSTPSVGRVSFSFSLTEGHSGNYYCTADNGFGPQRSEVVSLFVTVPVSRPILTLRVPRAQAVVGDLLELHCEAPRGSPPILYWFYHEDVTLGSSSAPSGGEASFNLSLTAEHSGNYSCEANNGLVAQHSDTISLSVIVPVSRPILTFRAPRAQAVVGDLLELHCEALRGSSPILYWFYHEDVTLGKISAPSGGGASFNLSLTTEHSGIYSCEADNGLEAQRSEMVTLKVAGEWALPTSSTSEN

SEQ ID NO: 16619 - protein, 592 aa, Homo sapiens
MLLWVILLVLAPVSGQFARTPRPIIFLQPPWTTVFQGERVTLTCKGFRFYSPQKTKWYHRYLGKEILRETPDNILEVQESGEYRCQAQGSPLSSPVHLDFSSASLILQAPLSVFEGDSVVLRCRAKAEVTLNNTIYKNDNVLAFLNKRTDFHIPHACLKDNGAYRCTGYKESCCPVSSNTVKIQVQEPFTRPVLRASSFQPISGNPVTLTCETQLSLERSDVPLRFRFFRDDQTLGLGWSLSPNFQITAMWSKDSGFYWCKAATMPYSVISDSPRSWIQVQIPASHPVLTLSPEKALNFEGTKVTLHCETQEDSLRTLYRFYHEGVPLRHKSVRCERGASISFSLTTENSGNYYCTADNGLGAKPSKAVSLSVTVPVSHPVLNLSSPEDLIFEGAKVTLHCEAQRGSLPILYQFHHEGAALERRSANSAGGVAISFSLTAEHSGNYYCTADNGFGPQRSKAVSLSVTVPVSHPVLTLSSAEALTFEGATVTLHCEVQRGSPQILYQFYHEDMPLWSSSTPSVGRVSFSFSLTEGHSGNYYCTADNGFGPQRSEVVSLFVTGKCWVLASHPPLAEFSLTHSFKNLFALSSFLP

SEQ ID NO: 16620 - protein, 152 aa, Homo sapiens
MLLWVILLVLAPVSGQFARTPRPIIFLQPPWTTVFQGERVTLTCKGFRFYSPQKTKWYHRYLGKEILRETPDNILEVQESGEYRCQAQGSPLSSPVHLDFSSASLILQAPLSVFEGDSVVLRCRAKAEVTLNNTIYKNDNVLAFLNKRTDFQ

SEQ ID NO: 16621 - protein, 649 aa, Homo sapiens
MISAAWSIFLIGTKIGLFLQVAPLSVMAKSCPSVCRCDAGFIYCNDRFLTSIPTGIPEDATTLYLQNNQINNAGIPSDLKNLLKVERIYLYHNSLDEFPTNLPKYVKELHLQENNIRTITYDSLSKIPYLEELHLDDNSVSAVSIEEGAFRDSNYLRLLFLSRNHLSTIPWGLPRTIEELRLDDNRISTISSPSLQGLTSLKRLVLDGNLLNNHGLGDKVFFNLVNLTELSLVRNSLTAAPVNLPGTNLRKLYLQDNHINRVPPNAFSYLRQLYRLDMSNNNLSNLPQGIFDDLDNITQLILRNNPWYCGCKMKWVRDWLQSLPVKVNVRGLMCQAPEKVRGMAIKDLNAELFDCKDSGIVSTIQITTAIPNTVYPAQGQWPAPVTKQPDIKNPKLTKDHQTTGSPSRKTITITVKSVTSDTIHISWKLALPMTALRLSWLKLGHSPAFGSITETIVTGERSEYLVTALEPDSPYKVCMVPMETSNLYLFDETPVCIETETAPLRMYNPTTTLNREQEKEPYKNPNLPLAAIIGGAVALVTIALLALVCWYVHRNGSLFSRNCAYSKGRRRKDDYAEAGTKKDNSILEIRETSFQMLPISNEPISKEEFVIHTIFPPNGMNLYKNNHSESSSNRSYRDSGIPDSDHSHS

SEQ ID NO: 16622 - protein, 495 aa, Homo sapiens
MRLTRCQAALAAAITLNLLVLFYVSWLQHQPRNSRARGPRRASAAGPRVTVLVREFEAFDNAVPELVDSFLQQDPAQPVVVAADTLPYPPLALPRIPNVRLALLQPALDRPAAASRPETYVATEFVALVPDGARAEAPGLLERMVEALRAGSARLVAAPVATANPARCLALNVSLREWTARYGAAPAAPRCDALDGDAVVLLRARDLFNLSAPLARPVGTSLFLQTALRGWAVQLLDLTFAAARQPPLATAHARWKAEREGRARRAALLRALGIRLVSWEGGRLEWFGCNKETTRCFGTVVGDTPAYLYEERWTPPCCLRALRETARYVVGVLEAAGVRYWLEGGSLLGAARHGDIIPWDYDVDLGIYLEDVGNCEQLRGAEAGSVVDERGFVWEKAVEGDFFRVQYSESNHLHVDLWPFYPRNGVMTKDTWLDHRQDVEFPEHFLQPLVPLPFAGFVAQAPNNYRRFLELKFGPGVIENPQYPNPALLSLTGSG

SEQ ID NO: 16623 - protein, 628 aa, Homo sapiens
MAAAAVDSAMEVVPALAEEAAPEVAGLSCLVNLPGEVLEYILCCGSLTAADIGRVSSTCRRLRELCQSSGKVWKEQFRVRWPSLMKHYSPTDYVNWLEEYKVRQKAGLEARKIVASFSKRFFSEHVPCNGFSDIENLEGPEIFFEDELVCILNMEGRKALTWKYYAKKILYYLRQQKILNNLKAFLQQPDDYESYLEGAVYIDQYCNPLSDISLKDIQAQIDSIVELVCKTLRGINSRHPSLAFKAGESSMIMEIELQSQVLDAMNYVLYDQLKFKGNRMDYYNALNLYMHQVLIRRTGIPISMSLLYLTIARQLGVPLEPVNFPSHFLLRWCQGAEGATLDIFDYIYIDAFGKGKQLTVKECEYLIGQHVTAALYGVVNVKKVLQRMVGNLLSLGKREGIDQSYQLLRDSLDLYLAMYPDQVQLLLLQARLYFHLGIWPEKSFCLVLKVLDILQHIQTLDPGQHGAVGYLVQHTLEHIERKKEEVGVEVKLRSDEKHRDVCYSIGLIMKHKRYGYNCVIYGWDPTCMMGHEWIRNMNVHSLPHGHHQPFYNVLVEDGSCRYAAQENLEYNVEPQEISHPDVGRYFSEFTGTHYIPNAELEIRYPEDLEFVYETVQNIYSAKKENIDE

SEQ ID NO: 16624 - protein, 621 aa, Homo sapiens
MAAAAVDSAMEVVPALAEEAAPEVAGLSCLVNLPGEVLEYILCCGSLTAADIGRVSSTCRRLRELCQSSGKVWKEQFRVRWPSLMKHYSPTDYVNWLEEYKVRQKAGLEARKIVASFSKRFFSEHVPCNGFSDIENLEGPEIFFEDELVCILNMEGRKALTWKYYAKKILYYLRQQKILNNLKAFLQQPDDYESYLEGAVYIDQYCNPLSDISLKDIQAQIDSIVELVCKTLRGINSRHPSLAFKAGESSMIMEIELQSQVLDAMNYVLYDQLKFKGNRMDYYNALNLYMHQVLIRRTGIPISMSLLYLTIARQLGVPLEPVNFPSHFLLRWCQGAEGATLDIFDYIYIDAFGKGKQLTVKECEYLIGQHVTAALYGVVNVKKVLQRMVGNLLSLGKREGIDQSYQLLRDSLDLYLAMYPDQVQLLLLQARLYFHLGIWPEKVLDILQHIQTLDPGQHGAVGYLVQHTLEHIERKKEEVGVEVKLRSDEKHRDVCYSIGLIMKHKRYGYNCVIYGWDPTCMMGHEWIRNMNVHSLPHGHHQPFYNVLVEDGSCRYAAQENLEYNVEPQEISHPDVGRYFSEFTGTHYIPNAELEIRYPEDLEFVYETVQNIYSAKKENIDE

SEQ ID NO: 16625 - protein, 580 aa, Homo sapiens
MGEKAVPLLRRRRVKRSCPSCGSELGVEEKRGKGNPISIQLFPPELVEHIISFLPVRDLVALGQTCRYFHEVCDGEGVWRRICRRLSPRLQDQGSGVRPWKRAAILNYTKGLYFQAFGGRRRCLSKSVAPLLAHGYRRFLPTKDHVFILDYVGTLFFLKNALVSTLGQMQWKRACRYVVLCRGAKDFASDPRCDTVYRKYLYVLATREPQEVVGTTSSRACDCVEVYLQSSGQRVFKMTFHHSMTFKQIVLVGQETQRALLLLTEEGKIYSLVVNETQLDQPRSYTVQLALRKVSHYLPHLRVACMTSNQSSTLYVTDQGGVYFEVHTPGVYRDLFGTLQAFDPLDQQMPLALSLPAKILFCALGYNHLGLVDEFGRIFMQGNNRYGQLGTGDKMDRGEPTQVCYLQRPITLWCGLNHSLVLSQSSEFSKELLGCGCGAGGRLPGWPKGSASFVKLQVKVPLCACALCATRECLYILSSHDIEQHAPYRHLPASRVVGTPEPSLGARAPQDPGGMAQACEEYLSQIHSCQTLQDRTEKMKEIVGWMPLMAAQKDFFWEALDMLQRAEGGGGGVGPPAPET

SEQ ID NO: 16626 - protein, 318 aa, Homo sapiens
MGEKAVPLLRRRRVKRSCPSCGSELGVEEKRGKGNPISIQLFPPELVEHIISFLPVRDLVALGQTCRYFHEVCDGEGVWRRICRRLSPRLQDQDTKGLYFQAFGGRRRCLSKSVAPLLAHGYRRFLPTKDHVFILDYVGTLFFLKNALVSTLGQMQWKRACRYVVLCRGAKDFASDPRCDTVYRKYLYVLATREPQEVVGTTSSRACDCVEVYLQSSGQRVFKMTFHHSMTFKQIVLVGQETQRALLLLTEEGKIYSLVVNETQLDQPRSYTVQLALRKVSHYLPHLRVACMTSNQSSTLYVTDPILCSWLQPPWPGG

SEQ ID NO: 16627 - protein, 618 aa, Homo sapiens
MVWESQQERGGQGPRRQEGRSREGAIRMVRGSQRRKLQKFTRLCGREEGLRVKRSCPSCGSELGVEEKRGKGNPISIQLFPPELVEHIISFLPVRDLVALGQTCRYFHEVCDGEGVWRRICRRLSPRLQDQGSGVRPWKRAAILNYTKGLYFQAFGGRRRCLSKSVAPLLAHGYRRFLPTKDHVFILDYVGTLFFLKNALVSTLGQMQWKRACRYVVLCRGAKDFASDPRCDTVYRKYLYVLATREPQEVVGTTSSRACDCVEVYLQSSGQRVFKMTFHHSMTFKQIVLVGQETQRALLLLTEEGKIYSLVVNETQLDQPRSYTVQLALRKVSHYLPHLRVACMTSNQSSTLYVTDQGGVYFEVHTPGVYRDLFGTLQAFDPLDQQMPLALSLPAKILFCALGYNHLGLVDEFGRIFMQGNNRYGQLGTGDKMDRGEPTQVCYLQRPITLWCGLNHSLVLSQSSEFSKELLGCGCGAGGRLPGWPKGSASFVKLQVKVPLCACALCATRECLYILSSHDIEQHAPYRHLPASRVVGTPEPSLGARAPQDPGGMAQACEEYLSQIHSCQTLQDRTEKMKEIVGWMPLMAAQKDFFWEALDMLQRAEGGGGGVGPPAPET

SEQ ID NO: 16628 - protein, 568 aa, Homo sapiens
MVKRSCPSCGSELGVEEKRGKGNPISIQLFPPELVEHIISFLPVRDLVALGQTCRYFHEVCDGEGVWRRICRRLSPRLQDQGSGVRPWKRAAILNYTKGLYFQAFGGRRRCLSKSVAPLLAHGYRRFLPTKDHVFILDYVGTLFFLKNALVSTLGQMQWKRACRYVVLCRGAKDFASDPRCDTVYRKYLYVLATREPQEVVGTTSSRACDCVEVYLQSSGQRVFKMTFHHSMTFKQIVLVGQETQRALLLLTEEGKIYSLVVNETQLDQPRSYTVQLALRKVSHYLPHLRVACMTSNQSSTLYVTDQGGVYFEVHTPGVYRDLFGTLQAFDPLDQQMPLALSLPAKILFCALGYNHLGLVDEFGRIFMQGNNRYGQLGTGDKMDRGEPTQVCYLQRPITLWCGLNHSLVLSQSSEFSKELLGCGCGAGGRLPGWPKGSASFVKLQVKVPLCACALCATRECLYILSSHDIEQHAPYRHLPASRVVGTPEPSLGARAPQDPGGMAQACEEYLSQIHSCQTLQDRTEKMKEIVGWMPLMAAQKDFFWEALDMLQRAEGGGGGVGPPAPET

SEQ ID NO: 16629 - protein, 155 aa, Homo sapiens
MHKNSKRNNNLRVSHTEANSVDAEKEKNESQNNFFELLPAEITFKIFSQLDIRSLCRASLTCRSWNDTIRNSDSLWKPHCMTVRAVCRREIDDDLESGYSWRVILLRNYQKSKVKHEWLSGRYSNICSPISLPEKIMYPMDADTWGEILEAELER

SEQ ID NO: 16630 - protein, 1894 aa, Homo sapiens
MAPEAGATLRAPRRLSWAALLLLAALLPVASSAAASVDHPLKPRHVKLLSTKMGLKVTWDPPKDATSRPVEHYNIAYGKSLKSLKYIKVNAETYSFLIEDVEPGVVYFVLLTAENHSGVSRPVYRAESPPGGEWIEIDGFPIKGPGPFNETVTEKEVPNKPLRVRVRSSDDRLSVAWKAPRLSGAKSPRRSRGFLLGYGESGRKMNYVPLTRDERTHEIKKLASESVYVVSLQSMNSQGRSQPVYRAALTKRKISEEDELDVPDDISVRVMSSQSVLVSWVDPVLEKQKKVVASRQYTVRYREKGELARWDYKQIANRRVLIENLIPDTVYEFAVRISQGERDGKWSTSVFQRTPESAPTTAPENLNVWPVNGKPTVVAASWDALPETEGKVKEYILSYAPALKPFGAKSLTYPGDTTSALVDGLQPGERYLFKIRATNRRGLGPHSKAFIVAMPTTSKADVEQNTEDNGKPEKPEPSSPSPRAPASSQHPSVPASPQGRNAKDLLLDLKNKILANGGAPRKPQLRAKKAEELDLQSTEITGEEELGSREDSPMSPSDTQDQKRTLRPPSRHGHSVVAPGRTAVRARMPALPRREGVDKPGFSLATQPRPGAPPSASASPAHHASTQGTSHRPSLPASLNDNDLVDSDEDERAVGSLHPKGAFAQPRPALSPSRQSPSSVLRDRSSVHPGAKPASPARRTPHSGAAEEDSSASAPPSRLSPPHGGSSRLLPTQPHLSSPLSKGGKDGEDAPATNSNAPSRSTMSSSVSSHLSSRTQVSEGAEASDGESHGDGDREDGGRQAEATAQTLRARPASGHFHLLRHKPFAANGRSPSRFSIGRGPRLQPSSSPQSTVPSRAHPRVPSHSDSHPKLSSGIHGDEEDEKPLPATVVNDHVPSSSRQPISRGWEDLRRSPQRGASLHRKEPIPENPKSTGADTHPQGKYSSLASKAQDVQQSTDADTEGHSPKAQPGSTDRHASPARPPAARSQQHPSVPRRMTPGRAPQQQPPPPVATSQHHPGPQSRDAGRSPSQPRLSLTQAGRPRPTSQGRSHSSSDPYTASSRGMLPTALQNQDEDAQGSYDDDSTEVEAQDVRAPAHAARAKEAAASLPKHQQVESPTGAGAGGDHRSQRGHAASPARPSRPGGPQSRARVPSRAAPGKSEPPSKRPLSSKSQQSVSAEDDEEEDAGFFKGGKEDLLSSSVPKWPSSSTPRGGKDADGSLAKEEREPAIALAPRGGSLAPVKRPLPPPPGSSPRASHVPSRLPPRSAATVSPVAGTHPWPQYTTRAPPGHFSTTPMLSLRQRMMHARFRNPLSRQPARPSYRQGYNGRPNVEGKVLPGSNGKPNGQRIINGPQGTKWVVDLDRGLVLNAEGRYLQDSHGNPLRIKLGGDGRTIVDLEGTPVVSPDGLPLFGQGRHGTPLANAQDKPILSLGGKPLVGLEVIKKTTHPPTTTMQPTTTTTPLPTTTTPRPTTATTRRTTTTRRTTTRRPTTTVRTTTRTTTTTTPTPTTPIPTCPPGTLERHDDDGNLIMSSNGIPECYAEEDEFSGLETDTAVPTEEAYVIYDEDYEFETSRPPTTTEPSTTATTPRVIPEEGAISSFPEEEFDLAGRKRFVAPYVTYLNKDPSAPCSLTDALDHFQVDSLDEIIPNDLKKSDLPPQHAPRNITVVAVEGCHSFVIVDWDKATPGDVVTGYLVYSASYEDFIRNKWSTQASSVTHLPIENLKPNTRYYFKVQAQNPHGYGPISPSVSFVTESDNPLLVVRPPGGEPIWIPFAFKHDPSYTDCHGRQYVKRTWYRKFVGVVLCNSLRYKIYLSDNLKDTFYSIGDSWGRGEDHCQFVDSHLDGRTGPQSYVEALPTIQGYYRQYRQEPVRFGNIGFGTPYYYVGWYECGVSIPGKW

SEQ ID NO: 16631 - protein, 1831 aa, Homo sapiens
MAPEAGATLRAPRRLSWAALLLLAALLPVASSAAASVDHPLKPRHVKLLSTKMGLKVTWDPPKDATSRPVEHYNIAYGKSLKSLKYIKVNAETYSFLIEDVEPGVVYFVLLTAENHSGVSRPVYRAESPPGGEWIEIDGFPIKGPGPFNETVTEKEVPNKPLRVRVRSSDDRLSVAWKAPRLSGAKSPRRSRGFLLGYGESGRKMNYVPLTRDERTHEIKKLASESVYVVSLQSMNSQGRSQPVYRAALTKRKISEEDELDVPDDISVRVMSSQSVLVSWVDPVLEKQKKVVASRQYTVRYREKGELARWDYKQIANRRVLIENLIPDTVYEFAVRISQGERDGKWSTSVFQRTPESAPTTAPENLNVWPVNGKPTVVAASWDALPETEGKVKASKADVEQNTEDNGKPEKPEPSSPSPRAPASSQHPSVPASPQGRNAKDLLLDLKNKILANGGAPRKPQLRAKKAEELDLQSTEITGEEELGSREDSPMSPSDTQDQKRTLRPPSRHGHSVVAPGRTAVRARMPALPRREGVDKPGFSLATQPRPGAPPSASASPAHHASTQGTSHRPSLPASLNDNDLVDSDEDERAVGSLHPKGAFAQPRPALSPSRQSPSSVLRDRSSVHPGAKPASPARRTPHSGAAEEDSSASAPPSRLSPPHGGSSRLLPTQPHLSSPLSKGGKDGEDAPATNSNAPSRSTMSSSVSSHLSSRTQVSEGAEASDGESHGDGDREDGGRQAEATAQTLRARPASGHFHLLRHKPFAANGRSPSRFSIGRGPRLQPSSSPQSTVPSRAHPRVPSHSDSHPKLSSGIHGDEEDEKPLPATVVNDHVPSSSRQPISRGWEDLRRSPQRGASLHRKEPIPENPKSTGADTHPQGKYSSLASKAQDVQQSTDADTEGHSPKAQPGSTDRHASPARPPAARSQQHPSVPRRMTPGRAPQQQPPPPVATSQHHPGPQSRDAGRSPSQPRLSLTQAGRPRPTSQGRSHSSSDPYTASSRGMLPTALQNQDEDAQGSYDDDSTEVEAQDVRAPAHAARAKEAAASLPKHQQVESPTGAGAGGDHRSQRGHAASPARPSRPGGPQSRARVPSRAAPGKSEPPSKRPLSSKSQQSVSAEDDEEEDAGFFKGGKEDLLSSSVPKWPSSSTPRGGKDADGSLAKEEREPAIALAPRGGSLAPVKRPLPPPPGSSPRASHVPSRLPPRSAATVSPVAGTHPWPQYTTRAPPGHFSTTPMLSLRQRMMHARFRNPLSRQPARPSYRQGYNGRPNVEGKVLPGSNGKPNGQRIINGPQGTKWVVDLDRGLVLNAEGRYLQDSHGNPLRIKLGGDGRTIVDLEGTPVVSPDGLPLFGQGRHGTPLANAQDKPILSLGGKPLVGLEVIKKTTHPPTTTMQPTTTTTPLPTTTTPRPTTATTRRTTTTRRTTTRRPTTTVRTTTRTTTTTTPTPTTPIPTCPPGTLERHDDDGNLIMSSNGIPECYAEEDEFSGLETDTAVPTEEAYVIYDEDYEFETSRPPTTTEPSTTATTPRVIPEEGAISSFPEEEFDLAGRKRFVAPYVTYLNKDPSAPCSLTDALDHFQVDSLDEIIPNDLKKSDLPPQHAPRNITVVAVEGCHSFVIVDWDKATPGDVVTGYLVYSASYEDFIRNKWSTQASSVTHLPIENLKPNTRYYFKVQAQNPHGYGPISPSVSFVTESDNPLLVVRPPGGEPIWIPFAFKHDPSYTDCHGRQYVKRTWYRKFVGVVLCNSLRYKIYLSDNLKDTFYSIGDSWGRGEDHCQFVDSHLDGRTGPQSYVEALPTIQGYYRQYRQEPVRFGNIGFGTPYYYVGWYECGVSIPGKW

SEQ ID NO: 16632 - protein, 439 aa, Homo sapiens
MKLANWYWLSSAVLATYGFLVVANNETEEIKDERAKDVCPVRLESRGKCEEAGECPYQVSLPPLTIQLPKQFSRIEEVFKEVQNLKEIVNSLKKSCQDCKLQADDNGDPGRNGLLLPSTGAPGEVGDNRVRELESEVNKLSSELKNAKEEINVLHGRLEKLNLVNMNNIENYVDSKVANLTFVVNSLDGKCSKCPSQEQIQSRPVQHLIYKDCSDYYAIGKRSSETYRVTPDPKNSSFEVYCDMETMGGGWTVLQARLDGSTNFTRTWQDYKAGFGNLRREFWLGNDKIHLLTKSKEMILRIDLEDFNGVELYALYDQFYVANEFLKYRLHVGNYNGTAGDALRFNKHYNHDLKFFTTPDKDNDRYPSGNCGLYYSSGWWFDACLSANLNGKYYHQKYRGVRNGIFWGTWPGVSEAHPGGYKSSFKEAKMMIRPKHFKP

SEQ ID NO: 16633 - protein, 539 aa, Homo sapiens
MAAPASRQVRRRARAAPRPRSAEDWWWDRLAPRGSGYHLLQSDSMLLVLSEPGPARPRAQRRASRRTPRQPPRGPSAAAKPKAGLRSEAAAAPAPAPAPTPTPEEGPDAGWGDRIPLEILVQIFGLLVAADGPMPFLGRAARVCRRWQEAASQPALWHTVTLSSPLVGRPAKGGVKAEKKLLASLEWLMPNRFSQLQRLTLIHWKSQVHPVLKLVGECCPRLTFLKLSGCHGVTADALVMLAKACCQLHSLDLQHSMVESTAVVSFLEEAGSRMRKLWLTYSSQTTAILGALLGSCCPQLQVLEVSTGINRNSIPLQLPVEALQKGCPQLQVLRLLNLMWLPKPPGRGVAPGPGFPSLEELCLASSTCNFVSNEVLGRLLHGSPNLRLLDLRGCARITPAGLQDLPCRELEQLHLGLYGTSDRLTLAKEGSPFLTQKWCHTLRELDLSGQGFSEKDLEQALAAFLSTPGGSHPALCSLNLRGTRVTPSTVSSVISSCPGLLYLNLESCRCLPRGLKRAYRGLEEVQWCLEQLLTSPSPS

SEQ ID NO: 16634 - protein, 533 aa, Homo sapiens
MAAPASRQVRRRARAAPRPRSAEDWWWDRLAPRGSGYHLLQSDSMLLVLSEPGPARPRAQRRASRRTPRQPPRGPSAAAKPKAGLRSEAAAAPAPAPAPTPTPEEGPDAGWGDRIPLEILVQIFGLLVAADGPMPFLGRAARVCRRWQEAASQPALWHTVTLSSPLVGRPAKGGVKAEKKLLASLEWLMPNRFSQLQRLTLIHWKSQLVGECCPRLTFLKLSGCHGVTADALVMLAKACCQLHSLDLQHSMVESTAVVSFLEEAGSRMRKLWLTYSSQTTAILGALLGSCCPQLQVLEVSTGINRNSIPLQLPVEALQKGCPQLQVLRLLNLMWLPKPPGRGVAPGPGFPSLEELCLASSTCNFVSNEVLGRLLHGSPNLRLLDLRGCARITPAGLQDLPCRELEQLHLGLYGTSDRLTLAKEGSPFLTQKWCHTLRELDLSGQGFSEKDLEQALAAFLSTPGGSHPALCSLNLRGTRVTPSTVSSVISSCPGLLYLNLESCRCLPRGLKRAYRGLEEVQWCLEQLLTSPSPS

SEQ ID NO: 16635 - protein, 566 aa, Homo sapiens
MDEGGTPLLPDSLVYQIFLSLGPADVLAAGLVCRQWQAVSRDEFLWREQFYRYYQVARDVPRHPAAMSWYEEFQRLYDTVPCVEVQTLREHTDQVLHLSFSHSGYQFASCSKDCTVKIWSNDLTISLLHSADMRPYNWSYTQFSQFNKDDSLLLASGVFLGPHNSSSGEIAVISLDSFALLSRVRNKPYDVFGCWLTETSLISGNLHRIGDITSCSVLWLNNAFQDVESENVNVVKRLFKIQNLNASTVRTVMVADCSRFDSPDLLLEAGDPATSPCRIFDLGSDNEEVVAGPAPAHAKEGLRHFLDRVLEGRAQPQLSERMLETKVAELLAQGHTKPPERSATGAKSKYLIFTTGCLTYSPHQIGIKQILPHQMTTAGPVLGEGRGSDAFFDALDHVIDIHGHIIGMGLSPDNRYLYVNSRAWPNGAVVADPMQPPPIAEEIDLLVFDLKTMREVRRALRAHRAYTPNDECFFIFLDVSRDFVASGAEDRHGYIWDRHYNICLARLRHEDVVNSVVFSPQEQELLLTASDDATIKAWRSPRTMRVLQAPRPRPRTFFSWLASQRR

SEQ ID NO: 16636 - protein, 377 aa, Homo sapiens
MDEGGTPLLPDSLVYQIFLSLGPADVLAAGLVCRQWQAVSRDEFLWREQFYRYYQVARDVPRHPAAMSWYEEFQRLYDTVPCVEVQTLREHTDQVLHLSFSHSGYQFASCSKDCTVKIWSNDLTISLLHSADMRPYNWSYTQFSQFNKDDSLLLASGVFLGPHNSSSGEIAVISLDSFALLSRVRNKPYDVFGCWLTETSLISGNLHRIGDITSCSVLWLNNAFQDVESENVNVVKRLFKIQNLNASTVRTVMVADCSRFDSPDLLLEAGDPATSPCRIFDLGSDNEEVVAGPAPAHAKEGLRHFLDRVLEGRAQPQLSERMLETKVAELLAQGHTKPPERSATGAKSKYLIFTTGCLTYSPHQIGTPLPPCCPPRS

SEQ ID NO: 16637 - protein, 4061 aa, Homo sapiens
MSTLLENIFAIINLFKQYSKKDKNTDTLSKKELKELLEKEFRQILKNPDDPDMVDVFMDHLDIDHNKKIDFTEFLLMVFKLAQAYYESTRKENLPISGHKHRKHSHHDKHEDNKQEENKENRKRPSSLERRNNRKGNKGRSKSPRETGGKRHESSSEKKERKGYSPTHREEEYGKNHHNSSKKEKNKTENTRLGDNRKRLSERLEEKEDNEEGVYDYENTGRMTQKWIQSGHIATYYTIQDEAYDTTDSLLEENKIYERSRSSDGKSSSQVNRSRHENTSQVPLQESRTRKRRGSRVSQDRDSEGHSEDSERHSGSASRNHHGSAWEQSRDGSRHPRSHDEDRASHGHSADSSRQSGTRHAETSSRGQTASSHEQARSSPGERHGSGHQQSADSSRHSATGRGQASSAVSDRGHRGSSGSQASDSEGHSENSDTQSVSGHGKAGLRQQSHQESTRGRSGERSGRSGSSLYQVSTHEQPDSAHGRTGTSTGGRQGSHHEQARDSSRHSASQEGQDTIRGHPGSSRGGRQGSHHEQSVNRSGHSGSHHSHTTSQGRSDASHGQSGSRSASRQTRNEEQSGDGTRHSGSRHHEASSQADSSRHSQVGQGQSSGPRTSRNQGSSVSQDSDSQGHSEDSERWSGSASRNHHGSAQEQSRDGSRHPRSHHEDRAGHGHSADSSRKSGTRHTQNSSSGQAASSHEQARSSAGERHGSRHQLQSADSSRHSGTGHGQASSAVRDSGHRGSSGSQATDSEGHSEDSDTQSVSGHGQAGHHQQSHQESARDRSGERSRRSGSFLYQVSTHKQSESSHGWTGPSTGVRQGSHHEQARDNSRHSASQDGQDTIRGHPGSSRRGRQGSHHEQSVDRSGHSGSHHSHTTSQGRSDASRGQSGSRSASRTTRNEEQSRDGSRHSGSRHHEASSHADISRHSQAGQGQSEGSRTSRRQGSSVSQDSDSEGHSEDSERWSGSASRNHRGSAQEQSRHGSRHPRSHHEDRAGHGHSADSSRQSGTPHAETSSGGQAASSHEQARSSPGERHGSRHQQSADSSRHSGIPRRQASSAVRDSGHWGSSGSQASDSEGHSEESDTQSVSGHGQDGPHQQSHQESARDWSGGRSGRSGSFIYQVSTHEQSESAHGRTRTSTGRRQGSHHEQARDSSRHSASQEGQDTIRAHPGSRRGGRQGSHHEQSVDRSGHSGSHHSHTTSQGRSDASHGQSGSRSASRQTRKDKQSGDGSRHSGSRHHEAASWADSSRHSQVGQEQSSGSRTSRHQGSSVSQDSDSERHSDDSERLSGSASRNHHGSSREQSRDGSRHPGFHQEDRASHGHSADSSRQSGTHHTESSSHGQAVSSHEQARSSPGERHGSRHQQSADSSRHSGIGHRQASSAVRDSGHRGSSGSQVTNSEGHSEDSDTQSVSAHGQAGPHQQSHKESARGQSGESSGRSRSFLYQVSSHEQSESTHGQTAPSTGGRQGSRHEQARNSSRHSASQDGQDTIRGHPGSSRGGRQGSYHEQSVDRSGHSGYHHSHTTPQGRSDASHGQSGPRSASRQTRNEEQSGDGSRHSGSRHHEPSTRAGSSRHSQVGQGESAGSKTSRRQGSSVSQDRDSEGHSEDSERRSESASRNHYGSAREQSRHGSRNPRSHQEDRASHGHSAESSRQSGTRHAETSSGGQAASSQEQARSSPGERHGSRHQQSADSSTDSGTGRRQDSSVVGDSGNRGSSGSQASDSEGHSEESDTQSVSAHGQAGPHQQSHQESTRGQSGERSGRSGSFLYQVSTHEQSESAHGRTGPSTGGRQRSRHEQARDSSRHSASQEGQDTIRGHPGSSRGGRQGSHYEQSVDSSGHSGSHHSHTTSQERSDVSRGQSGSRSVSRQTRNEKQSGDGSRHSGSRHHEASSRADSSRHSQVGQGQSSGPRTSRNQGSSVSQDSDSQGHSEDSERWSGSASRNHLGSAWEQSRDGSRHPGSHHEDRAGHGHSADSSRQSGTRHTESSSRGQAASSHEQARSSAGERHGSHHQLQSADSSRHSGIGHGQASSAVRDSGHRGYSGSQASDSEGHSEDSDTQSVSAQGKAGPHQQSHKESARGQSGESSGRSGSFLYQVSTHEQSESTHGQSAPSTGGRQGSHYDQAQDSSRHSASQEGQDTIRGHPGPSRGGRQGSHQEQSVDRSGHSGSHHSHTTSQGRSDASRGQSGSRSASRKTYDKEQSGDGSRHSGSHHHEASSWADSSRHSLVGQGQSSGPRTSRPRGSSVSQDSDSEGHSEDSERRSGSASRNHHGSAQEQSRDGSRHPRSHHEDRAGHGHSAESSRQSGTHHAENSSGGQAASSHEQARSSAGERHGSHHQQSADSSRHSGIGHGQASSAVRDSGHRGSSGSQASDSEGHSEDSDTQSVSAHGQAGPHQQSHQESTRGRSAGRSGRSGSFLYQVSTHEQSESAHGRTGTSTGGRQGSHHKQARDSSRHSTSQEGQDTIHGHPGSSSGGRQGSHYEQLVDRSGHSGSHHSHTTSQGRSDASHGHSGSRSASRQTRNDEQSGDGSRHSGSRHHEASSRADSSGHSQVGQGQSEGPRTSRNWGSSFSQDSDSQGHSEDSERWSGSASRNHHGSAQEQLRDGSRHPRSHQEDRAGHGHSADSSRQSGTRHTQTSSGGQAASSHEQARSSAGERHGSHHQQSADSSRHSGIGHGQASSAVRDSGHRGYSGSQASDNEGHSEDSDTQSVSAHGQAGSHQQSHQESARGRSGETSGHSGSFLYQVSTHEQSESSHGWTGPSTRGRQGSRHEQAQDSSRHSASQDGQDTIRGHPGSSRGGRQGYHHEHSVDSSGHSGSHHSHTTSQGRSDASRGQSGSRSASRTTRNEEQSGDGSRHSGSRHHEASTHADISRHSQAVQGQSEGSRRSRRQGSSVSQDSDSEGHSEDSERWSGSASRNHHGSAQEQLRDGSRHPRSHQEDRAGHGHSADSSRQSGTRHTQTSSGGQAASSHEQARSSAGERHGSHHQQSADSSRHSGIGHGQASSAVRDSGHRGYSGSQASDNEGHSEDSDTQSVSAHGQAGSHQQSHQESARGRSGETSGHSGSFLYQVSTHEQSESSHGWTGPSTRGRQGSRHEQAQDSSRHSASQYGQDTIRGHPGSSRGGRQGYHHEHSVDSSGHSGSHHSHTTSQGRSDASRGQSGSRSASRTTRNEEQSGDSSRHSVSRHHEASTHADISRHSQAVQGQSEGSRRSRRQGSSVSQDSDSEGHSEDSERWSGSASRNHRGSVQEQSRHGSRHPRSHHEDRAGHGHSADRSRQSGTRHAETSSGGQAASSHEQARSSPGERHGSRHQQSADSSRHSGIPRGQASSAVRDSRHWGSSGSQASDSEGHSEESDTQSVSGHGQAGPHQQSHQESARDRSGGRSGRSGSFLYQVSTHEQSESAHGRTRTSTGRRQGSHHEQARDSSRHSASQEGQDTIRGHPGSSRRGRQGSHYEQSVDRSGHSGSHHSHTTSQGRSDASRGQSGSRSASRQTRNDEQSGDGSRHSWSHHHEASTQADSSRHSQSGQGQSAGPRTSRNQGSSVSQDSDSQGHSEDSERWSGSASRNHRGSAQEQSRDGSRHPTSHHEDRAGHGHSAESSRQSGTHHAENSSGGQAASSHEQARSSAGERHGSHHQQSADSSRHSGIGHGQASSAVRDSGHRGSSGSQASDSEGHSEDSDTQSVSAHGQAGPHQQSHQESTRGRSAGRSGRSGSFLYQVSTHEQSESAHGRAGPSTGGRQGSRHEQARDSSRHSASQEGQDTIRGHPGSRRGGRQGSYHEQSVDRSGHSGSHHSHTTSQGRSDASHGQSGSRSASRETRNEEQSGDGSRHSGSRHHEASTQADSSRHSQSGQGESAGSRRSRRQGSSVSQDSDSEAYPEDSERRSESASRNHHGSSREQSRDGSRHPGSSHRDTASHVQSSPVQSDSSTAKEHGHFSSLSQDSAYHSGIQSRGSPHSSSSYHYQSEGTERQKGQSGLVWRHGSYGSADYDYGESGFRHSQHGSVSYNSNPVVFKERSDICKASAFGKDHPRYYATYINKDPGLCGHSSDISKQLGFSQSQRYYYYE

SEQ ID NO: 16638 - protein, 4981 aa, Homo sapiens
MDLAPDRATGRPWLPLHTLSVSQLLRVFWLLSLLPGQAWVHGAEPRQVFQVLEEQPPGTLVGTIQTRPGFTYRLSESHALFAINSSTGALYTTSTIDRESLPSDVINLVVLSSAPTYPTEVRVLVRDLNDNAPVFPDPSIVVTFKEDSSSGRQVILDTATDSDIGSNGVDHRSYRIIRGNEAGRFRLDITLNPSGEGAFLHLVSKGGLDREVTPQYQLLVEVEDKGEPKRRGYLQVNVTVQDINDNPPVFGSSHYQAGVPEDAVVGSSVLQVAAADADEGTNADIRYRLQDEGTPFQMDPETGLITVREPLDFEARRQYSLTVQAMDRGVPSLTGRAEALIQLLDVNDNDPVVKFRYFPATSRYASVDENAQVGTVVALLTVTDADSPAANGNISVQILGGNEQRHFEVQSSKVPNLSLIKVASALDRERIPSYNLTVSVSDNYGAPPGAAVQARSSVASLVIFVNDINDHPPVFSQQVYRVNLSEEAPPGSYVSGISATDGDSGLNANLRYSIVSGNGLGWFHISEHSGLVTTGSSGGLDRELASQIVLNISARDQGVHPKVSYAQLVVTLLDVNDEKPVFSQPEGYDVSVVENAPTGTELLMLRATDGDLGDNGTVRFSLQEAETDRRSFRLDPVSGRLSTISSLDREEQAFYSLLVLATDLGSPPQSSMARINVSLLDINDNSPVFYPVQYFAHIKENEPGGSYITTVSATDPDLGTNGTVKYSISAGDRSRFQVNAQSGVISTRMALDREEKTAYQLQIVATDGGNLQSPNQAIVTITVLDTQDNPPVFSQVAYSFVVFENVALGYHVGSVSASTMDLNSNISYLITTGDQKGMFAINQVTGQLTTANVIDREEQSFYQLKVVASGGTVTGDTMVNITVKDLNDNSPHFLQAIESVNVVENWQAGHSIFQAKAVDPDEGVNGMVLYSLKQNPKNLFAINEKNGTISLLGPLDVHAGSYQIEILASDMGVPQLSSSVILTVYVHDVNDNSPVFDQLSYEVTLSESEPVNSRFFKVQASDKDSGANGEIAYTIAEGNTGDAFGIFPDGQLYIKSELDRELQDRYVLMVVASDRAVEPLSATVNVTVILEDVNDNRPLFNSTNYTFYFEEEQRAGSFVGKVSAVDKDFGPNGEVRYSFEMVQPDFELHAISGEITNTHQFDRESLMRRRGTAVFSFTVIATDQGIPQPLKDQATVHVYMKDINDNAPKFLKDFYQATISESAANLTQVLRVSASDVDEGNNGLIHYSIIKGNEERQFAIDSTSGQVTLIGKLDYEATPAYSLVIQAVDSGTIPLNSTCTLNIDILDENDNTPSFPKSTLFVDVLENMRIGELVSSVTATDSDSGDNADLYYSITGTNNHGTFSISPNTGSIFLAKKLDFETQSLYKLNITAKDQGRPPRSSTMSVVIHVRDFNDNPPSFPPGDIFKSIVENIPIGTSVISVTAHDPDADINGQLSYTIIQQMPRGNHFTIDEVKGTIYTNAEIDREFANLFELTVKANDQAVPIETRRYALKNVTILVTDLNDNVPMFISQNALAADPSAVIGSVLTTIMAADPDEGANGEIEYEIINGDTDTFIVDRYSGDLRVASALVPSQLIYNLIVSATDLGPERRKSTTELTIILQGLDGPVFTQPKYITILKEGEPIGTNVISIEAASPRGSEAPVEYYIVSVRCEEKTVGRLFTIGRHTGIIQTAAILDREQGACLYLVDVYAIEKSTAFPRTQRAEVEITLQDINDNPPVFPTDMLDLTVEENIGDGSKIMQLTAMDADEGANALVTYTIISGADDSFRIDPESGDLIATRRLDRERRSKYSLLVRADDGLQSSDMRINITVSDVNDHTPKFSRPVYSFDIPEDTIPGSLVAAILATDDDSGVNGEITYIVNEDDEDGIFFLNPITGVFNLTRLLDYEVQQYYILTVRAEDGGGQFTTIRVYFNILDVNDNPPIFSLNSYSTSLMENLPVGSTVLVFNVTDADDGINSQLTYSIASGDSLGQFTVDKNGVLKVLKALDRESQSFYNLVVQVHDLPQIPASRFTSTAQVSIILLDVNDNPPTFLSPKLTYIPENTPIDTVVFKAQATDPDSGPNSYIEYTLLNPLGNKFSIGTIDGEVRLTGELDREEVSNYTLTVVATDKGQPSLSSSTEVVVMVLDINDNNPIFAQALYKVEINENTLTGTDIIQVFAADGDEGTNGQVRYGIVNGNTNQEFRIDSVTGAITVAKPLDREKTPTYHLTVQATDRGSTPRTDTSTVSIVLLDINDFVPVFELSPYSVNVPENLGTLPRTILQVVARDDDRGSNSKLSYVLFGGNEDNAFTLSASGELGVTQSLDRETKERFVLMITATDSGSPALTGTGTINVIVDDVNDNVPTFASKAYFTTIPEDAPTGTDVLLVNASDADASKNAVIRIIGGNSQFTINPSTGQIITSALLDRETKDNYTLVVVCSDAGSPEPLSSSTSVLVTVTDVNDNPPRFQHHPYVTHIPSPTLPGSFVFAVTVTDADIGPNSELHYSLSGRNSEKFHIDPLRGAIMAAGPLNGASEVTFSVHVKDGGSFPKTDSTTVTVRFVNKADFPKVRAKEQTFMFPENQPVSSLVTTITGSSLRGEPMSYYIASGNLGNTFQIDQLTGQVSISQPLDFEKIQKYVVWIEARDGGFPPFSSYEKLDITVLDVNDNAPIFKEDPFISEILENLSPRKILTVSAMDKDSGPNGQLDYEIVNGNMENSFSINHATGEIRSVRPLDREKVSHYVLTIKSSDKGSPSQSTSVKVMINILDENDNAPRFSQIFSAHVPENSPLGYTVTRVTTSDEDIGINAISRYSIMDASLPFTINPSTGDIVISRPLNREDTDRYRIRVSAHDSGWTVSTDVTIFVTDINDNAPRFSRTSYYLDCPELTEIGSKVTQVFATDPDEGSNGQVFYFIKSQSEYFRINATTGEIFNKQILKYQNVTGFSNVNINRHSFIVTSSDRGKPSLISETTVTINIVDSNDNAPQFLKSKYFTPVTKNVKVGTKLIRVTAIDDKDFGLNSEVEYFISNDNHLGKFKLDNDTGWISVASSLISDLNQNFFITVTAKDKGNPPLSSQATVHITVTEENYHTPEFSQSHMSATIPESHSIGSIVRTVSARDRDAAMNGLIKYSISSGNEEGIFAINSSTGILTLAKALDYELCQKHEMTISAIDGGWVARTGYCSVTVNVIDVNDNSPVFLSDDYFPTVLENAPSGTTVIHLNATDADSGTNAVIAYTVQSSDSDLFVIDPNTGVITTQGFLDFETKQSYHLTVKAFNVPDEERCSFATVNIQLKGTNEYVPRFVSKLYYFEISEAAPKGTIVGEVFASDRDLGTDGEVHYLIFGNSRKKGFQINKKTGQIYVSGILDREKEERVSLKVLAKNFGSIRGADIDEVTVNVTVLDANDPPIFTLNIYSVQISEGVPIGTHVTFVSAFDSDSIPSWSRFSYFIGSGNENGAFSINPQTGQITVTAELDRETLPIYNLSVLAVDSGTPSATGSASLLVTLEDINDNGPMLTVSEGEVMENKRPGTLVMTLQSTDPDLPPNQGPFTYYLLSTGPATSYFSLSTAGVLSTTREIDREQIADFYLSVVTKDSGVPQMSSTGTVHITVIDQNDNPSQSRTVEIFVNYYGNLFPGGILGSVKPQDPDVLDSFHCSLTSGVTSLFSIPGGTCDLNSQPRSTDGTFDLTVLSNDGVHSTVTSNIRVFFAGFSNATVDNSILLRLGVPTVKDFLTNHYLHFLRIASSQLTGLGTAVQLYSAYEENNRTFLLAAVKRNHNQYVNPSGVATFFESIKEILLRQSGVKVESVDHDSCVHGPCQNGGSCLRRLAVSSVLKSRESLPVIIVANEPLQPFLCKCLPGYAGSWCEIDIDECLPSPCHSGGTCHNLVGGFSCSCPDGFTGRACERDINECLQSPCKNGAICQNFPGSFNCVCKTGYTGKMCESSVNYCECNPCFNGGSCQSGVDSYYCHCPFGVFGKHCELNSYGFEELSYMEFPSLDPNNNYIYVKFATIKSHALLLYNYDNQTGDRAEFLALEIAEERLRFSYNLGSGTYKLTTMKKVSDGHFHTVIARRAGMAASLTVDSCSENQEPGYCTVSNVAVSDDWTLDVQPNRVTVGGIRSLEPILQRRGHVESHDFVGCIMEFAVNGRPLEPSQALAAQGILDQCPRLEGACTRSPCQHGGTCMDYWSWQQCHCKEGLTGKYCEKSVTPDTALSLEGKGRLDYHMSQNEKREYLLRQSLRGAMLEPFGVNSLEVKFRTRSENGVLIHIQESSNYTTVKIKNGKVYFTSDAGIAGKVERNIPEVYVADGHWHTFLIGKNGTATVLSVDRIYNRDIIHPTQDFGGLDVLTISLGGIPPNQAHRDAQTAGFDGCIASMWYGGESLPFSGKHSLASISKTDPSVKIGCRGPNICASNPCWGDLLCINQWYAYRCVPPGDCASHPCQNGGSCEPGLHSGFTCSCPDSHTGRTCEMVVACLGVLCPQGKVCKAGSPAGHVCVLSQGPEEISLPLWAVPAIVGSCATVLALLVLSLILCNQCRGKKAKNPKEEKKPKEKKKKGSENVAFDDPDNIPPYGDDMTVRKQPEGNPKPDIIERENPYLIYDETDIPHNSETIPSAPLASPEQEIEHYDIDNASSIAPSDADIIQHYKQFRSHTPKFSIQRHSPLGFARQSPMPLGASSLTYQPSYGQGLRTSSLSHSACPTPNPLSRHSPAPFSKSSTFYRNSPARELHLPIRDGNTLEMHGDTCQPGIFNYATRLGRRSKSPQAMASHGSRPGSRLKQPIGQIPLESSPPVGLSIEEVERLNTPRPRNPSICSADHGRSSSEEDCRRPLSRTRNPADGIPAPESSSDSDSHESFTCSEMEYDREKPMVYTSRMPKLSQVNESDADDEDNYGARLKPRRYHGRRAEGGPVGTQAAAPGTADNTLPMKLGQQAGTFNWDNLLNWGPGFGHYVDVFKDLASLPEKAAANEEGKAGTTKPVPKDGEAEQYV

SEQ ID NO: 16639 - protein, 3222 aa, Homo sapiens
MVTTVVAVGDTLAQPLAAAEVFIVEITLQDINDNPPVFPTDMLDLTVEENIGDGSKIMQLTAMDADEGANALVTYTIISGADDSFRIDPESGDLIATRRLDRERRSKYSLLVRADDGLQSSDMRINITVSDVNDHTPKFSRPVYSFDIPEDTIPGSLVAAILATDDDSGVNGEITYIVNEDDEDGIFFLNPITGVFNLTRLLDYEVQQYYILTVRAEDGGGQFTTIRVYFNILDVNDNPPIFSLNSYSTSLMENLPVGSTVLVFNVTDADDGINSQLTYSIASGDSLGQFTVDKNGVLKVLKALDRESQSFYNLVVQVHDLPQIPASRFTSTAQVSIILLDVNDNPPTFLSPKLTYIPENTPIDTVVFKAQATDPDSGPNSYIEYTLLNPLGNKFSIGTIDGEVRLTGELDREEVSNYTLTVVATDKGQPSLSSSTEVVVMVLDINDNNPIFAQALYKVEINENTLTGTDIIQVFAADGDEGTNGQVRYGIVNGNTNQEFRIDSVTGAITVAKPLDREKTPTYHLTVQATDRGSTPRTDTSTVSIVLLDINDFVPVFELSPYSVNVPENLGTLPRTILQVVARDDDRGSNSKLSYVLFGGNEDNAFTLSASGELGVTQSLDRETKERFVLMITATDSGSPALTGTGTINVIVDDVNDNVPTFASKAYFTTIPEDAPTGTDVLLVNASDADASKNAVIRIIGGNSQFTINPSTGQIITSALLDRETKDNYTLVVVCSDAGSPEPLSSSTSVLVTVTDVNDNPPRFQHHPYVTHIPSPTLPGSFVFAVTVTDADIGPNSELHYSLSGRNSEKFHIDPLRGAIMAAGPLNGASEVTFSVHVKDGGSFPKTDSTTVTVRFVNKADFPKVRAKEQTFMFPENQPVSSLVTTITGSSLRGEPMSYYIASGNLGNTFQIDQLTGQVSISQPLDFEKIQKYVVWIEARDGGFPPFSSYEKLDITVLDVNDNAPIFKEDPFISEILENLSPRKILTVSAMDKDSGPNGQLDYEIVNGNMENSFSINHATGEIRSVRPLDREKVSHYVLTIKSSDKGSPSQSTSVKVMINILDENDNAPRFSQIFSAHVPENSPLGYTVTRVTTSDEDIGINAISRYSIMDASLPFTINPSTGDIVISRPLNREDTDRYRIRVSAHDSGWTVSTDVTIFVTDINDNAPRFSRTSYYLDCPELTEIGSKVTQVFATDPDEGSNGQVFYFIKSQSEYFRINATTGEIFNKQILKYQNVTGFSNVNINRHSFIVTSSDRGKPSLISETTVTINIVDSNDNAPQFLKSKYFTPVTKNVKVGTKLIRVTAIDDKDFGLNSEVEYFISNDNHLGKFKLDNDTGWISVASSLISDLNQNFFITVTAKDKGNPPLSSQATVHITVTEENYHTPEFSQSHMSATIPESHSIGSIVRTVSARDRDAAMNGLIKYSISSGNEEGIFAINSSTGILTLAKALDYELCQKHEMTISAIDGGWVARTGYCSVTVNVIDVNDNSPVFLSDDYFPTVLENAPSGTTVIHLNATDADSGTNAVIAYTVQSSDSDLFVIDPNTGVITTQGFLDFETKQSYHLTVKAFNVPDEERCSFATVNIQLKGTNEYVPRFVSKLYYFEISEAAPKGTIVGEVFASDRDLGTDGEVHYLIFGNSRKKGFQINKKTGQIYVSGILDREKEERVSLKVLAKNFGSIRGADIDEVTVNVTVLDANDPPIFTLNIYSVQISEGVPIGTHVTFVSAFDSDSIPSWSRFSYFIGSGNENGAFSINPQTGQITVTAELDRETLPIYNLSVLAVDSGTPSATGSASLLVTLEDINDNGPMLTVSEGEVMENKRPGTLVMTLQSTDPDLPPNQGPFTYYLLSTGPATSYFSLSTAGVLSTTREIDREQIADFYLSVVTKDSGVPQMSSTGTVHITVIDQNDNPSQSRTVEIFVNYYGNLFPGGILGSVKPQDPDVLDSFHCSLTSGVTSLFSIPGGTCDLNSQPRSTDGTFDLTVLSNDGVHSTVTSNIRVFFAGFSNATVDNSILLRLGVPTVKDFLTNHYLHFLRIASSQLTGLGTAVQLYSAYEENNRTFLLAAVKRNHNQYVNPSGVATFFESIKEILLRQSGVKVESVDHDSCVHGPCQNGGSCLRRLAVSSVLKSRESLPVIIVANEPLQPFLCKCLPGYAGSWCEIDIDECLPSPCHSGGTCHNLVGGFSCSCPDGFTGRACERDINECLQSPCKNGAICQNFPGSFNCVCKTGYTGVFGKHCELNSYGFEELSYMEFPSLDPNNNYIYVKFATIKSHALLLYNYDNQTGDRAEFLALEIAEERLRFSYNLGSGTYKLTTMKKVSDGHFHTVIARRAGMAASLTVDSCSENQEPGYCTVSNVAVSDDWTLDVQPNRVTVGGIRSLEPILQRRGHVESHDFVGCIMEFAVNGRPLEPSQALAAQGILDQYGDFISYCFKEKKCKKVCFTVTPDTALSLEGKGRLDYHMSQNEKREYLLRQSLRGAMLEPFGVNSLEVKFRTRSENGVLIHIQESSNYTTVKIKNGKVYFTSDAGIAGKVERNIPEVYVADGHWHTFLIGKNGTATVLSVDRIYNRDIIHPTQDFGGLDVLTISLGGIPPNQAHRDAQTAGFDGCIASMWYGGESLPFSGKHSLASISKTDPSVKIGCRGPNICASNPCWGDLLCINQWYAYRCVPPGDCASHPCQNGGSCEPGLHSGFTCSCPDSHTGRTCEMVVACLGVLCPQGKVCKAGSPAGHVCVLSQGPEEISLPLWAVPAIVGSCATVLALLVLSLILCNQCRGKKAKNPKEEKKPKEKKKKGSENVAFDDPDNIPPYGDDMTVRKQPEGNPKPDIIERENPYLIYDETDIPHNSETIPSAPLASPEQEIEHYDIDNASSIAPSDADIIQHYKQFRSHTPKFSIQRHSPLGFARQSPMPLGASSLTYQPSYGQGLRTSSLSHSACPTPNPLSRHSPAPFSKSSTFYRNSPARELHLPIRDGNTLEMHGDTCQPGIFNYATRLGRRSKSPQAMASHGSRPGSRLKQPIGQIPLESSPPVGLSIEEVERLNTPRPRNPSICSADHGRSSSEEDCRRPLSRTRNPADGIPAPESSSDSDSHESFTCSEMEYDREKPMVYTSRMPKLSQVNESDADDEDNYGARLKPRRYHGRRAEGGPVGTQAAAPGTADNTLPMKLGQQAGTFNWDNLLNWGPGFGHYVDVFKDLASLPEKAAANEEGKAGTTKPVPKDGEAEQYV

SEQ ID NO: 16640 - protein, 4980 aa, Homo sapiens
MDLAPDRATGRPWLPLHTLSVSQLLRVFWLLSLLPGQAWVHGAEPRQVFQVLEEQPPGTLVGTIQTRPGFTYRLSESHALFAINSSTGALYTTSTIDRESLPSDVINLVVLSSAPTYPTEVRVLVRDLNDNAPVFPDPSIVVTFKEDSSSGRQVILDTATDSDIGSNGVDHRSYRIIRGNEAGRFRLDITLNPSGEGAFLHLVSKGGLDREVTPQYQLLVEVEDKGEPKRRGYLQVNVTVQDINDNPPVFGSSHYQAGVPEDAVVGSSVLQVAAADADEGTNADIRYRLQDEGTPFQMDPETGLITVREPLDFEARRQYSLTVQAMDRGVPSLTGRAEALIQLLDVNDNDPVVKFRYFPATSRYASVDENAQVGTVVALLTVTDADSPAANGNISVQILGGNEQRHFEVQSSKVPNLSLIKVASALDRERIPSYNLTVSVSDNYGAPPGAAVQARSSVASLVIFVNDINDHPPVFSQQVYRVNLSEEAPPGSYVSGISATDGDSGLNANLRYSIVSGNGLGWFHISEHSGLVTTGSSGGLDRELASQIVLNISARDQGVHPKVSYAQLVVTLLDVNDEKPVFSQPEGYDVSVVENAPTGTELLMLRATDGDLGDNGTVRFSLQEAETDRRSFRLDPVSGRLSTISSLDREEQAFYSLLVLATDLGSPPQSSMARINVSLLDINDNSPVFYPVQYFAHIKENEPGGSYITTVSATDPDLGTNGTVKYSISAGDRSRFQVNAQSGVISTRMALDREEKTAYQLQIVATDGGNLQSPNQAIVTITVLDTQDNPPVFSQVAYSFVVFENVALGYHVGSVSASTMDLNSNISYLITTGDQKGMFAINQVTGQLTTANVIDREEQSFYQLKVVASGGTVTGDTMVNITVKDLNDNSPHFLQAIESVNVVENWQAGHSIFQAKAVDPDEGVNGMVLYSLKQNPKNLFAINEKNGTISLLGPLDVHAGSYQIEILASDMGVPQLSSSVILTVYVHDVNDNSPVFDQLSYEVTLSESEPVNSRFFKVQASDKDSGANGEIAYTIAEGNTGDAFGIFPDGQLYIKSELDRELQDRYVLMVVASDRAVEPLSATVNVTVILEDVNDNRPLFNSTNYTFYFEEEQRAGSFVGKVSAVDKDFGPNGEVRYSFEMVQPDFELHAISGEITNTHQFDRESLMRRRGTAVFSFTVIATDQGIPQPLKDQATVHVYMKDINDNAPKFLKDFYQATISESAANLTQVLRVSASDVDEGNNGLIHYSIIKGNEERQFAIDSTSGQVTLIGKLDYEATPAYSLVIQAVDSGTIPLNSTCTLNIDILDENDNTPSFPKSTLFVDVLENMRIGELVSSVTATDSDSGDNADLYYSITGTNNHGTFSISPNTGSIFLAKKLDFETQSLYKLNITAKDQGRPPRSSTMSVVIHVRDFNDNPPSFPPGDIFKSIVENIPIGTSVISVTAHDPDADINGQLSYTIIQQMPRGNHFTIDEVKGTIYTNAEIDREFANLFELTVKANDQAVPIETRRYALKNVTILVTDLNDNVPMFISQNALAADPSAVIGSVLTTIMAADPDEGANGEIEYEIINGDTDTFIVDRYSGDLRVASALVPSQLIYNLIVSATDLGPERRKSTTELTIILQGLDGPVFTQPKYITILKEGEPIGTNVISIEAASPRGSEAPVEYYIVSVRCEEKTVGRLFTIGRHTGIIQTAAILDREQGACLYLVDVYAIEKSTAFPRTQRAEVEITLQDINDNPPVFPTDMLDLTVEENIGDGSKIMQLTAMDADEGANALVTYTIISGADDSFRIDPESGDLIATRRLDRERRSKYSLLVRADDGLQSSDMRINITVSDVNDHTPKFSRPVYSFDIPEDTIPGSLVAAILATDDDSGVNGEITYIVNEDDEDGIFFLNPITGVFNLTRLLDYEVQQYYILTVRAEDGGGQFTTIRVYFNILDVNDNPPIFSLNSYSTSLMENLPVGSTVLVFNVTDADDGINSQLTYSIASGDSLGQFTVDKNGVLKVLKALDRESQSFYNLVVQVHDLPQIPASRFTSTAQVSIILLDVNDNPPTFLSPKLTYIPENTPIDTVVFKAQATDPDSGPNSYIEYTLLNPLGNKFSIGTIDGEVRLTGELDREEVSNYTLTVVATDKGQPSLSSSTEVVVMVLDINDNNPIFAQALYKVEINENTLTGTDIIQVFAADGDEGTNGQVRYGIVNGNTNQEFRIDSVTGAITVAKPLDREKTPTYHLTVQATDRGSTPRTDTSTVSIVLLDINDFVPVFELSPYSVNVPENLGTLPRTILQVVARDDDRGSNSKLSYVLFGGNEDNAFTLSASGELGVTQSLDRETKERFVLMITATDSGSPALTGTGTINVIVDDVNDNVPTFASKAYFTTIPEDAPTGTDVLLVNASDADASKNAVIRIIGGNSQFTINPSTGQIITSALLDRETKDNYTLVVVCSDAGSPEPLSSSTSVLVTVTDVNDNPPRFQHHPYVTHIPSPTLPGSFVFAVTVTDADIGPNSELHYSLSGRNSEKFHIDPLRGAIMAAGPLNGASEVTFSVHVKDGGSFPKTDSTTVTVRFVNKADFPKVRAKEQTFMFPENQPVSSLVTTITGSSLRGEPMSYYIASGNLGNTFQIDQLTGQVSISQPLDFEKIQKYVVWIEARDGGFPPFSSYEKLDITVLDVNDNAPIFKEDPFISEILENLSPRKILTVSAMDKDSGPNGQLDYEIVNGNMENSFSINHATGEIRSVRPLDREKVSHYVLTIKSSDKGSPSQSTSVKVMINILDENDNAPRFSQIFSAHVPENSPLGYTVTRVTTSDEDIGINAISRYSIMDASLPFTINPSTGDIVISRPLNREDTDRYRIRVSAHDSGWTVSTDVTIFVTDINDNAPRFSRTSYYLDCPELTEIGSKVTQVFATDPDEGSNGQVFYFIKSQSEYFRINATTGEIFNKQILKYQNVTGFSNVNINRHSFIVTSSDRGKPSLISETTVTINIVDSNDNAPQFLKSKYFTPVTKNVKVGTKLIRVTAIDDKDFGLNSEVEYFISNDNHLGKFKLDNDTGWISVASSLISDLNQNFFITVTAKDKGNPPLSSQATVHITVTEENYHTPEFSQSHMSATIPESHSIGSIVRTVSARDRDAAMNGLIKYSISSGNEEGIFAINSSTGILTLAKALDYELCQKHEMTISAIDGGWVARTGYCSVTVNVIDVNDNSPVFLSDDYFPTVLENAPSGTTVIHLNATDADSGTNAVIAYTVQSSDSDLFVIDPNTGVITTQGFLDFETKQSYHLTVKAFNVPDEERCSFATVNIQLKGTNEYVPRFVSKLYYFEISEAAPKGTIVGEVFASDRDLGTDGEVHYLIFGNSRKKGFQINKKTGQIYVSGILDREKEERVSLKVLAKNFGSIRGADIDEVTVNVTVLDANDPPIFTLNIYSVQISEGVPIGTHVTFVSAFDSDSIPSWSRFSYFIGSGNENGAFSINPQTGQITVTAELDRETLPIYNLSVLAVDSGTPSATGSASLLVTLEDINDNGPMLTVSEGEVMENKRPGTLVMTLQSTDPDLPPNQGPFTYYLLSTGPATSYFSLSTAGVLSTTREIDREQIADFYLSVVTKDSGVPQMSSTGTVHITVIDQNDNPSQSRTVEIFVNYYGNLFPGGILGSVKPQDPDVLDSFHCSLTSGVTSLFSIPGGTCDLNSQPRSTDGTFDLTVLSNDGVHSTVTSNIRVFFAGFSNATVDNSILLRLGVPTVKDFLTNHYLHFLRIASSQLTGLGTAVQLYSAYEENNRTFLLAAVKRNHNQYVNPSGVATFFESIKEILLRQSGVKVESVDHDSCVHGPCQNGGSCLRRLAVSSVLKSRESLPVIIVANEPLQPFLCKCLPGYAGSWCEIDIDECLPSPCHSGGTCHNLVGGFSCSCPDGFTGRACERDINECLQSPCKNGAICQNFPGSFNCVCKTGYTGKMCESSVNYCECNPCFNGGSCQSGVDSYYCHCPFGVFGKHCELNSYGFEELSYMEFPSLDPNNNYIYVKFATIKSHALLLYNYDNQTGDRAEFLALEIAEERLRFSYNLGSGTYKLTTMKKVSDGHFHTVIARRAGMAASLTVDSCSENQEPGYCTVSNVAVSDDWTLDVQPNRVTVGGIRSLEPILQRRGHVESHDFVGCIMEFAVNGRPLEPSQALAAQGILDQCPRLEGACTRSPCQHGGTCMDYWSWQQCHCKEGLTGKYCEKSVTPDTALSLEGKGRLDYHMSQNEKREYLLRQSLRGAMLEPFGVNSLEVKFRTRSENGVLIHIQESSNYTTVKIKNGKVYFTSDAGIAGKVERNIPEVYVADGHWHTFLIGKNGTATVLSVDRIYNRDIIHPTQDFGGLDVLTISLGGIPPNQAHRDAQTGFDGCIASMWYGGESLPFSGKHSLASISKTDPSVKIGCRGPNICASNPCWGDLLCINQWYAYRCVPPGDCASHPCQNGGSCEPGLHSGFTCSCPDSHTGRTCEMVVACLGVLCPQGKVCKAGSPAGHVCVLSQGPEEISLPLWAVPAIVGSCATVLALLVLSLILCNQCRGKKAKNPKEEKKPKEKKKKGSENVAFDDPDNIPPYGDDMTVRKQPEGNPKPDIIERENPYLIYDETDIPHNSETIPSAPLASPEQEIEHYDIDNASSIAPSDADIIQHYKQFRSHTPKFSIQRHSPLGFARQSPMPLGASSLTYQPSYGQGLRTSSLSHSACPTPNPLSRHSPAPFSKSSTFYRNSPARELHLPIRDGNTLEMHGDTCQPGIFNYATRLGRRSKSPQAMASHGSRPGSRLKQPIGQIPLESSPPVGLSIEEVERLNTPRPRNPSICSADHGRSSSEEDCRRPLSRTRNPADGIPAPESSSDSDSHESFTCSEMEYDREKPMVYTSRMPKLSQVNESDADDEDNYGARLKPRRYHGRRAEGGPVGTQAAAPGTADNTLPMKLGQQAGTFNWDNLLNWGPGFGHYVDVFKDLASLPEKAAANEEGKAGTTKPVPKDGEAEQYV

SEQ ID NO: 16641 - protein, 1249 aa, Homo sapiens
MSSMWSEYTIGGVKIYFPYKAYPSQLAMMNSILRGLNSKQHCLLESPTGSGKSLALLCSALAWQQSLSGKPADEGVSEKAEVQLSCCCACHSKDFTNNDMNQGTSRHFNYPSTPPSERNGTSSTCQDSPEKTTLAAKLSAKKQASIYRDENDDFQVEKKRIRPLETTQQIRKRHCFGTEVHNLDAKVDSGKTVKLNSPLEKINSFSPQKPPGHCSRCCCSTKQGNSQESSNTIKKDHTGKSKIPKIYFGTRTHKQIAQITRELRRTAYSGVPMTILSSRDHTCVHPEVVGNFNRNEKCMELLDGKNGKSCYFYHGVHKISDQHTLQTFQGMCKAWDIEELVSLGKKLKACPYYTARELIQDADIIFCPYNYLLDAQIRESMDLNLKEQVVILDEAHNIEDCARESASYSVTEVQLRFARDELDSMVNNNIRKKDHEPLRAVCCSLINWLEANAEYLVERDYESACKIWSGNEMLLTLHKMGITTATFPILQGHFSAVLQKEEKISPIYGKEEAREVPVISASTQIMLKGLFMVLDYLFRQNSRFADDYKIAIQQTYSWTNQIDISDKNGLLVLPKNKKRSRQKTAVHVLNFWCLNPAVAFSDINGKVQTIVLTSGTLSPMKSFSSELGVTFTIQLEANHIIKNSQVWVGTIGSGPKGRNLCATFQNTETFEFQDEVGALLLSVCQTVSQGILCFLPSYKLLEKLKERWLSTGLWHNLELVKTVIVEPQGGEKTNFDELLQVYYDAIKYKGEKDGALLVAVCRGKVSEGLDFSDDNARAVITIGIPFPNVKDLQVELKRQYNDHHSKLRGLLPGRQWYEIQAYRALNQALGRCIRHRNDWGALILVDDRFRNNPSRYISGLSKWVRQQIQHHSTFESALESLAEFSKKHQKVLNVSIKDRTNIQDNESTLEVTSLKYSTSPYLLEAASHLSPENFVEDEAKICVQELQCPKIITKNSPLPSSIISRKEKNDPVFLEEAGKAEKIVISRSTSPTFNKQTKRVSWSSFNSLGQYFTGKIPKATPELGSSENSASSPPRFKTEKMESKTVLPFTDKCESSNLTVNTSFGSCPQSETIISSLKIDATLTRKNHSEHPLCSEEALDPDIELSLVSEEDKQSTSNRDFETEAEDESIYFTPELYDPEDTDEEKNDLAETDRGNRLANNSDCILAKDLFEIRTIKEVDSAREVKAEDCIDTKLNGILHIEESKIDDIDGNVKTTWINELELGKTHEIEIKNFKPSPSKNKGMFPGFK

SEQ ID NO: 16642 - protein, 994 aa, Homo sapiens
MSSMWSEYTIGGVKIYFPYKAYPSQLAMMNSILRGLNSKQHCLLESPTGSGKSLALLCSALAWQQSLSGKPADEGVSEKAEVQLSCCCACHSKDFTNNDMNQGTSRHFNYPSTPPSERNGTSSTCQDSPEKTTLAAKLSAKKQASIYRDENDDFQVEKKRIRPLETTQQIRKRHCFGTEVHNLDAKVDSGKTVKLNSPLEKINSFSPQKPPGHCSRCCCSTKQGNSQESSNTIKKDHTGKSKIPKIYFGTRTHKQIAQITRELRRTAYSGVPMTILSSRDHTCVHPEVVGNFNRNEKCMELLDGKNGKSCYFYHGVHKISDQHTLQTFQGMCKAWDIEELVSLGKKLKACPYYTARELIQDADIIFCPYNYLLDAQIRESMDLNLKEQVVILDEAHNIEDCARESASYSVTEVQLRFARDELDSMVNNNIRKKDHEPLRAVCCSLINWLEANAEYLVERDYESACKIWSGNEMLLTLHKMGITTATFPILQGHFSAVLQKEEKISPIYGKEEAREVPVISASTQIMLKGLFMVLDYLFRQNSRFADDYKIAIQQTYSWTNQIDISDKNGLLVLPKNKKRSRQKTAVHVLNFWCLNPAVAFSDINGKVQTIVLTSGTLSPMKSFSSELGVTFTIQLEANHIIKNSQVWVGTIGSGPKGRNLCATFQNTETFEFQDEVGALLLSVCQTVSQGILCFLPSYKLLEKLKERWLSTGLWHNLELVKTVIVEPQGGEKTNFDELLQVYYDAIKYKGEKDGALLVAVCRGKVSEGLDFSDDNARAVITIGIPFPNVKDLQVELKRQYNDHHSKLRGLLPGRQWYEIQAYRALNQALGRCIRHRNDWGALILVDDRFRNNPSRYISGLSKWVRQQIQHHSTFESALESLAEFSKKHQKVLNVSIKDRTNIQDNESTLEVTSLKYSTSPYLLEAASHLSPENFVEDEAKICVQELQCPKIITKNSPLPSSIISRKEKSMKSSSHLPLIEKSFIIFSEMIFIWV
